United States Patent Application Publication US 2026/0092266 A1 - sequence listing, part 23

SEQ ID NO: 3779 - DNA, 22963 bp, synthetic construct
  misc_feature 1..22963: note = Synthetic
  source 1..22963: mol_type = other DNA
acaaaaactttacctaaagagatgttacctatcttaactaagcctttgatccattatggggttgatgaagctttagaagcaggaatggaaaatatgggctttgtcacagggcgtggaaaaagagctttagaggattattttgatatttcttatgaacttgaacatcaaatttcaggtacaaaaaaagaatacttgcttgatgaaattcgctctttgatcaatcgttgtacctttacttttacaagacaaaatcaaatgaaaggattaggtgatgcggttttaaaaggtaaacctttggttggtgatgaagcttttggcgtaattttggctgatgatttgtgtgtcaacgaagaaggcttaaatgttatggctcaaatggtaaaaatttatgaaaaatatcgctgcaccatcatagctgtgatggaagtaccaaaagaacaagtttcaaactatggagtaatttctggaaattttgtagaagaaaatcttatcatggttaattctatgatagaaaaaccaagtcctgatgaagctccaagtaatcttgctatcataggaagatatattttaactcctgatatttttggaattttagaaaatactaaagcgggaaaaaatggcgaaattcaacttaccgacgcgcttttaactcaagcaaccaatggtatggttttagcttataaatttcaagggaaacgctttgattgtggaagtgtagaaggctttgtagaggctacaaattatttttacgagaaaaataaatgttaaacaatacacttttttttaaacaaagtgaaattcacactataagctcttatgcaaatcgtattaatgatgaggtaaaaagtggagatatagggtattatcatcttattgacacaagtttgaatttaatcgatgagagcttgcaatttattcaagataaagagtatgtaaaaaatatcgttttagtgggaatgggaggttcaagttgtggtgtaaaagccttgcgtgatatgctttttaatgaaaaaagcaaccaaagagagctttttatactcgataacacaagctcgcattcttttaataagactttagaaaaaatcaagcttgaagaaagtttgtttttaatcatcagcaaaacaggtagtactatagaagttgtatcgctttttaaacttcttattgaacattttaaacttgatatgcaagaattaaaaaaatactttgtttttattaccgataaggattcaaaacttcatcaagaaggtgaaaatttaggtattaaatgcttttttatccctgcaaatgtaggaggtcgttttagcatactttcagccgtaggtatagttccactttgtttttgtggctataatgccaaagctcttttagaaggagctaaagcttgttttgaagatttttttactcacaaaaaagatgaaattttacaaaaagcctatcattattgtacacacaaaaatgccaatatcaatgtacttttttcatatagcgatgcttttaaaggctttaatgaatggtatatccagcttattgctgaaagtttaggtaaaaagcaaggctataaacgcataggtttaactcctattgcactcattggcgcaagagatcaacatagttttttacaactcatcatggatggacctaaaaataaaactgtaacttttttaaaaatcaaagacgctcaaaaagcacctattatccctgatattcattttaaatttttagattctttaagtaataaagtcaatcttcacgaacttttaaacgctcaatgtgatgcaactatgcacgctttaatcgctgaaaatttgagtgttgatgtgatagaacttgaaaaacttgacgcttggcatgcgggatatttgatgtattattatgaactttttacttcaacttgcggtgttatgctagggattaacacttatgatcaacctggtgtggaagttggaaagttgatcttaaaaaatatattaaattcttaatcaaaattcattaaaaaagagtataatgattttaaattaaaattataataaaaatttttaattaataataattattatttaagaattttatgttataattttaaaaatcaaaaaaggagtcaatcatgtcagttacaaaacaattattacaaatgcaagcagatgctcatcatctatgggttaaatttcataattatcactggaatgtaaaaggtttgcaatttttttctatacacgagtacacagaaaaagcttatgaagaaatggcagaactttttgatagttgtgctgaaagagttttacaacttggcgaaaaagccatcacttgccaaaaagttttaatggaaaatgcaaaaagtccaaaagttgcaaaagattgctttactccacttgaagtcatagaactgatcaaacaagattatgaatatcttttagcagaatttaaaaaactcaatgaagcagcagaaaaagaaagtgataccacaacagctgcttttgcgcaagaaaatatcgcaaaatatgaaaaaagtctttggatgataggcgctactttgcaaggtgcttgcaaaatgtaatttaaggggctttatgccccaattatacaaactaggttataatatccttttttaaaggataaaattgaaagtacttaattttttttatgaaaaccatcctaaatttgaagtaagttatgaaagaaaaaatcaaatttcaaaaccaaatattatcataaaaggcccacgattttgtggtaaaaaaacacttatttttaattttttatctcaatttaaagcaagtgaaattttgtttttagatttatatgatacacgctttgaaaaacaaagtttagaaagacttgctgattttttgaatgaaaatttacaaattaaaattctttgcctttataatttggattttatccctaatttagaaaaaattaaaattcccatcatcttaagtacaaatataaaagatttaaatataaatgggtttgaagaacttgaacttgattattttgattttgaagaatttattagtgtaagtaagaaaaatttacctataaataatttagtaggtctttttttgcaaagtggacgcagtaaatttggagaaaaaaacatacttctaagacaaagctttactcttttagaattagaaattttaaagtatttagctttaaatttgggtcagcaaatcagtatttctaagatatttatagaacttaaaaaaatattaaaaacttcaaaagatagtgtttatcaagctataaaaaaattagaaaatacttatgtgatctatactttaaaacatgatgaaaaaaaacttcaaaagatttattttaaagattttggcctaagaaataatctttgtatttcaaaggatttttcgcatttatttgaaaatttagttttaagcgagttgtttaaatttaaagaagattttttttataacaaatactttaacttttatagccaaatatctaaaattgcttatatttcaagtccaactttagatattgatttgattaaattacgtgctaagaaaattttaccaaaggctttagaacttggaatttttcatgtgatttttatcactctttcaagcgaggatagtttttttgagcaaggggttaaatttgaagtcatatcttttgataaattttcacttggattttaggtgttgtttgagtttgtatcgtatttttcaaggttgtatcgtttgatgatttttgtaataagattgatataatatcccttgcgttcagaataagaatctaaagttttaatagcctctagccctgttatctctttgccttcgctttcaaatttagctcttgcatcgcgaaacttttcataagcaaaatgacgatttaaatttaaaacataagagtcaacactatcttgcagactatcaaaaattttaattttgtgttttttatctggatgtcttaaatcaggaattaaacctttctcaccccaagtccattctccaaaaagattgtttgcttctcttgcgaagcgactggtacctgtagcactttcaactaaagcttgggctatacccatggattttggaattttttgaatacgttttttatattctgcaaaatcataaagattttcaatgcgatatttgttttttatcgtgataagtttttcaagatttatttggtttgaagtcctaaagcctgttttgtaagcatctttaaaaaaggcttcgataaaagctctttcttgttcaatttttttaaagctttgatcaaacatttcattcatttttataaaaaaaatttgtcttttttgatctatatcaagtttgtaatattcttctccaaatccactctttagatcatcagcaaaaagtgggattagaaaaagactaaaaaaaattataattggcttcaaaacaatactttacctttccttcaaaaaacaattcttcatttttatatgcaaaccctacctcttcaccacttttaggagttattttaactttattttgtacttttttatttaaaaatgccagataaaaacaagcccccattcctgtgccacaagctaaggtttcatcttcaactccgcgttcataggtgcgaacttttaaatgattttcatctaaaatttttacaaaattaacattggcattatatttttgtctcattttttgacaaagcattgtatcaaattcatctaaattttgacaaaaatgtactagatgtggaactccagtgttgcaaagttgccaagtttttcctaactcttcaaaagtattttgcacgctttttattttgcctaaagatacttcaactttatcttgatttacctttgcttttattattcctgcaccggttaaaaaactcatgttaggatttattttgttaatatgatgtgcaaaatgtgccgcagcccttgagccattgccacacatagcagcccttgagccatcgttattataaaattcccattcaaagtcgtatttttcatgaggcaatattacgataaagccatccgcacctataccctcataacgattacaaagttctttagctaaagcacttctatcttcttttctatcagcatttgttatgacaaaatcattcccacttgcacaatatttataaaatttcacatttttcctttagaaatttcttgtattactttaacacattcttgcctaaaatcgacataagaattagtatttttaatgataaaatctgcttttttaagtttttcttcaatatctatttgagaatcaagtctcacttttgcagcttctaagctgagcttatctctttgcatgattcttttaaggcttaattctttaggtgtgtaaattacaatgactttgcctaaattttcataagcaccgctttcaaaaaaaagaggaatttctacaaaaaaagctttattttctttatctagaatttgcatttgttctaaaattttagctcgaattttaggatgagtgaaattttctaaggtttttttagcttctttgttgttaaaaacaatttctccaaggatttttctatcgattttcttttcttttgtgagtaaattttttaagttaaagggagaaaaaatcttttcaagttctaaagcattttcatctaaaattttatgagcaattttatctgcgctaatgcttttaaagcctaaagaattcgctatttctataaaagtgcttttaccacaagcaattgaagcggttacaaaaaaagcatttttcatcttatgccttattaaaacttttttcgttaaaatacctttttagttcttaaaggaaaataaatgaaaatttcatatgaagatgcaggcgtaagtatagataatggaaatgcctttgtagaggctataaaacctttggttaaagaaacttttaatgataatgttgtaggcggaattggttcttttgctggtgcttttagaatgccaagtggttttaaaaagcctgtgattttaggtgcaacagatggtgttggtaccaagcttcgcttggcaattgatgctaaaaaatatgatactatagggcaagatttagtagcaatgtgtgtgaatgatttgatttgtaattttgctacgcctttgtttttcctagattattatgctacagccaagctcgaagtagaagtagcaaaggctgttgtatcaggcattgccaagggatgtaagatggcaaattgtgcattaattggcggagaaactgctgaaatgcctggaatgtatgcaaaagatgattttgatcttgcgggttttgcagtgggtatggctgaagaagatgagatcgatagaagtaaatttgttaaaaatggtgatattttattggcacttcctagttcaggacttcattcaaatggttattctttagctagaaaagtactttttgaaagtttaaaattaaaatttgatgacaagataggggataaaaatttaattgatattttattagagcctacaaggatttatgtgcgtgattttcttacattaaagccttatattagtgctctagctcatattacagggggtggtttagtagaaaatttaccacgcgttttgcctcgtggtatgggtgcaactatacgcaaacatcatcttaaaactcctgaaattttttatactataggacaggctgtagaagaaagcgaaatgtatagaagctttaacatgggagtgggtttagtaatggttgtagatccttctaatgtaagtaaggttttagaaaattcagatgcctttattatcggcgaaatttgcattaatgaaggtattgttttagagtgaaaacaaattattatgattatttatgtgctaaaatgtatgtaattttgcccataaaagcccataaagacaaactaaaattttatctttcttatgtaaataagaaagataaaatttttagagttaatgtgtggaagtgggcggttttgataaaaattgccaaagatgataaaacgaaatatttttgttcgaatgtattaaataaagggtaaaatgcacaatttaaatgaagctttgtttcaaaaaaagataaaagaaattcgcttaaaagcaatagcgagtattatttgtgggtttttaggtatcattccttatcttggagttttatttgttcttgcgagttggattttattttttattgtgctttatgatttaaaaatctatggtgatgctaaaaatttgtttaagaatttccttattagtgtagggattggatttttttggtcttcttgttaatacaagtattttatttgcaatgctaaagcctagaactggcatttttggtgggctttattttaatcaagataatattttatggctattgctatatttttagtattacattttgctattttggctttaatttttccttttttgaaagctttttactatgaaattgctagaacaacaaagcaaaagtatttcacttatgcttttaataccttttatttagggcttcttactttgattatcggcataggcttggtgtttttgctagcaagtttggttttttggattttagcgtgggtcaaatttaaagaatttgatgagcaagaactttcaaatttagaagaaagattggcaaaagcacaaaaaaaggtttttgattttgatttaaaatggattaaaatcacaatggcttcatttataattttaaacttgctcgttttaacattttcgtttatattagaaattattagctttgaagattttaggttttactacacaaaaaaaactttattttacacagccataattctagctttgcttagtgtgtttttgttttgtaaaaagataaaaaattacaaactttttatttattttttcatatggcaaggtttaagtgtttttggtagtcatcttctttttattcctgattttatggtagatcaaccaccagaaattgtatatggaagtttaaacataatattaagtctatgctatattatttttgcttttttattttttaaaattttgattcaaattacaaaggaaaaacttttttatcttatttttgcattttatgtttgcataaaaattttgataatattaattttctttatttttatgatggttgataactattatatatttacaaaaagtcctataaagatgctcatagataattataaattactttttcaagttgtttatttcgtttcatttttaattgtttggcttatgcttaaaggacaaaaaaatgtaaaaatatgttagaatgatgaaaaaatactattttacgtagatgtttattaggatatattcgtatgtcttaaagctctttatggggtgttaagtaattataatatttaaaaattaaaaaatatatagtttatccacattttatagtttaacttctaaaaatttgatcatctcttttttcattttttagagctagaaaacatatgagtgaaattgctttaaagttagttagagcagttgatactaaatattttgataagaaatttaaatagattgtgattttacttaaattaaagactttttgcctcgtgatacaaaattaagtgatgaatttttagttaaattgatattaaatatgaaaaaattataaatattaatactttttcaaattaatagtaaatatagagggtttgattttttcacaaaagatttggatagaacttgcaaaaaactttcttcaatatttatacttttaaattttgatgcaaatcctattcaatatagcattggcaaaataaactaaaaagcttaaaatagctatactcaaaagaattccaaaccatgcaaaatttcctgttccaagatttgaaaccgcgttagcaaggatattaactccaccaagtgctttaatgccttcagcaaatactccagcggcgatgattatgcttacgactgagataaaaatttcagccatagcttttaaaatcaccatcatatcttcgcctaattttctagcatttttgtgtcttgcaaattcaacaagaaaaactaaagaaatgcttacaaaatttgctgttacaacatcgagcttgatagtaaaaaaatacgctataaataaaaatacaacaggtaaccaaggaaagagtatgtaaaaaagtagggcatttaggatcaatgatttgcggaatttcaacttcatcatttaaaacacctttttctttatctcttttatcaatccaagcaaaataaaaaggaatcaagatggcaattaactacaacataagtaatcacactataaatttgataatttaaaaaaagccctacgacattatcactttgtcctaccatatctgccatattgattgaatttccatcttttggaccataatcaagcgcaattaaagaaagcacacatacagctgtaataggacggattttaagtgagattaaaacaggataaatacatgctaacaaaagcaatccagcatagctagaaatgacgatttttaaagccattccaacaacaaaagttctacttaaaatcaagtatttatttttgatttttcctaagggttttgctaaaaaagcaagtttagctgaagtattgatatgttttataagtagcaaaatttgccacactcatgataataaaccctactccagaaagctgacttttaaaaatcgctgtgataaaagataactatcaagtaaaacatttaaaaagcttgtatgctctctgcttggggcttttggtataggtgttcctgtgatgtaaaaagcaaaaataagcaagataatatttgaaagaaaaatacaaaaatgagattatattttagtatataataagcaacgacaattaccgctaaaagtgtagaacatatcataaaaattggcatgatttctcccaaagttattattagcttttattttagctaaaatttaactaataaatatttttcatttaaaattttacttattttttgcattataaaattaataatatgtatagtttggttactgaaaagtttatgtttgtttaaaaaaatgatttttgtattataattatacacaaatcataaatattaaaaaggatctagtgtggcaagaattttggcatttgatataggaataagctctattggctgggcatttagtgaaaatgatgagttaaaagattgtggagttaggatttttacaaaggttgaaaatcccaaaacaggagaatccttagccttgccaagacgccttgcaagaagtgctagaaaacgccttgctagacgcaaagcaaggctaaatcacttaaaacatttaatcgcaaatgaatttaagttaaattacgaagattatcaaagctttgatgaaagtttagccaaggcttataaaggatctttaattagcccttatgagttaagatttagagctttaaacgagcttttaagtaagcaagattttgcaagagtgattttacatattgcaaaaaggcgtggctatgatgatattaaaaatagtgatgataaagaaaaaggtgcgattttaaaagctatcaagcaaaatgaagaaaaactagcaaattatcaaagtgtgggcgagtatctttataaagagtattttcaaaaattcaaagaaaattccaaagaatttacaaatgttagaaataaaaaagaaagttatgaacgctgcatagcgcaaagttttttaaaagatgaattaaagcttatttttaaaaaacaaagagaatttggcttttctttttcaaaaaaatttgaagaagaggtgcttagtgtagcattttataaaagggctttaaaagatttttctcatttggtgggaaattgtagtttttttaccgatgaaaaaagagcgccaaaaaattcgcccttagcttttatgtttgtagcacttacaagaattatcaatcttttaaacaatcttaaaaatactgaaggaattttatatacaaaagatgatttaaacgcccttttaaatgaagttttaaaaaacggcactctaacttataaacaaacaaaaaagcttttgggcttaagcgatgattatgaatttaaaggagaaaaaggaacttattttattgagtttaaaaaatacaaagaatttataaaagccctaggtgagcataatttaagccaagatgatttaaatgaaatagcaaaagatattacccttataaaagatgagattaaacttaaaaaggctttagcaaaatatgatttaaatcaaaatcaaattgatagtttaagcaaattggaatttaaagaccatttaaatataagttttaaagccttaaaacttatcactcctttaatgcttgaaggtaaaaaatacgatgaagcttgcaatgagcttaatttaaaagtagcaatcaatgaagataaaaaagactttttacccgcatttaatgaaacttattacaaagatgaagtaactaatcctgtggttttaagggcgattaaagaatatagaaaggtcttaaatgccttacttaaaaaatacggcaaagtgcataaaataaacattgaattagcaagagaagtaggtaaaaattacagccaaagagctaaaatagaaaaagagcaaaatgaaaactacaaggccaaaaaagacgccgaacttgaatgtgaaaaactaggcttaaaaataaatagtaaaaatattttaaaattaagattatttaaagaacaaaaagaattttgtgtttatagtggggaaaagattaaaattagtgatttgcaagatgaaaaaatgcttgaaattgaccatatttacccttattctagaagttttgatgattcttatatgaataaggttttagtttttaccaagcaaaatcaagaaaaacttaataaaaccccatttgaagcctttggcaatgatagtacaaaatggcagaaaattgaagttttggcaaaaaatttacctgaaaaaaagcaaaaaagaattttagataaaaactataaagacaaagagcaaaaagactttaaagatagaaatctaaacgatactcgctacatcgcaaggcttgttttaaactatactaaagattatttagattttttacctttaagcgatgatgaaaatacaaagttaaacgacacacaaaaaggctcaaaagtgcatgtagaagcaaaaagcggtatgctaacatcggctttaagacacacttggggctttagcactaaggatagaaataatcatcttcatcacgccatcgatgcagtaattattgcttatgcaaacaactctatcgtaaaggctttttcagattttaaaaaagagcaagaaagcaacagtgcagaactttatacaaaaaaaattagtgaattagattataaaaacaaaaggaagttttttgagccttttagtggttttaggcaaaaggttttagataaaattgatgaaatttttgtctcaaaacctgagagaaaaaagccaagcggagccttacacgaagaaacatttagaaaagaagaagaattctatcaatcatacggcgaaaagaaggagttttaaaagccctagaacttggtaaaatccgcaaagtaaatggtaaaattgttagcaatggcgatatgtttagagtggatatttttaaacacaaaaagacaaataaattttatgctatgccaatttatactatggattttgctttaaaagtattaccaaataaagccgtggtacaaggtaaagataaaaagtcaggtcttataaaagactggattttaatggatgaaaattatgagttttgcttttctttatacaaagatagtttgattttaattcaaactaaagatatgcaagagccagaacttgtttattttaatgcttttacaagctctactgttagtttgattgtttcaaaacacgataataaatttgaaacgctaagcaaaaatcaaaaaatattgtttaaaaatgcaaatgaaaaagaagtaatcgcaaaaagcataggaattcaaaatctaaaagtatttgaaaaatacatagtttcagcacttggagaagtgacaaaggctgagtttagacaaagagaagattttaaaaaatgagttacgatgaagcttttaaaacactgcttattagctctaatgccaagctaaatttagagctaaatcatcttgtgattaagcaagatgaaaatatagccaaattgtttttaaaagatataaacatcatcgttttagaaagcttacaagcaagccttagttccgcactttttaacgcttttgcaaagcataaaatcatcttgctaacctgcgatgaaactcatagtataaatggtattttactccttttttagggcattttcaaagtgcaaaaatcgcaaaagagcaaataaatgtaagtgctcaaaaaaaggctattttatggcaaaaaatcattaaaaataaaatcctaaatcaagcctttgttttgaaaaaacacaataaaatagagcaaagcaatgagcttataaatttggctaaaaaagtaagtctaaatgatagtaaaaatatcgaagctgttgcagcggcgctttattttaaaactttgtttgggacttctttttcaagagatgagctttgctttgaaaattctgctttaaattatggctatgcaatcattagggcttgtattattagagcagtttgtataagtgggcttttgccttggcttggcataaagcacgataatatttataattcttttgcactttgtgatgatttgatagaagtgtttagggctagtgttgatgattgtgttttaaagcttaagggtgaaagtgagtttttaagcaaagatgacaaaagagctttgattggcaatttacaaagcaaaatcaattttgatgggcaaaattatcctttaaatagagcgataaatcattatgtggcgaattttaaaaatgctttattgtatgaagatgaactaaagatagtgaaatttgatgattgaagataaatttatgcgcgtgcttttgatgtttgatgtacctactaaaagtaaaaaagagcaaaaactagcaagtaaatttagaaacaatcttataaaattaggttattttatgctgcaatttagcgtttatatgcgtatttgcaagggtttaagttctgcaaaaagttctattgaaaatgtaaaaaagattttgccaccttatggaaatgtaagggctttaatcatcactgaaaagcaatttgataaaatggagcttttgcttggtggcatagtttttaatgaaaaagttaataacgaaactaatttaacgctttttgatatagatagtcatggagaatttaaatataaaaattcaaataatgaagaaattcaaataaacaaaaaacaagaaaaatatcatcagcaaaatttatttgaattttaaaagcggttttaggggattgtaacccagcagagtcccgcaaactctttattttagtcccttttaaatttcttatgagattatagcataatttttgctatttttcatgaaaaaaccccgaaattttcattatctggtaaatatctattttaccataaagaaatttaaaaagggactaaataaaccctagtggattgaaactccgctagggctaattactccactaaaaggaggttgcgaatttgaaacttattgaaatttagggttgattaaaatcgaaataaaattatttaaataattttaaggcataaagataatatccactaagctttcattttctaaaatttcacattcttttggcaccaccataagagcggctttattgttaagattgtttataatcgcactagagccttcttttttaccttcaagattagctaaaatgcgtccatttttaaattccacattacaagcgacaaattccaaataaggtgtttttttcttgtagcttccttgtaaaaaggctttgcaaatatagtctttaggctgaagtaaccaagagcttaaaatctctcttgcgtaaagattaaacattaccatagccgagtaaggaaaacctggtaaggcgatgatgaatttttcattagccttagctattttgatatgtctgcctggttttatgtcggctttatcgatgatgatttcatattctttgacggctttttttaaaaagtcaaaatcccccatagaaaccccgcccgttgtaatcaaaatatcacaactttgcaaagcactttcaagtgtagaaaaagtggctttttcatcatcttttaaaagaggaaaaacccttgtatcgtaatttaaatttttagctaaattagctatggcgatatgatttgaagagcggatttgagcaggattttccaaggcttctcctagatctttgatctcacttccactacttaaaacccctacaataggctttataaatacactaatgtgaaaaaatccaagttcagccaaaagagctatctcgctataatttaaccttgtgccttttttgagtaaaatttcatcttttttatagttttctcctaccgcacgcacggcaaaagcttcgggaacttttttttctataaaaagagtatcattttctatgcgtatattttcaacagggactaaagtatcgcttccttcgctcatgagtgagcctgtaaaggtttttacacaagtgccattttgtacgctaaattgtggcatagtacccgcaggtgtgaggcctaaaatttttaaaggcttgtcttgatcttcaaatttgatcgcataaccatccatagccgaggttggaaattcaggctgatttttaggggcttttatatcttgagctaaaatgcgtcctaaacactctgtaagggctattttttcaatcttttcataagttttgatatgagaatgtaaaatttttaaactttcttcataagacattagcatctttattccttcatactgatataaatttgagtcttgtttgttgtataaaattcaaaatctgtgtcaaattttctttggagacttgaatttttaaaaaattcattgatattttgccaaagttttggggcaatgatttcaggttttccagagtcttcaaaaagcatgtatttgccaccttttatacaaattttttcgcctttttcgtgaggatttttcatacccacacaaattttatactctaacttgtgagtgtttttataatcataatacacgctataaatttcattgggcgcaccaaagatgctatgaaattttttccacaaaggaaaaattaaagagctgtttaaatcgctctcaagttcctcatcagttttaacgcttactccataaatactaaattcttctatttcttgtatcattttaaaagtcctgcaccgcaaagtttggttgatctttctttggcataaattctttctttgtttatcacatcatacttccaaatgggcgcacttgctttaaaatcttcaacaaattcattaagaagtttaagtcctaattttctttgtttgcttaaaattcctgcaaaatacgagctttcatgaaccgccacatcgcctatagagtgagcaaaaagcaagctaataccatcaaaatctactcttttttgccactcatcaaaccatttttttaaaagcggttcataaatatcaaaactaagtgcctcaatacctccttcttcacgcacaataccacaaaaagtcaataaagcaccacagtttttatccttggaaaattcataccattggctataaattttaggaatatctaaagagccttgataaagtgtaaaatgtttcatttagcctccacaaactggcggtaaaagtgctattttatcaccatcttttaacttggtgttttcatcaaaaatgatttcatcatttaaagatacagcacaaagttctagccattcttttaaactctcatctttttgcaaaatttcttttaattcttttaaattttttacttcaagttctaaattttctttatttatagggcctaaaaattccacttttaccattttattcctttacttctaaatttcccatcattcctaaatcttcatgttctaaaatatggcaatgatacattctaagtcctttaaaatcttgtttcattctaagtcttaactcttcattaggacgcacatttatagtatctctgaaggctctaaattcggctttttgaactttgccattgagttttgatgagatgagttcaaattgcgtgccgtgtatgtggaaaggatgatccatgtgagatttatttatcactatccagtcttcaactactccaagtttggagcttaaatcaatgcgttttaaatcatagcttttgccattgattaaaaatatagacgcaagagcgatttttaattcgctttcactttttcccatcataccatgcatttgcatatgatcttcactcatgattatttctttaaattccttaggttcttctgaaggtttgaaaatttttaatttttttggaagttttacattttctttttttaggttaatattggctagaaatagggtattaggttcttcttttaccatcattttatccctatcataataagtgctttctaatacaaattccccatcttttggagcgtcgattaaaacttctacacgagaagcaggacttaagaaaagttcttctttataaatagctttttctataagtccaccatcagtaccaacaagtataaacttagctccttgtatacgtaaatttaaatatcttgctgcagtagcattataaatgcgtatgcgttcgtttgtggcgagtttgattttaggtttaaattgtccattgatgagtacaaattctccttctctaccatttagccaatcatttaggttattgtttggaatttgagcgttttcatcaagacgcaaatcgctaatcatcaaatctttttcttttaaatgacttaaagcatctttttttgctttgattacaaaagcccctgctaaacccataaaaacttgtttagaagccgtataatgaggatgtggatgataccagtaagttcctgcgctatcttgaggaatttcaaaacgatatattctttcttctcctgctaagataggatcatgtgggcttccatcttgatcaggtggcacaggaacgccatgccaatgtatagttgtagcttctttgagtttgtttttgactaaaatttcaagtttatctccttcaaaaacttgtatttttggagcaggcacgaggccattgtaagtgtaaaatagagtttttttacctttgatgagctctatgtgattttctttgatttctatggtagcacgaaaaatatttttttctttactttcatttttgagtaaaggtaaggcttttaaaatttctccttgggggaattgttttggatctaaaagctttaaattttttggagcaaagtttataaaagaagtatctaagtcatgatttatagaatgatttttatgcatggagtgcatatcgtgcataggatttgcataggctacacccatacttgctagagtgagtgcattaaattttaaaaaatttcttctattcattagtttttccttttgcttgattttttgtattatagtcattatttttttaactttagtaaatatttattttgaaaatttggtttaattttgttatgattttagcaatttaatcaaggaaaaataatgttttatgaaaaaattcaaaccccagcttatattttagaagaagataaattaagaaaaaattgtgagcttttagtaagtgttggcgaaaaaagtggtgctaaagtgcttttagctttaaaaggttttgctttttcaggagcgatgaaaattgttggagaatacttaaaaggttgtacttgtagcggactttgggaagcaaaatttgctaaagaatacatggataaagaaattcatacttattcgcctgcttttaaagaagatgaaataggtgaaatagccagcttatctcatcatatagtgtttaactctttagctcaatttcataaatttcaagctaaaacacaaaaaaattccttaggtcttcgttgtaatgttgaattttctctagccccaaaagaactttacaatccttgtggaagatactcaagacttggaattcgtgctaaagattttgaaaatgtggatttaagtaccatagaaggacttcattttcacgcactttgcgaagaaagtgctggtgctttagaagctgttttaaaggtttttgaagagaaatttggcaaatggatagggcaaatgaaatgggtgaattttggaggaggacatcacatcactaaaaaaggctatgatgttgaaaagcttattgctttgtgtaaaaatttcagtgataaatacggtgtgcaagtttatcttgaaccaggcgaagcggtgggttggcaaacaggaaatttggtggctagtgtagtagatatcatagaaaatgaaaaacaaattgctattttagatacttcaagcgaagcgcatatgccagatactatcatcatgccttatacaagtgaagttttaaatgctagaattttagccacaagagaaaatgaaaaaatttcagacttaaaagaaagcgaattttcctatttgcttactggaaatacttgtttagcgggtgatgtaatgggagaatacgcctttgataaaaagcttaaaatcggcgataaaattgtttttttagatcaaattcattacaccattgtgaaaaacacaacttttaatggtataagacttccaaatctcatgcttttaaatgcaaaaaatgaacttcaaatgataagagaattttcttataaggattattctttaagaaattagtattatttataatttgcataaaatgttaattttactcggaagagaatcaaagatgtaaattttatgcaaagtattttattttttcaaatataaaatcaactcaaatatctaattttcaatacttttgtatgattttttaatattttaaatccttgtggaattttattgaaattcagtgatttttaaatcaaatagtattaagataaatcgatttaaaaatcggctttaaaatgaatattaggtatattttgcataatattcattcaagcaaaatttaaagctatttttgaaaattttgaatgcatgggagctttaatggatttggaaaaattaagattagctagaagtctttattatcaatgtctaggagagctttttgttttttcattttctgaagaaagattgtcaaaattacaagagtatttaaagacaatgcaagaatgtttatttgatgaaaatttaaaatcaaattttgatatcttgcttaagcatttagatgatgaaaattctatacaagcattttttaaagaatatgatttgctttttttaagtcttaaaaatagcattccaacgactttttcttacatagaagaaggttttgaaaattcaaatcctttactttgcgtgcgtcaaattttagtcaaaagtaaaataagacgcaatgaaaaattttttaaagaaagtgaagatagtgttggattttgtttattgttgatgagtgaatttttaaggcaaaatgaagatgatttagccaaagagctttttgaaaaagtgatcaataaaagcattgatgagtttttaggcgatgttttcatgaataaaaatgcgaatttatataaggaaattgcaagtattgcatcggcttttatggaatttgaaagactttgctttgaagtggaaaaacctgcaaaaataaattctaaaaaagtgcaaaacgatctatcgcgttcagaatttttaagaagagaagcaaataaacaaaggaggactcgtgaaaaatcgcagggaatttcttaaaaaatccgcttttgccttaggggctgctggagtgcttggtagcacaactttagctctagctaaagatgaagaaagaaaagatttagttaaaggtaaaagtaagaaaaaagaagtgctttttcaaagaagtgctaattgggaaaattattatataaaggctgagtaatgtcaagtgtaggtgaaaatatcaagcttacgcgtcgttcttttcttaaaatggcagcactttcaagcctagcaacaccgttgcttgctagaagtgaaactttaagagaagcgagtgctgatgagcttaaagaagcttatgaaggtagtaaaaaagtaaaaacagtttgtacagcctgttctgtaggctgtgggattattgcagaagtgcaaaatggtgtttgggtgcgtcaagaaatcgctcaagatcatcctgtgagttcaggtggacattgctgcaagggatctgatatgatcgatatggtgcgttcacatgtgcgtttaaaatatcctatgaaaaaagaaaatggagaatggaaacgcataagttatgagcaagctttaagtgagatcggagaaaaactagctgcttatcgtaaagaaaatcctgaaagtgttatgtttttaggttctgcaaaacttaataatgaacaagcttattatataagaaaatttgcagcattttttggaacgaacaatgtagatcatcaagctagaatttgacacagcgcaacagtcgccggtgtggcgaatacatttggttatggcgctatgacaaaccatcttggagacatccaaagaagtaaatgtatcattatcattggagcaaatccagcggtaaatcaccctgtgggttttagacatttcttaaaagcaaaagaaaaaggtgcaaagcttatcgttgtagatcctagatttacaaaaagtgcagcaaaagcggatatttatgcaagaattcgtccaggaactgacattgctttcatgtatggaatgttaaaaatcatttttgatgaaggcttggaagatacaaaatatcttgatgaaagagtttttggaattgataaaattcgcgaagaagcagcaaaatggacagctgaagaagtagaaaatgttacgggaatttctaaagaacttttggtgcaaatcactcacgaagtagctaaaaacaaaccaactacgcttatttgggctatgggtttaactcaacatactgtaggaacttcaaatacacgtttagcacctattgtgcaaatggtacttggaaatataggtaaatttggtggcggagttaatatcttacgcggacacgataatgttcaaggtgcttcggatatggcttgtttgagtgaaaatttacctggttattatcctttaaatgaagcgacttggagatactatgccaaaatttggggtgtggattatgaatggcttttaggaaattttgtaagtaaagattggatgcataaaaccggactttcacttgctagatggtgggcagcagctttaaatggaaaagatggaaatgatgctatcgataatgcaggaacgcctttaaaagctttagtagttatgggaaatggtatcacttcaactgcacaacaagtaaaagttaaagaaggtttggaagctttagagcttttagttttggctgatccttttgtaaatgaagcaggcattatcgcagaaagaaaagatgggatttatcttttacctgcagcaacacagtttgaaacaagcggaagtgtaacagcaacaaatcgtagcggacaatggagatttaaagttgtagatccactttatgaaagcatggaagatcaagaaattttatttgagcttgctaaaaaattaggcttttatgaagactttactaagactttacgcgatgaaaaaggtgagattgtttggcctgaaaatgcaacaagagaaattgcaaaagcagtcagaagtatagggcttaatggttggagtcctgaaaggcttaaaaagcatactttatactgggataaatttgatgaggtaactttaaaaggaaaagacgaagttgcgggcgagtattacgggcttccttggccttgttggagtgataagcacccaggttctcctgtactttataataccgacattgaagtagcaaaaggtggtatgggctttagaaataattttggacttgagtatgaaggagagagtttacttgctaaaaatgcgcctttaaattcacctattgatacaggttatccacaaattactaaagataatatagaaaaagttttaggtattactttaagtgcccaagaaaaagaaaaa

SEQ ID NO: 3780 - DNA, 22961 bp, synthetic construct
  misc_feature 1..22961: note = Synthetic
  source 1..22961: mol_type = other DNA
gctgatggtgcttttcgtcgtggcaaaccttatatgttaaaacctgcagtagataaggctttaagtgaagggtgtgaaagtgtagaaaaagtacttatagttatacgcaataatgagcctatagaatatattaaaggaagggactatgtttataacgaacttgtgaaaaatgaatcttataagtgtgaacccgaaattatggatagcgaggatttgttgtttttgctttacacttcaggatcaacgggcaagccaaaaggagttatgcatgcaagtgcaggatatatactttgggcacaaatgactatggaatgggtttttgatattaaagattatgataattattggtgtagtgctgatgtgggttggattacaggacatacttatgtagtttatgggcctttagcatgtggagcaacgactataatgcatgaaggaactcctacttatccaaattctgggcgttggtggagaatgatagaagagtatcaaataagcaaattctacacttcgccaactgccataagaatgcttcatactgatgcacctgatgagccaagaaaatatgatttaagtacgcttgaagtgcttggaacggttggagagcctatcaatcctagtgcttggaagtggttttatgatgaaatagggggaactaaaagtcctatagtcgatacttggtggcaaacagaaacaggtgggcatatgatcacgcctttaccaggcgctactcctttaaaaccaggttgtgctaccttgcctttgccaggaatttttgcagaagttattgatgaagaaggcaataaaaaagatgaaggtgaagatggattgctttgtataaccaaaccttggccttcgatgattcgtggaatttggggtaatgatgaacgctatatagaaagttatttttctcaagctaaaaaagatggaaaagctgtatattttagtggcgatggtgctttttatgataaaaatggttatataactatcacaggaagaacagatgatgtggttaatgttgcaggacatcgtataggaacggctgaaattgaaagcgctattgctaaacatccaagtgtagcagaatcagctgtagtgagtattttggatgcgattaagggtgagtcattgtttgcttttgtggttttaagtcctgcatccagttgtgatcttggcggagctatagaaactttaaaagaacttaatgacattttaagagtagaaataggacctatagctaaaatagaaaaaattctttatactccaggtttgccaaaaactagaagtggtaaaataatgagaagaattttaagaactatagcaagaggtgaagaaatcaaacaggatatttcaacactcgaagattctggagtagtagaaatcattgttaaattagctaaggcagagtttgaataacaaggcaaaaagaactttgccttgttgcatgaaaattcataaaaataagctataatgataaaaaaataaaaggaaatttttatgcttcaaacttgtattttccctgcggcaggttatgggacaagatttttacctgcaacaaaaactttacctaaagagatgttgcctatcttaactaagcctttgattcattatggggttgatgaagctttggaagcaggaatggaaaatatgggctttgtcacagggcgtggaaaaagagctttggaggattattttgatatttcttatgaacttgagcatcaaatttcaggtacaaaaaaagaatacttacttgatgaaattcgctctttgatcaatcgttgcacctttacttttacaagacaaaatcaaatgaaaggcttaggtgatgcggttttaaaaggtaaacctttggttggcgatgaagcttttggcgtaattttggctgatgatttgtgtgtcaatgaagaaggcttaaatgttatggctcaaatggtaaaaatttatgaaaaatatcgctgcaccatcatagctgtgatggaagtaccaaaagaacaagtttcaaactatggagtaatttctggaaattttgtagaagaaaatcttatcatggttaattctatgatagaaaaaccaagtcctgatgaagctccaagtaatcttgctatcataggaagatatattttaactcctgatatttttggaattttagaaaatactaaagcaggaaaaaatggcgaaattcaacttaccgacgcgcttttaactcaagcaaccaatggtatggttttagcttataaatttcaaggaaaacgctttgattgtggaagtgtagaaggctttgtagaggctacaaattatttttacgagaaaagtaaatgttaaacaatacacttttttttaaacaaagtgaaattcacactataagctcttatgcaaatcgtattaatgatgaggtaaaaagtggagatatagggtattatcatcttattgacacgagcttaagcctgattgatgagagtttggcttttatcaaagacaaagaacacataaaaaatattgttttagtgggaatgggtggttcaagttgcggtgtaaaagccttgcgtgatatgctttttaatgaaaaaagtaatcaaagagaactttttatactcgataacacaagttcacattcttttaataagactttagaaaaaatcaagcttgaagaaagtttgtttttaatcatcagtaaaacaggtagcactatagaagttgtatcgctttttaaacttcttattgaacattttaaacttgatatgcaagaattaaaaaaatactttgtttttattaccgataaggattcaaaacttcatcaagaaggtgaaaatttaggtattaaatgcttttttatccctgcaaatgtaggaggtcgttttagcatactttcagctgtaggtatagttccgctttgtttttgtggctataatgccaaagctcttttagaaggagctaaagcttgttttgaagatttttttactcacaaaaaagatgaaattttacaaaaagcctatcattattgtacacacaaaaatgccaatatcaatgtacttttttcatatagtgatgcttttaaaggctttaatgaatggtatatccagcttattgctgaaagtttaggtaaaaagcaaggctataaacgcataggtttaactcctattgcactcattggagcaagagatcagcatagttttttacaactcatcatggatggacctaaaaataaaactgtaacttttttaaaaatcaaagacgctcaaaaagcacctattatccctgatattcattttaaatttttagattctttaagtaataaagtcaatcttcacgaacttttaaacgctcaatgtgatgcaactatgcacgctttaatcgctgaaaatttgagtgttgatgtgatagaacttgaaaaacttgacgcttggcatgcgggatatttgatgtattattatgaactttttacttcaacttgcggtgttatgctagggattaacacttatgatcaacctggtgtggaagttggaaaattgatcttaaaaaatatattaaattcttaatcaaaattcattaaaaaagagtataatgattttaagttagaattataataaaaatttttaattaataataattattatttaagaattttatgttataattttaaaaattaaaaaaaaggagtcaatcatgtcagttacaaaacaattattacaaatgcaagcagatgctcatcatctatgggttaaatttcataattatcactggaatgtaaaaggtttgcaatttttttctatacacgagtacacagaaaaagcttatgaagaaatggcagaactttttgatagttgtgctgaaagagttttacaacttggcgaaaaagctatcacttgccaaaaagttttaatggaaaatgcaaaaagtccaaaagttgcaaaagattgctttactccgcttgaagtcatagaactgatcaaacaagattatgaatatcttttagcagaatttaaaaaactcaatgaagcagcagaaaaagaaagtgataccacaacagctgcttttgcgcaagaaaatatcgcaaaatatgaaaaaagtctttggatgataggtgctactttacagggtacttgcaaaatgtaatttaaggggctttatgccccaattatacaaactaggttataatatccttttttaaaggataaaattgaaagtacttaattttttttatgaaaatcaccctaaatttgaagtaagttatgaaagaaaaaatcaaatttcaaaaccaaatattatcataaaaggcccacgattttgtggtaaaaaaacacttatttttaattttttatctcaatttaaagcaagtgaaattttgtttttagatttatatgatacacgctttgaaaaacaaagtttagaaagacttgctgattttctgaatgaaaatttacaaattaaaattctttgcctttataatttggattttatccctaatttagaaaaaattaaaattcccatcatcttaagtacaaatataaaagatttaaatataaatgggtttgaagagcttgaacttgattattttgattttgaagaatttattagtgtaagtaagaaaaatttacctataaataatttagtaggtctttttttacaaagtggacgcagtaaatttggagaaaaaaacatacttctaagacaaagcttcactcttttagaattagaaattttaaagtatttagctttaaatttgggtcagcaaatcagtatttctaagatatttatagaactcaaaaaaagattaaaaacttcaaaagatagtgtttatcaggctataaaaaaattagaaaatacttatgtgatctatactttaaaacatgatgaaaaaaaacttcaaaagatttattttaaagattttggcctaagaaataatctttgtatttcaaaggatttttcacatttatttgaaaatttagttttaagcgagttgtttaaatttaaagaagaatttttttataacaaatactttaacttttatagccaaatatctaaaattgcttatatttcaagtccaactttagatattgatttgattaaattacgtgctaagaaaattttaccaaaggctttagaacttggaatttttcatgtgatttttatcactctttcaagcgaggatagtttttttgagcaaggggttaaatttgaagtcatatcttttgataaattttcacttggattttaggtgttgtttgagtttgtatcgtatttttcaaggttgtatcgtttgatgatttttgtaataagattgatataatatcccttgcgttcagaataagaatctaaagttttaatagcctctagccctgttatctctttgccttcgctttcaaatttagctcttgcatcgcgaaacttttcataagcaaaatgacgatttaaatttaaaacataagagtcaacactatcttgcagactatcaaaaattttaattttgtgttttttatctggatgtcttaaatcaggaattaaacctttctcaccccaagtccattctccaaaaagattgtttgcttctcttgcgaagcgactggtacctgtagcactttcaactaaagcttgggctatacccatggattttggaattttttgaatacgttttttatattctgcaaaatcataaagattttcaatgcgatatttgttttttatcgtgataagtttttcaagatttatttggtttgaagtcctaaagcctgttttgtaagcatctttaaaaaaggcttcgataaaggctctttcttgttcaatttttttaaagctttgatcaaacatttcattcatttttataaaaaaaatttgtcttttttgatctatatcaagtttgtaatattcctctccaaagccattttttagatcatcagcaaaaagtgggattagaaaaagactaagaaaaattataattggcttcaaaacaatactttacctttccctcaaaaaacaattcttcatttttatatgtaaacccaacctcttcaccacttttaggagttattttaactttattttgtacttttttatttaaaaatgccagataaaaacaagcccccattcctgtgccgcaagctaaggtttcatcttcaactccgcgttcataggtgcgaacttttaaatgattttcatctaaaatttttacaaaattaacattggcattatatttttgtctcattttttgacaaagcattgtattaaattcatctaaattttgacaaaaatgtactagatgtggaactccagtgttgcaaagttgccaagtttttcctaattcttcaaaagtattttgcacgctttttattttgcctaaagatacttcaactttatcttgatttacctttgcttttattactcctgcaccggttaaaaaactcatgttaggatttattttgttaatatgatgtgcaaaatgtgccgcagcccttgagccatttccacacatagcagcccttgagccatcgttattataaaattcccattcaaagtcgtatttttcatgaggcaatatcacgataaagccatccgcacctataccctcataacgattacaaagttctttagctaaagcacttctatcttcttttctatcagcatttgttatgacaaaatcattcccacttgcacaatatttataaaatttcacatttttcctttagaaatttcttgtattactttaacacattcttgcctaaaatcggcataagaattagtatttttaatgataaaatctgcttttttaagtttttcttcaatatctatttgagaatcaagtcttgcttttgcagcttctaagctgagcttatctctttgcatgattcttttaaggcttaattctttaggtgtgtaaattacaatgactttgcctaaattttcataagcaccgctttcaaaaaaaagaggaatttctacaaaaaaagctttattttccttatctagaatttgcatttgttctaaaattttagctcgaattttaggatgagtgaaattttctaaggtttttttagcttctttgttgttaaaaacaatttttccaaggatttttctatcgattttcttttcttttgtgagtaaattttttaagctaaagggagaaaaaatcttttcaagttctaaagcattttcatctaaaatttcatgagcgattttatctgcactaatgcttttaaagcctaaagaattcgctatttctataaaggtgcttttaccacaagcaattgaagcggttacaaaaaaagcatttttcatcttatgccttattaaaacttttttcgttaaaatacctttttagttcttaaaggaaaataaatgaaaatttcatatgaagatgcaggcgtaagtatagataatggaaatgcctttgtagaggttataaaacctttggttaaagaaacttttaatgataatgttgtaggtggaattggttcttttgctggtgcttttagaatgccaagtggttttaaaaagcctgtgattttaggtgcaacagatggggttggtaccaagcttcgcttggcaattgatgctaaaaaatatgatactatagggcaagatttagtagcaatgtgtgtgaatgatttgatttgtaattttgctacgcctttgtttttcctagattattatgctacagccaagctcgaagtagaagtagcaaaggctgttgtatcaggcattgccaagggatgtaagatggcaaattgtgcattaattggcggagaaactgctgaaatgcctggaatgtatgcaaaagatgattttgatcttgcgggttttgcagtgggtatggctgaagaagatgagatcgatagaagtaaatttgttaaaaatggtgatattttattggcacttcctagttcaggacttcattcaaatggctattctttagctagaaaagtactttttgaaagtttaaaattaaaatttgatgacaagatagagggtaaaaatttaattgatattttattagaacctacaaggatttatgtgcgtgattttcttacactaaagccttacatcagtgctctagctcatattacagggggtggtttagtagaaaatttaccacgcgttttacctcgtggtatgggtgcaactatacgcaaacatcatcttaaaactcctgaaattttttatactataggacaggctgtagaagaaagcgaaatgtatagaagctttaacatgggagtgggtttagtaatggttgtagatccttctaatgtaagtaaggttttagaaaattcagatgcctttattatcggcgaaatttgcattaatgaaggtattgttttagagtgaaaataaagcgtcaatacgctttatttttgtattttaagttctatttttgtagtgttttgttcttttggcaaaggattggtttgtgctagataaaaggctacaagcacatttacaagcatagcgataagtaaaagaggagtggttcgttttataatatccattggagctacttttgcaaatccagctaaagctatgattccgcctgctattggtgaagctgcacgacctaaacaagatgcaatttctataggtaaaactagagtaataggtgcaacgcctaattttgtagctatatcaggagctagttttccaaaagcattaaaagcagcaattccacttcccataatcactgtggcaaaataaactaaaaagcttaaaatagctatactcaaaagaattccaaaccatgcaaaatttcctgttccaagatttgaaaccgcgttggcaaggatattaactccaccaagtgctttaatgccttcagcaaatactccagcagcgatgattatgcttacgactgagataaaaatttcagccatagcttttaaaatcaccatcatatcttcgcctaattttctagcatttctgtgtcttgcaaattcaacaagaaaaactaaagaaatgcttacaaaatttgctgttacaacatcgagcttgatagtaaaaaaatacgctgtaaataaaaatacaacaggtaaccaaggaaagagtatgtaaaaagtagggcatttaggatcaatgatttgcggaatttcaacttcatcatttaaaacacctttttctttatctcttttatcaatccaagcaaaataaaaaggaatcaagatggcaataactacaacataggcaatcacactataaatttggtaatttaaaaaaagccctacgacattatcactttgtcctaccatatctgccatattgattgaatttccatcttttggaccataatcaagcgcaattaaagaaagcacacatacagctgtaataggacggattttaagtgagattaaaacaggataaatacatgctaacaaaagcaaaagcaatccagcatagctagaaatgacgatttttaaagccattccaacaacaaaagttccacttaaaatcaagtatttatttttgatttttcctaagggtttatttgctaaaaaagcaagttttgctgaagcattgatatgtttcatataagcagcaaaacctgccacactcatgataataagtcctactccagaaagctgacttttaaaagtcgctgtgataaaagcataactatcaagtaaaacattcaaaaagcttgcgtgttctctgctcggggcttttggtataggtgttcctgtgatgtaaaaagcaaaaataagcaagataatacctgaaagaaaaaatacaaaaataggattgtattttttaagtatataataagcaacgacaattaccgctaaaagtgtagaacatatcataaaaattggcatgatttctcctaaagttattattagcttttattttattttagctaaaatttaactaataaatatttttcatttaaaattttacttattttttgcattataaaattaataatatgtatagtttggttactgaaaagtttatgtttgtataaaaaatgatttttatattataattataaacaaattataaatatcaaaaaggatctagtgtggcaagaattttggcatttgatataggaataagctctattggctgggcatttagcgaaaatgatgagttaaaagattgcggagttaggatttttacaaaggctgaaaatcctaaaacaggagaatccctagccttaccaagacgccttgcaagaagtgccagaaaacgccttgctagaggcaaagcaaggctaaatcacttaaaacatttaatcgcaaatgagtttaagttaaattacgaagattatcaaagctttgatgaaagtttagctaaggcttataaaggctctttaattagcccttatgagttaagatttagagctttaaacgagcttttaaataagcaagattttgcaagagtgattttacatattgcaaaaaggcgtggctatgatgatattaaaaatagtgatgatgaagaaaaaggcaagattttaaaagctatcaagcaaaatgaagaaaaattagcaaattatcaaagtgtgggagagtatctttataaagagtattttcaaaaattcaaagaaaattccaaagaatttataaatgttagaaataaaaaagaaagttatgaacgctgcatagcgcaaagttttttaaaagatgaattaaagcttatttttcaaaaacaaagagaatttggcttttctttttcaaagaaatttgaagaagaagtgcttagtgtagcattttataaaagggctttaaaagatttttctcatttagtgggaaattgtagtttttttactgatgaaaaaagagcgccaaaaaattcgcgcttagcctttatgtttgtagcacttacaagaattatcaatcttttaaacaatcttaaaaatactgaaggaattttatatacaaaagatgatttaaacgcccttttaaatgaagttttaaaaaacggcactctaacttataaacaaacaaaaaagcttttgggcttaagcgatgattatgaatttaaaggagaaaaaggaacttattttattgagtttaaaaaatacaaagaatttataaaagccttagatgaacatagtttaagccaagatgatttaaatgaaatagcaaaagatattactcttataaaagatgagattaaacttaaaaaggctttagcaaaatacgatttaaatcaaaatcaaattgatagtttaagcaaattggaatttaaagaccatttaaatataagttttaaagccttaaaacttatcactcctttaatgcttgaaggtaaaaaatacgatgaagcttgcaatgagcttaatttaaaagtagcaatcaatgaagataaaaaagactttttacccgcatttaatgaaacttattacaaagatgaagtaactaatcctgtggttttaagggcgattaaagaatatagaaaaatcttaaatgccttacttaaaaaatacggtaaagtgcataaaataaacattgaattagcaagagaagtaggtaaaaatcacagccaaagagctaaaatagaaaaagagcaaaacgaaaactacaaggccaaaaaagacgccgaacttgaatgtgaaaaactaggcttaaaaataaatagcaaaaatattttaaaattaagattatttaaagaacaaaaagaattttgtgcttatagtggagaaaagattaaaattagtgatttgcaagatgaaaaaatgcttgaaattgaccatatttacccttattctagaagttttgatgattcttatatgaataaagttttagtttttaccaagcaaaatcaagaaaagcttaataaaaccccctttgaagcctttggcaatgatagtacaaaatggcagaaaattgaagttttaacaaaaaatttacctactaaaaagcaaaaaagaattttagataaaaactataaagataaagagcaaaaagactttaaagatagaaatttaaacgatactcgctacatcgcaaggcttgttttaaactacactaaagattatttagattttttacctttaagcgatgatgaaaatacaaaattaaacgacacacaaaaaggctcaaaagtgcatgtagaagcaaaaagcggtatgctaacatcggctttaagacacacttggggctttagcactaaggatagaaataatcatcttcatcacgccatcgatgcagcaattattgcttatgcaaacaactctatcgtaaaggctttttcagattttaaaaaagagcaagaaagcaacagtgcagaactttatgcaaaaaaaattagtgaattagattataaaaacaaaaggaagttttttgagccttttagtggttttaggcaaaaggttttagataaaattgatgaaatttttgtctcaaaacctgagagaaaaaagccaagtggagctttacatgaagaaacatttagaaaagaagaagaattctatcaatcatacggcgaaagaaggagttttaaaagccctagagcttggtaaaatccgcaaagtaaatggtaaaatagttaaaaatggcgatatgtttagagtggatatttttaaacacaaaaagacaaataaattttatgctgtgccaatttatactatggattttgctttaaaagtattaccaaataaagctgtagcacgaagtaaaaaaggtgagataaaagactggattttaatggatgaaaattatgagttttgcttttctttatacaaagatagtttgattttaattcaaactaaagatatgcagagccagaacttgtttattttaatgcttttacaagctctactgttagtttgattgtttcaaaacacgataataaatttgaaacgctaagcaaaaatcaaaaaatattgtttaaaaatgcaaatgaaaaagaagtaatcgcaaaaagcataggaattcaaaatctaaaagtatttgaaaaatacatagtttcagcacttggagaagttacaaaggctgagtttagacaaagagaagattttaaaaatgagttacgatgaagcttttaaaacactgcttattagctctaatgccaagctaaatttagagctaaatcatcttgtgattaagcaagatgaaaatatagccaaattgtttttaaaagatataaacatcgtcgttttagaaagcttacaagcaagccttagttccgcactttttaacgcttttgcaaggcataaaatcatcttgctaacctgcgatgaaactcatagtataaatggtgtttttactccttttttagggcattttcaaagtgcaaagatcgcaaaaaaacaaataaatgtaagtgctcaaaaaaaggctattttatggcaaaaaatcattaaaaataaaatcctaaatcaagcctttgttttgaaaaaacacaataaaatagagcaaagcaatgagcttataaatttggctaaaaaagtaagtctaaatgatagtaaaaatatcgaagctgttgcggcggcgctttattttaaaactttgtttggcgtttctttttcaagagatgagctttgctttgaaaattctgcttcaaattatggctatgcaatcattagggcttgtattattagagcagtttgcataagtgggctcttggcataaagcacgataatatttataatgcctttgcactttgtgatgatttgatagaagtgtttagagctagtgttgatgattgtgttttagaacttgtgggtgaaagtgagtttttaagcaaagatgacaaaagagcgttgattggcaatttacaaagcaaaatcaattttgatgggcaaaattatcctttaaacagagcgataaatcattatgtggcaaattttaaaaatgctttattgtatgaagatgagctaaagatagtgaaatttgatgattgaagataaatttatgcgcgtgcttttgatgtttgatataccaactaaaagtaaaaaagagcaaaaactagcaagtaaatttagaaacaatcttataaaattaggttattttatgctgcaatttagcgtttatatgcgtatttgcaagggtttaagttctgcaaaaagttctattgaaaatgtaaaaaagattttgccaccttatggaaatgtaagggctttaatcatcactgaaaagcagtttgataaaatggagcttttgcttggtggcatagtttttaatgaaaaagttaataacgaaaccaatttaacgctttttgatatagatagtcatggagaatttaaatacaaaaattcaaataatgaagaaatacaactaaacaaaaaacaagaaaaataccatcagcaaaatttatttgaattttaagcggttttaggggattgtaaccccacagagtcccgcaaactctttatactctttattttagtccctttttaaatttcttgcaaatattgtagcataattttgctatttttcatcaaaaattctcgaaaatctttaaaatttcattatttgataaaggaatattttaccataaagaaatttaaaaagggactaaaaaaccctagtggattgaaactctgctagggctaattactccactaaaaggaggttgcaaatttgaaacttattgaaatttagggttgattaaaatcgaaataaaattatttaaataattttaaggcataaagataatatctactaaactttcattttctaacatttcacattcttttggtaccaccataagggcagctttattgttaagattgtttataatcgcactagagccttctttcttaccttcaagattggctaaaatgcgtccatttttaaactctatattgcaagcgacaaattccaaataaggtgtttttttcttgtaacttccttgtaaaaaggctttgcaaatatagtctttaggttgaagtaaccaagagtttaaaatctctcttgcgtaaaggttaaacattaccatagccgagtaaggaaaacctggtaaggcgatgatgaatttttcattagccttagctattttgatatgtctgcctggttttatgtcggctttatcgatgatgatttcatattctttgacggctttttttaaaaagtcaaaatctcccatagaaaccccgcccgttgtaatcaaaatatcacaactttgcaaagcactttcaagtgtagaaaaagtggctttttcatcatcttttaaaagaggaaaaacccttgtatcgcaatttaaatttttagctaaattagctatggcgatatgatttgaagagcggatttgagcgggattttctaaggcttctcctagatctttgatctcgcttccactacttaaaacccctacaataggctttataaacacactaatgtgaaaaaatccaagttcagccaaaagagctatctcactataatttaaccttgtgccttttttgagtaaaatttcatcttttttatagttttctcctaccgcacgcacggcaaaagcttggggaacttttttttctataaaaagagtatcattttctatgcgtatattttcaacagggactaaagtatcgcttccttcgctcatgagtgagcctgtaaaggtttttacacatgtgccattttgtacgctaaattgtggcatagtgcccgcaggtgtgaggcctaaaatttttaaaggcttgtcttgatcttcaaatttgatcgcataaccatccatagccgaggttggaaattcaggctgatttttaggggcttttatatcttgagctaaaatgcgtcctaaacactctgtaagagctattttttcaatcttttcataggttttgatatgagagtgtaaaatttttaaactttcttcataagacattagcatctttattcctttatactgatataaatttgagtcttgtttgttgtataaaattcaaaatctgtgtcaaattttctttggagacttgaatttttaaaaaattcattgatattttgccaaagttttggggcaatgatttcaggttttccagagtcttcaaaaagcatgtatttgccaccttttatacaaattttttcgccctttttatgaggatttttcacgcccacacaaattttatactctagcttgtgagtgtttttataatcataatacacgctataaatttcatcgggcgcaccaaagatgctatgaaattttttccacaaaggaaaaatcaaagaactatttaaatcgctctcaagttcctcatcagttttgacgcttactccataaatactaaattcttctatttcttgtatcattttaaaagtcctgcaccgcaaagtttggttgatctttctttggcataaattctttctttgtttatcacatcatacttccaaatgggcgcacttgctttaaaatcttcaacaaattcattaagaattttaagtcctaattttctttgtttgcttaaaattcctgcaaaatacgagctttcatgtatcgcaacatcgcctatagagtgagcaaaaagcaagctaataccatcaaaatctactcttttttgccactcatcaaaccatttttttaaaagcggttcataaatatcaaaactaagtgcctcaatacctccttcttcacgcacaataccacaaaaagtcagcaaagcaccgcagtttttatccttggcaaattcataccattggctataaattttaggaatatctaaagagccttgataaagtgtaaaatgttccatttaacccccacaaactggcggtaaaagtgctattttatcaccatcttttaacttggtgttttcatcaaaaatgatttcatcatttaaagatacagcacaaagttctagccattcttttaaactctcatctttttgcaaaatttcttttaattcttttaaattttttacttcaagttctaaattttctttatttatagggcctaaaaattccacttttaccattttattcctttacttctaaatttcccatcattcctaaatcttcatgttctaaaatatggcaatgatacattctaagtcctttaaaatcttgtttcattctaagtcttaactcttcattaggacgcacatttatagtatctctgaaggctctaaattcggctttttgaactttgccattgagttttgatgagatgagttcaaattgcgtgccgtgtatgtggaaaggatgatccatgtgagatttatttatcactatccagtcttcaactactccaagcttggagcttaaatcaatgcgttttaaatcatagcttttgccattgattaaaaacatagacgcaagagcgatttttaattcgctttcactttttcccatcataccatgcatttgcatatgatcttcactcatgattatttctttaaattccttaggctcttctaaaggtttgaaaatttttaaattttttggaagttctaaattttctttttttaagctaatactagctaaaaatagggtattaggttcttcttctaccatcattttatccctatcataataagcactttctagtctaaattccccatcttttgaagcatcgattaaaacttctacgcgagaagcaggacttaagaaaagttcttctttataaatagttttttctataagtccgccatcagtaccaacaagtataaatttagccccttgtatgcgtaaatttaaatatcttgccgcagtagcattataaatgcgtatgcgttcgtttgtggcgagtttgattttaggtttaaattgtccattgatgagtacaaattctccttctctaccattaagccaatcatttaggttgttgtttggaatttgagcgttttcatcaagacgcaaatcgctaatcatcaaatctctttcttttaaatgacttaaagcatcttttttcgctttgatcacaaaagcccccgccaaacccataaagacttgtttagaagtggtataatgaggatgcggatgataccagtaagttcctgcgctatcttgaggaatttcaaaacgatatattctttcttcccctgctaagataggatcatgtgggcttccatcttgatcaggtggtacaggaacgccatgccaatgtatagttgtagcttctttgagtttatttttgactaaaatttcaagtttatctccttcaaaaacttctatttttggagcaggtactaggccgttgtaagtataaaataaggtttttttacctttgataagctctatatgattttctttgatttctagggtagcacgaaaaatatttttttctttactttcatttttgagtaaaggcaaggcttttaaaatttctccttgggggaattgttttggatctaaaagctttaaattttttggagcaaagtttataaaagaagtatctaagtcatgatttatagaatgatttttatgcatggagtgcatatcgtgcataggatttgcataggctacacccatacttgctagagtaagtgcattaaattttaaaaaatttcttctattcattagtttttccttttgcttgattttttgtattatagtcattatttttttagttttagtaaatatttattttgaaaatttggtttaattttgttatgattttagcaatttaatcaaggaaaaataatgttttatgaaaaaattcaaactccagcttatattttagaagaagataaattaagaaaaaattgtgagcttttagcaagtgttggtgaaaaaagtggtgctaaagtgcttttagctttaaaaggttttgctttttcaggagcgatgaaaattgttggagaatacctaaaaggttgtacttgtagcggactttgggaagcaaaatttgctaaagaatacatggataaagaaattcatacttattcacctgcttttaaagaagatgaaataggtgaaatagccagtttatctcatcatatagtgtttaactctttagcccaatttcataaatttcaagctaaaacacaaaaaaattccttaggtcttcgttgtaatgttgaattttctctagccccaaaagaactttacaatccttgtggaagatactcaagacttggaattcgtgctaaagattttgaaaatgtggatttaaatgctatagaaggacttcattttcacgcactttgtgaagaaagtgctgacgctttagaagctgttttaaaggtctttgaagagaaatttggtaaatggatagggcaaatgaaatgggtgaattttggaggaggacatcacatcaccaaaaaaggctatgatgttgaaaaacttattgctttgtgtaaaaatttcagtgataaatacggtgtgcaagtttatcttgaaccaggcgaagcggtgggttggcaaacaggaaatttggtggctagtgtagtagatatcatagaaaatgaaaaacaaattgctattttagatacttcaagcgaagcacatatgccagatactatcatcatgccttatacaagtgaagttttaaatgctagaattttagccacaagagaaaatgaaaaaatttcagacttaaaagagaacgaattttcctatttgcttactggaaatacttgtttagcgggtgatgtaatgggagaatacgcctttgataaaaagcttaaaatcggcgataaaattgtttttttagatcaaattcattacaccattgtgaaaaacacaacttttaatggtataagacttccaaatctcatgcttttaaatgcaaaaaatgaacttcaaatgataagagaattttcttataaggattattctttaagaaattagtattatttataatttacataaaatattaattttactcggaagagaatcaaagatataaattttatgcaaagtattttattttttcaaatataaaatcaactcaaatatctaattttcaatactttgatatgattttttaagattttaaatccttgtggaattttattgaaattcagtgatttttaaatcaaatagtattaagataaatcgatttaaaaatcggctttaaaatgaatattaggtatattttgcataatattcattcaagcaaaatttaaagctatttttgaaaattttgaatgcatggaggctttaatggatttggaaaaattaagattagctagaagtctttattatcaatgtctaggagagctttttgttttttcattttctgaagaaagattgtcaaaattacaagagtatttaaagacaatgcaagaatgtttatttgatgaaaatttaaaatcaaattttgatatcttgcttaagcatttagatgatgaaaattctatacaagcattttttaaagaatacgatttgctttttttaagtcttaaaaacagcattccaacgactttttcttacatagaagaaggttttgaaaattcaaatcctttactttgcgtgcgtcaaattttagtcaaaagcaaaataagacgcaatgaaaaattctttaaagaaagtgaagatagtgttggattttgtttattgttgatgagtgaatttttaaggcaaaatgaagatgatttagccaaagagctttttgaaaaagtgatcaataaaagcattgatgagtttttaggcgatgttttcatgaataaaaatgcgaatttatataaggaaattgcaagtattgcatcggcttttatggaatttgaaagactttgctttgaagtggaaaaacctgcaaaaataaattctaaaaaagtgcaaaacgatctatcgcgttcagaatttttaagaagagaagcaaataaacaaaggaggactcgtgaaaaatcgcagggaatttcttaaaaaatccgcttttgccttaggggctgctggagtgcttggtagcacgactttagctctagctaaagataaagaaagaaaaaatttggttaaaggtaaaagtaagaaaaaagaagtgctttttcaaagaagtgctaattgggaaaattattatataaaggctgagtaatgtcaagtgtaggtgaaaatatcaagcttacgcgtcgttcttttcttaaaatggcagcactttcaagcctagcaacaccgttgcttgctagaagtgaaactttaagagaagcgagtgctgatgagcttaaagaagcttatgaaggtagtaaaaaagtaaaaacagtttgtacagcctgttctgtaggctgtgggattatcgcagaagtgcaaaatggtgtttgggtgcgtcaagaaatcgctcaagatcatcctgtgagttcaggtggacattgctgcaagggatctgatatgatcgatatggtgcgttcacatgtgcgtttaaaatatcctatgaaaaaagaaaatggagaatggaaacgcataagttatgagcaagctttaagtgagatcggagaaaaactagctgcttatcgtaaagaaaatcctgaaagtgttatgtttttaggttctgcaaaaatgagcaatgaacaagcttattatgtgcgtaaatttgcagcgttttttggaacaaacaatgtagatcatcaagctagaatttgacacagcgcaacagtcgccggtgtggcgaatacatttggttatggcgctatgacaaaccatcttggagacattcaaagaagtaaatgtatcattatcattggggcaaatccagcggtaaatcatcctgtgggttttagacatttcttaaaagcaaaagaaaaaggtgcaaagcttatcgttgtagatcctagatttacaaaaagtgcggcaaaagcggatatttatgcaagaattcgtccaggaactgacattgctttcatgtatggaatgctaaaaatcatctttgatgaaggcttagaagatacaaaatatcttgatgaaagagtttttggaattgataaaattcgtgaagaagcagcaaaatggacagctgaagaagtagaaaatgttacagggatctctaaagaacttttggtgcaaatcactcacgaagtagctaaaaacaaaccaactacgcttatttgggctatgggtttaactcaacacactgtaggaacttcaaatacacgtttagcacctattgtgcaaatggtacttggaaatataggtaaatttggtggtggagttaatatcttacgcggacatgataatgttcaaggtgcttcagatatggcttgtttgagcgaaaatttaccaggttattatcctttaaatgaagcgacttggagatactatgccaaaatttggggtgtggattatgagtggcttttaggaaattttgtaagcaaagattggatgcataaaactgggctttcacttgctagatggtgggcagcggctttaaatggaaaagatggaaatgatgctatcgataacgcaggaacgcctttaaaagctttagtagttatgggaaatggtatcacttcgactgcacagcaagtaaaagttaaagaaggtttggaagctttagagcttttagttttagccgatccttttgtaaatgaagcaggcattattgcagaaagaaaagatggaatttatcttttacctgcagcaacacagtttgaaacaagcggaagtgtaacagcaacaaatcgtagcggacaatggagatttaaagttgtagatccactttatgaaagcatggaagatcaagaaattttatttgagcttgctaaaaaattaggtttttatgaagactttaccaagactttacgcgatgaaaaaggtgagattgtttggcctgaaaatgcaacaagagaaattgcaaaagcagttagaagtatagggcttaatggttggagtcctgaaaggcttaaaaagcatactttatactgggataaatttgatgaggtaactttagaaggaaaagatgaagttgctggtgagtattacgggcttccttggccttgttggagtgataagcacccaggttctcctgtactttataataccgacattgaagtcgcaaaaggtggtatgggctttagaaataattttggacttgagtatgaaggagagagtttacttgctaaaaatgcgcctttaaattcacctattgatacaggttatccacaaattactaaagataatatagaaaaagttttaggtattactttaagtgcccaagaaaaagaaaaaatg

SEQ ID NO: 3781 - DNA, 22957 bp, synthetic construct
  source 1..22957: mol_type = other DNA
  misc_feature 1..22957: note = Synthetic
aaacttgtattttccctgcggcaggttatgggacgagatttttacctgcaacaaaaactttacctaaagagatgttacctatcttaaccaagcctttgatccattatggagttgatgaagctttagaagcaggaatggaaaatatgggatttgtcacagggcgtggaaaaagagctttggaggattattttgatatttcttatgaacttgaacatcaaatttcaggtacaaaaaaagaatacttacttgatgaaattcgctctttgatcaatcgttgtacctttacttttacaagacaaaatcaaatgaaaggcttaggtgatgcggttttaaaaggtagacctttggttggcgatgaagcttttggcgtaattttggctgatgatttgtgtgttaatgaagaaggcttaaatgttatggctcaaatggtaaaaatttatgaaaaatatcgctgcaccatcatagctgtgatggaagtaccaaaagagcaagtttcaaactatggagtaatttctggaaattttgtagaagaaaatcttatcatggttaattctatgatagaaaaaccaagtcctgatgaagctccaagtaatcttgctatcataggaagatatattttaactcctgatatttttggaattttagaaaatactaaagcgggaaaaaatggtgaagtccaacttactgacgcgcttttaactcaagcaaccaatggtatggttttagcttataaatttcaaggaaaacgctttgattgtggaagtgtagaaggctttgtagaagcgacaaattatttttacgagaaaagtaaatgttaaacaatacacttttttttaagcaaagtgaaattcacactataagttcttatgcaaatcgtattaatgatgaggtaaaaagtggagatatagggtattatcatcttattgatacaagtttgaatttaatcgatgagagtttggcttttatcaaagacaaagaacacataaaaaatatcgttttagtgggaatgggtggttcaagttgtggtgtaaaagccttgcgtgatatgctttttaatgaaaaaagcaaccaaagagaactttttatactcgataacacaagttcacattcttttaataagactttagaaaaaatcaagcttgaggaaagtttgtttttaatcatcagcaaaacaggtagtactatagaagttgtatcgctttttaaacttcttattgaacattttaaacttgatatgcaagaattaaaaaaatactttgtttttattaccgataaggattcaaaacttcatcaagaaggtgaaaatttaggtattaaatgcttttttatccctgcaaatgtaggaggtcgttttagcatactttcagccgtaggtatagttccgctttgtttttgtggctataatgccaaagctcttttagaaggagctaaagcttgttttgaagatttttttactcataaaaaagatgaaattttacaaaaagcctatcattattgcacacacaaaaatgccaatatcaatgtacttttttcatatagtgatgcttttaaaggctttaatgaatggtatatccagcttattgctgaaagtttaggtaaaaagcaaggctataaacgtataggtttaactcctattgcactcattggagcaagagatcagcatagttttttacaactcattatggatggacctaaaaataaaactgtaacttttttaaaaatcaaagacgctcaaaaagcacctattatccctgatattcattttaaatttttagattctttaagtaataaagtcaatcttcacgaacttttaaacgctcaatgtaatgcaactatgcacgctttaatcgctgaaaatttgagtgttgatgtgatagaacttgaaaaacttgatgcttggcatgcgggatatttgatgtattattatgaactttttacttcaacttgcggtgttatgctagggattaacacctatgatcaacctggtgtggaagttggaaagttgatcttaaaaaatatattaaattcttaatcaaaattcattaaaaaagagtataataattttaagttaaaattataataaaaatttttaattaataataattattatttaagaattttatgttataattttaaaaattaaaaaaaggagtcaatcatgtcagttacaaaacaattattacaaatgcaagcagatgctcatcatctatgggttaaatttcataattatcactggaatgtaaaaggtttgcaatttttttctatacacgagtacacagaaaaagcttatgaagaaatggcagaactttttgatagttgtgctgaaagagttttacaacttggcgaaaaagctatcacttgccaaaaagttttaatggaaaatgcaaaaagtccaaaagttgcaaaagattgctttactccgcttgaagtcatagaactgatcaaacaagattatgaatatcttttagcagaatttaaaaaactcaatgaagcagcagaaaaagaaagtgataccacaacagctgcttttgcgcaagaaaatattgcaaaatatgaaaaaagtctttggatgataggtgctactttacagggtgcttgcaaaatgtaatttaaggggctttatgccccaattatacaaactaggttataatatccttttttaaaggataaaattgaaagtacttaattttttttatgaaaaccaccctaaatttgaagtaagttatgaaagaaaaaatcaaatttcaaaaccaaatattattataaaaggcccacgattttgtggtaaaaaaacacttatttttaattttttatctcaatttaaagtaagtgaaattttgtttttagatttatatgatacacgctttgaaaaacaaagtttagaaagacttgctgattttctgaatgaaaatttacaaattaaaattctttgcctttataatttggattttatccctaatttagaaaaaattaaaattcccatcatcttaagtacaaatataaaagatttaaatataaatgggtttgaagaacttgaacttgattattttgattttgaagaatttattagtgtaagtaagaaaaatttacctataaataatttagtaggtctttttttgcaaagtggacgcagtaaatttggagaaaaaaacatacttctaagacaaagctttactcttttagaattagaaattttaaagtatttagctttaaatttgggtcagcaaatcagtatttctaagatatttatagaacttaaaaaaatattaaaaacttcaaaagatagtgtttatcaagctataaaaaaattagaaaatacttatgtgatctatactttaaaacatgatgaaaaaaaacttcaaaagatttattttaaagattttggcctaagaaataatctttgtatttcaaaggatttttcgcatttatttgaaaatttagttttaagcgagttgtttaaatttaaagaagattttttttataacaaatactttaacttttatagccaaatatctaaaattgcttatatttcaagtccaactttagatattgatttgattaaattacgtgctaagaaaattttaccaaaggctttagaacttggaatttttcatgtgatttttatcactctttcaagcgaggatagtttttttgagcaaggggttaaatttgaagtcatatcttttgataaattttcacttggattttaggtgttgtttgagtttgtatcgtatttttcaaggttgtatcgtttgatgatttttgtaataagattgatataatatcccttgcgttcagaataagaatctaaagttttaatagcctctagtcctgttatctctttgccttcgcttgcaaatttagctcttgcatcgcgaaacttttcataagcaaaatgacgatttaaatttaaaacataagagtaaacactatcttgcagactatcaaaaatcttaattttatgttttttatctggatgtcttaaatcaggaattaaacctttctcaccccaagtccattctccaaaaagattatttgcttctcttgcgaagcgacttgtacctgtagcactttcaactaaagcttgggctatacccatggattttggaattttttgaatacgttttttatattctgcaaaatcataaagattttcaatgcgatatttgttttttatcgtgataagtttttcaagatttgtttgatttgaagtcctaaagcctgttttgtaagcatctttaaaaaaggcttcgataaaagctctttcttgttcaatttttttaaagctttgatcaaacatttcattcatttttataaaaaaaatttgtcttttttgatctatatcaagtttgtaatattcctctccaaagccattttttagatcatcagcaaaaagtgggattagaaaaagactaagaaaaattataattggcttcaaaacaatactttacctttccttcaaaaaacaattcttcatttttatatgtaaacccaacctcttcaccacttttaggagttattttaactttattttgtacttttttatttaaaaatgccagataaaaacaagcccccattcctgtgccacaagctaaggtttcatcttcaactccgcgttcataggtacgaacttttaaatgattttcatctaaaatttttacaaaattaacattggcattatatttttgtctcattttttgacaaagtattgtatcaaattcatctaaattttgacaaaaatgcactagatgtggaactccagtgtcgcaaagttgccaagtttttcctaattcttcaaaagtattttgcacgctttttattttgcctaaagatacttcaactttatcttgatttacctttgcttttattattcctgcaccggttaaaaaactcatgttaggatttattttgttaatatgatgtgcaaaatgtgccgcagcccttgagccattgccacacatagcagcccttgagccatcgttattataaaattcccattcaaagtcgtatttttcatgaggcaatatcacgataaagccatccccacctatgccctcataacgattgcaaagttctttagctaaagcacttctatcttcttttctatcagcatttgttatgacaaaatcattcccacttgcacaatatttataaaatttcacatttttcctttagaaatttcttgtattactttaacacattcttgcctaaaatcgacataagaattagtatttttaatgataaaatctgcttttttaagtttttcttcaatatctatttgagaatcaagtctcacttttgcagcttctaagctgagcttatctctttgcatgattcttttaaggcttaattctttaggtgtgtaaattacaatgactttgcctaaattttcataagcaccgctttcaaaaaaaagaggaatttctacaaaaaaagctttattttctttatctagaatttgcatttgttctaaaattttagctcgaattttaggatgagtgaaattttctaaggtttttttagcttctttgttgttaaaaacaatttctccaaggatttttctatcgattttcttttcttttgtgagtaaattttttaagttaaagggagaaaaaatcttttcaagttctaaagcattttcatctaaaattttatgagcaattttatctgcgctaatgcttttaaagcctaaagaattcgctatttctataaaagtgcttttaccacaagcaattgaagcggttacaaaaaaagcatttttcatcttatgccttattaaaacttttttcgttaaaatacctttttagttcttaaaggaaaataaatgaaaatttcatatgaagatgcaggcgtaagtatagataatggaaatgcctttgtagaggctataaaacctttggttaaagaaacttttaatgataatgttgtaggcggaattggttcttttgctggtgcttttagaatgccaagtggttttaaaaagcctgtgattttaggtgcaacagatggtgttggtaccaagcttcgcttggcaattgatgctaaaaaatatgatactatagggcaagatttagtagcaatgtgtgtgaatgatttgatttgtaattttgctacgcctttgtttttcctagattattatgctacagccaagctcgaagtagaagtagcaaaggctgttgtatcaggcattgccaagggatgtaagatggcaaattgtgcattaatcggcggagaaactgctgaaatgcctggaatgtatgcaaaagatgattttgatcttgcgggttttgcagtgggtatggctgaagaagatgagatcgatagaagtaaatttgttaaaaatggtgatattttattggcacttcctagttcaggacttcattcaaatggttattctttagctagaaaagtactttttgaaagtttaaaattaaaatttgatgacaagatagagggtaaaaatttaattgatattttgttagaacctacaaggatttatgtgcgtgattttcttacactaaagccttatatcagtgctctagctcatattacagggggtggtttagtagaaaatttaccacgcgttttgcctcgtggtatgggtgcaactatacgcaaacatcatcttaaaactcctgaaattttttatactataggacaggctgtagaagaaagcgaaatgtatagaagctttaacatgggagtgggtttagtaatggttgtagatccttctaatgtaagtaaggttttagaaaattcagatgcctttattatcggcgaaatttgcattaatgaaggtattgttttagagtgaaaacaaattattatgattatttatgtgctaaaatgtatgtaattttgcccataaaagcccataaagacaaactaaaattttatctttcttatgtaaataagaaagataaaatttttagagttaatgtgtggaagtgggcggttttgataaaaattgccaaagatgataaaacgaaatatttttgttcgaatgtattaaataaagggtaaaatgcacaatttaaatgaagctttgtttcaaaaaaagataaaagaaattcgcttaaaagcaatagcgagtattatttgtgggtttttaggtatcattccttatcttggagttttatttgttcttgcgagttggattttattttttattgtgctttatgatttaaaaatctatggtggtgctaaaaatttgtttaagaatttccttattagtgtagggattggattttttggtattcttgttaatacaagtattttatttgcaatgctaaagcctagaactggcatttttggtgggctttattttaatcaagataatattttatggctattgctatatttttagtattacattttgctattttggctttaatttttccttttttgaaagctttttactatgaaattgctagaacaacaaagcaaaagtatttcacttatgcttttaataccttttatttagggcttcttactttgattatcggcataggcttggtgtttttgctagcaagtttggttttttggattttagcgtgggtcaaatttaaagaatatgatgagcaagaactttcaaatttagaagaaagattggcaaaagcacaaaaaaaggtttttgattttgatttaaaatggattaaaatcacaatggcttcatttataattttaaacttgctcgttttaacattttcgtttatattagaagttattagctttgaagattttaggttttactacacaaaaaaaactttattttacacagccataatcctagctttgcttagtgtgtttttgttttgtaaaaagataaaaaattacaaactttttatttattttttcatatggcaaggtttaagtgtttttggtagtcatcttctttttattcctgattttatggtagatcaacaaattgtatatggaagtttaaacataatattaagtctatgctatattatttttgcttttttattttttaaaattttgattcaaattacaaaggaaaaacttttttatcttatttttgcattttatgtttgcatagaaattttgataatattaattttctttatttttatgatggttgataactattatatatttacaaaaagtcctataaagatgctcatagataattataaattactttttcaagttgtttatttcgtttcatttttaattgtttggcttatgcttaaaggacaaaaaaatgtaaaaatatgttagaatgatgaaaaaatactattttacgtagatgtttattaggatatattcgtatgtcttaaagctctttatggggtgttaagtaattataatatttaaaaattaaaaaatatatagtttatccacatcttctaaaaatttgatcatctcttttttcattttttagagctagaaaacatatgagtgaaattgctttaaagttagttagagcagttgatactaaatattttgataagaaatttaaatagattgattttacttaaattaaagactttttgcctcgtgatacaaaattaagtgatgaatttttagttaaattgatattaaatatgaaaaaattataaatattaatactttttcaaattaatagtaaatatagagggtttgattttttcacaaaagatttggatagaacttgcaaaaaactttcttcaatatttatacttttaaattttgatgcaaatcctattcaatatagcattggcaaaataaactaaaaagcttaaaatagctatactcaaaagaattccaaaccatgcaaaatttcctgttccaagatttgaaaccgcgttagtaaggatattaactccaccaagtgctttaatgcctttagcacatactccagcggcgatgattatgcttacgactgagataaaaatttcagccatagccttttaaaatcaccatcatatcttcgcctaattttctagcatttctgtgtcttgcaaattcaacaagaaaaactaaagaaattcttacaaaatttgctatcacaacatcgagcttgatagtaaaaaaatacgctataaataaaaatataacaggtaaccaaggaaagagtgtgtaaaaagtagggcatttaggatcaatgatttgcggaatttcaacttcatcatttaaaacacctttttctttatctcttttatcaatccaagcaaaataaaaaggaatcaagatggcaataattacaacataggtaatcacactataaatttggtaatttaaaaaaagccctacgacattatcactttgtcctaccatatctgccatattgattgaatttccatcttttggatcataatcaagtgcaattaaagaaagcgcacatacagttgtaataggacggattttaagtgagattaaaacaggatacatacatgctaacaaaagcaaaagcaattcagcatagctagaaatgacgatttttaaagccattccaacaacaaaagttccacttaaaattaagtatttattttttgatttttcctgagggtttatttgctaaaaaagcaagttttgccgaagcattgatatgtttcatgtaagcagtaaagcctgccacactcatgataataagccctgctccagaaagctgacttttaaaagttgctgtgataaaagataactatcaagtaaaacatttaaaagcttgtatgttctctacttggagcttttggtataggtgttcctgtgatataaaaagcaaaaataagcaagataatacctgaaagaaaaaatacaaaaatgggattgtattttttgagtatatcataaaaattagcatagggtctcttgaatttacaataaattggattttatctaaatttttaaataaaaaatattttttatttaaaaattacttgttttttgtattataaaattaacatatatagtttggttactgaaaagtttatgtttgtttaaaaaaatgatttttgtattataattatacacaaatcataaatattaaaaaggatctagtgtggcaagaattttggcatttgatataggaataagctctattggctgggcatttagtgaaaatgatgagttaaaagattgtggagttaggatttttacaaaggctgaaaatcccaaaacaggagaatccttagccttgccaagacgccttgcaagaagtgctagaaaacgccttgctagacgcaaagcaaggctaaatcacttaaaacatttaatcgcaaatgaatttaagttaaattacgaagattatcaaagctttgatgaaagtttagccaaggcttataaaggatctttaattagcccttatgagttaagatttagagctttaaacgagcttttaagtaagcaagattttgcaagagtgattttacatattgcaaaaaggcgtggctatgatgatattaaaaatagtgatgataaagaaaaaggtgcgattttaaaagctatcaagcaaaatgaagaaaaactagcaaattatcaaagtgtgggcgagtatctttataaagagtattttcaaaaattcaaagaaaattccaaagaatttacaaatgttagaaataaaaaagaaagttatgaacgctgcatagcgcaaagttttttaaaagatgaattaaagcttatttttaaaaaacaaagagaatttggcttttctttttcaaaaaaatttgaagaagaggtgcttagtgtagcattttataaaagggctttaaaagatttttctcatttggtgggaaattgtagtttttttaccgatgaaaaaagagcgccaaaaaattcgcccttagcttttatgtttgtagcacttacaagaattatcaatcttttaaacaatcttaaaaatactgaaggaattttatatacaaaagatgatttaaacgcccttttaaatgaagttttaaaaaacggcactctaacttataaacaaacaaaaaagcttttgggcttaagcgatgattatgaatttaaaggagaaaaaggaacttattttattgagtttaaaaaatacaaagaatttataaaagccctaggtgagcataatttaagccaagatgatttaaatgaaatagcaaaagatattacccttataaaagatgagattaaacttaaaaaggctttagcaaaatatgatttaaatcaaaatcaaattgatagtttaagcaaattggaatttaaagaccatttaaatataagttttaaagccttaaaacttatcactcctttaatgcttgaaggtaaaaaatacgatgaagcttgcaatgagcttaatttaaaagtagcaatcaatgaagataaaaaagactttttacccgcatttaatgaaacttattataaagatgaggtaactaatcctgtggttttaagggcgattaaagaatatagaaaggtcttaaatgccttacttaaaaaatacggtaaagtgcataaaataaacattgaattagcaagagaagtaggtaaaaatcacagccaaagagctaaaatagaaaaagagcaaaacgaaaactacaaggccaaaaaagacgccgaacttgaatgtgaaaaactaggcttaaaaataaatagcaaaaatattttaaaattaagattatttaaagaacaaaaagaattttgtgcttatagtggagaaaagattaaaattagtgatttgcaagatgaaaaaatgcttgaaattgatcacatttacccttattctagaagttttgatgattcttatatgaataaagttttagtttttaccaagcaaaatcaagaaaaacttaataaaaccccccctttgaagcctttggcaatgatagtgcaaaatggcagaaaattgaagttttagcaaaaaatttacctactaaaaagcaaaaaagaattttagataaaaattacaaagacaaagagcaaaaagactttaaagatagaaatctaaacgatactcgctacatcgcaaggcttgttttaaactacactaaagattatttagattttttacctttaagcgatgatgaaaatacaaagttaaacgacacacaaaaaggctcaaaagtgcatgtagaagcaaaaagcggtatgcttacatcggctttaagacacacttggggctttagcactaaggatagaaataaccatcttcatcacgccatcgatgcagtaattattgcttatgcaaacaactctatcgtaaaggctttttcagattttaaaaaagagcaagaaagcaacagtgcagaactttatgcaaaaaaaattagtgaattagattataaaaacaaaaggaagttttttgagccttttagtggttttaggcaaaaggttttagataaaattgatgaaatttttgtctcaaaacctgagagaaaaaagccaagtggagctttacatgaagaaacatttagaaaagaagaagaattctatcaatcatacggcggaaaagaaggagttttaaaagccctagagcttggtaaaatccgcaaagtaaatggtaaaatagttaaaaatggcgatatgtttagagtggatatttttaaacacaaaaagacaaataaattttatgctgtgccaatttatactatggattttgctttaaaagtattaccaaataaagctgtagcacgaagtaaaaaaggtgagataaaagactggattttaatggatgaaaattatgagttttgcttttctttatacaaagatagtttgattttaattcaaactaaagatatgcaagagccagaatttgtttattataatgcttttacaagctctactgttagtttgattgtttcaaaacacgataataaatttgaaacgctaagcaaaaatcaaaaaatattgtttaaaaatgcaaatgaaaaagaagtaatcgcaaaaagcataggaattcaaaatctaaaagtatttgaaaaatacatagtttcagcacttggggaagttacaaaggctgagtttagacaaagagaagattttaaaaaatgagttacgatgaagcttttaaaacactgcttattagctctaatgccaagctaaatttagagctaaatcatcttgtgattaagcaagatgaaaatatagccaaattgtttttaaaagatataaatatcatcgttttagaaagcttacaaataagcattagttccgcactttttaatgcctttgcaaagtataaaattatcttattaacctgcgatgaaactcatagtataaatggcgtttttactccttttttagggcattttcaaagtgcaaaaatcgcaaaagagcaaatgaatgtaagtgctcaaaaaaaggctattttatggcaaaaaatcattaaaaataaaatcctaaatcaagcctttatcttaaaaaaacacaataaaatagagcaaagcaatgagcttataaatttggctaaaaaagtaagcttaaatgatagtaaaaatattgaagctgttgcggcggcgctttattttaaaactttgtttggtacttctttttcaagagatgagctttgctttgaaaattctgctttaaattatggctatgcaatcattagggcttgtattattagagcagtttgcataagtgggcttttgccttggcttggcataaagcacgataatatttataattcttttgcgctttgtgatgatttgatagaagtgtttagggctagtgttgatgattgtgttttaaagcttaagggtgaaagtgagtttttaagcaaagatgacaaaagagcgttgattggcaatttacaaagtaaaatcaattttgatgggcaaaattatcctttaaacagagcgataaatcattatgtggcaaattttaaaaatgctttattgtatgaagatgaactaaagatagtgaaatttgatgattgaagataaatttatgcgtgtgcttttgatgtttgatgtgccaactaaaagtaaaaaagagcaaaaactagcaagtaaatttagaaataatcttataaaattaggttattttatgctgcaatttagtgtttatatgcgtatttgcaagggtttaagttctgcaaaaagttctattgaaaatgtaaaaaagattttgccaccttatggaaatgtaagggctttaatcatcactgaaaagcaatttgataaaatggagcttttgcttggtggcatagtttttaacgaaaaagttaataacgaaaccaatttaacgctttttgatatagatagtcatggagaatttaaatataaaaattcaaataatgaagaaattcaaataaacaaaaaacaagaaaaatatcatcagcaaaatttatttgaattttaaaagcggttttaggggattgtaaccccgcagagtcccgcaaactctttattttagtccctttttaaatttcttatgagattatagcataatttttgctatttttcatgaaaaaaccccgaaattttcattatctggtaaatatctattttaccataaagaaatttaaaaagggactaaaacttttgaactttcttatgatgctaaacaaagattttaccataaagaaatttaaaaagggactaaaacttcttgaccagtagctcctcttatagcggtattttaccataaagaaatttaaaaagggactaaaacaaccgccaagctcttttaaaaactgccataattttaccataaagaaatttaaaaagggactaaaataaaccctagtggattgaaactccgctagggctaattactccactaaaaggaggttgcaaatttgaaacttattgaaatttagggttgattaaaatcgaaataaaattatttaaataattttaaggcataaagataatatccactaaactttcattttctaaaatttcacattcttttggcaccaccataagggcagctttattgttaagattgtttataatcgcactagagccttcttttttgccttcaagattggctaaaatgcgtccattttcaaactttatgttacaagcgacaaattccaaataaggtgtttttttcttgtaacttccttgtaaaaaggctttgcaaatatagtctttaggctgaagtaaccaagagtttaaaatctctcttgcgtaaagattaaacattaccatagccgagtaaggaaaacctggtaaggcgatgatgaatttttcattagccttagctattttgatatgtctacctggttttatgtcggctttatcgatgatgatttcgtattctttgatggctttttttaaaaagtcaaaatctcccatagaaaccccgcccgttgtaaccaaaatatcacaactttgcaaagcactttcaagggtggaaaaagtggctttctcatcatcttttaaaagaggaaaaacccttgtatcgcaatttaaatttttagctaaattagctatggcgatatgatttgaagagcggatttgagcaggattttccaaggcttctcctagatctttgatctcacttccgctacttaaaacccctacaataggctttataaacacaccaatgtgaaaaaatccaagttcagccaaaagagctatctcgctataatttaactttgtgccttttttgagcaaaatttcatcttttttatagttttctcctaccgcacgcacggcaaaagcttggggaacttttttttctataaaaagagtatcattttctacgcgtacattttcaacagggactaaagtatcacttccctcgctcatgagtgagcccgtaaaggtttttacacaagtaccattttgcacgctaaattgtggcatagtgcctgcaggtgtgaggcctaaaatttttaaaggcttatcttgatctttaaatttgatcgcataaccatccatagccgaagttggaaattcaggctgatttttaagggcttttatgtcttgagctaaaatgcgtcctaaacactctgtaagagctattttttcaatcttttcataggttttgatatgagagtgtaaaatttttaaactttcttcataagacattaacattttttatccttttaaaagtcctgcaccgcaaagtttggttgatctttctttggcataaattctttctttgtttatcacatcatacttccaaataggtgcacttgctttaaaatcttcaacaaattcattaagaagtttaagtcctaattttctttgtttgcttaaaattcctgcaaaataagagctttcatgaaccgccacatcgcctatagagtgagcaaaaagcaagctaataccatcaaaatctactcttttttgccactcatcaaaccatttttttaaaagcggttcataaatatcaaaactaagtgcctcaatgcctccttcttcacgcacaataccacaaaaagtcagcaaagcaccgcagtttttatccttggcaaattcataccattggctataaattttaggaatatctaaagaaccttgatagagtgtaaaatgttccatttaacccccacaaactggcggtaaaagtgctattttatcaccatcttttaacttagtgttttcatcaaaaatgatttcatcgtttaaagatacggcacaaagttctagccattcttttaaactctcatctttttgcaaaatttcttttaattcttttaaattttttacctcaagctctaaattttctttatttatggggcctaaaaattccacttttaccattttattcctttacttctaaatttcccatcattcctaaatcttcatgttctaaaatatggcaatgatacattctaagccctttaaaatcttgtttcattctaagtcttaactcttcattaggacgcacatttatagtatctcttaaggctctaaattcggctttttgaactttgccattgagttttgatgagatgagttcaaattgcgtgccatgtatatggaaaggatgatccatgtgagatttgtttatcactatccagtcttcaactactccaagtttggagcttaaatcaatgcgttttaaatcatagcttttgccattgattaaaaacatagacgcaagagcgatttttaattcaccttcactttttcccatcataccatgcatttgcatatgatcttcactcatgattatttctttaaattccttaggttcttctgaaggtttgaaaatttttaaattttttggaagttctacattttctttttttaggttaatattggctagaaatagggtattaggttcttcttttaccatcattttatccctatcataataagcactttctagcttaaaattcccatcttttggagcgtcgattaaaacttctacacgagaagcaggacttaagaaaagttcttctttataaatagctttttctataagtccaccatcagtaccaacaagtataaacttagctccttgtatgcgtaaatttaaatatcttgctgcagtagcattataaatgcgtatgcgttcgtttgtggcgagtttgattttaggtttaaattgtccattgatgagtacaaattctccttctctaccatttagccaatcatttaggttattgtttggaatttgagcgttttcatcaagacgcaaatcgctaatcatcaaatctttttcttttaaatgacttaaagcatctttttttgctttgatcacaaaagcccccgctaaacccataaaaacttgtttagaagccgtataatgaggatgtggatgataccagtaagttcctgcgctatcttgaggaatttcaaaacgatatattctttcttctcctgctaagataggatcatgtgggcttccatcttgatcaggtggcacaggaacgccatgccaatgtatagttgtagcttctttgagtttgtttttgactaaaatttcaagtttatctccttcaaaaacttctatttttggagcaggcacgaggccattgtaagtataaaataaggtttttttacctttgataagctctatatgattttctttgatttctagggtagcacgaaaaatatttttttctttactttcatttttgagtaaaggcaaggcttttaaaatttctccttgggggaattgttttggatctaaaagctttaaattttttggagcaaagtttataaaagaagtatctaagtcatgatttatagaatgatttttatgcatggagtgcatatcatgcataggatttgcataggctacacccatacttgctagagtgagtgcattaaattttaaaaaatttcttctattcattagtttttccttttgcttgattttttgtattatagtcattattagtaaatatttattttgaaaatttggtttaattttgttatgattttagcaatttaatcaaggaaaaataatgttttatgaaaaaattcaaaccccagcttatattttagaagaagataaattaagaaaaaattgtgagcttttagcaagtgttggcgaaaaaagtggtgctaaagtgcttttagctttaaaaggttttgctttttcaggagcgatgaaaattgttggagaatacttaaaaggttgtacttgtagcggactttgggaagcaaaatttgctaaagaatacatggataaagaaattcatacttattcgcctgcttttaaagaagatgaaataggtgaaatagccagcttatctcatcatatagtgtttaactctttagctcaatttcataaatttcaagctaaaacacaaaaaaattccttaggtcttcgttgtaatgttgaattttctctagccccaaaagaactttacaatccttgtggaagatactcaagacttggaattcgtgctaaagattttgaaaatgtggatttaagtaccatagaaggacttcattttcacgcactttgcgaagaaagtgctggtgctttagaagctgttttaaaggtttttgaagagaaatttggcaaatggatagggcaaatgaaatgggtgaattttggaggaggacatcacatcactaaaaaaggctatgatgttgaaaagcttattgctttgtgtaaaaatttcagtgataaatacggtgtgcaagtttatcttgaaccaggcgaagcggtgggttggcaaacaggaaatttggtggctagtgtagtagatatcatagaaaatgaaaaacaaattgctattttagatacttcaagcgaagcacatatgccagatactatcatcatgccttatacaagtgaagttttaaatgctagaattttggccacaagagaaaatgaaaaaatttcagacttaaaagaaagcgaattttcctatttgcttactggaaatacttgtttagcaggtgatgtaatgggagaatacgcctttgataaaaagcttaaaatcggcgataaaattgtttttttagatcaaattcattacaccattgtgaaaaacacaacttttaatggtataagacttccaaatctcatgcttttagaccgtaaaaatgaacttcaaatgataagagaattttcttataaggattattctttaagaaattagtattatttataatttgcataaaatgttaattttactcggaagagaatcaaagatgtaaattttatgcaaagtattttattttttcaaatataaaatcaactcaaatatctaattttcaatactttagtatgattttttaatattttaaatccttgtggaattttattgaaattcagtgatttttaaatcaaatagtattaagataaatcgatttaaaaatcggctttaaaatgaatattaggtatattttgcataatattcattcaagcaaaatttaaagctatttttgaaaattttgaatgcatgggagctttaatggatttggaaaaattaagattagctagaagtctttattatcaatgtctaggagagctttttgttttttcattttctgaagaaagattgtcaaaattacaagagtatttaaagacaatgcaagaatgtttatttgatgaaaatttaaaatcaaattttgatatcttgcttaagcatttagatgatgaaaattctatacaagcattttttaaagaatatgatttgctttttttaagtcttaaaaatagcattccaacgactttttcttacatagaagaaggttttgaaaattcaaatcctttactttgcgtgcgtcaaattttagtcaaaagtaaaataagacgcaatgaaaaattttttaaagaaagtgaagatagtgttggattttgtttattgttgatgagtgaatttttaaggcaaaatgaagatgatttagccaaagagctttttgaaaaagtgatcaataaaagcattgatgagtttttaggcgatgttttcatgaataaaaatgcgaatttatataaggaaattgcaagtattgcatcggcttttatggaatttgaaagactttgctttgaagtggaaaaacctgcaaaaataaattctaaaaaagtgcaaaacgatctatcgcgttcagaatttttaagaagagaagcaaataaacaaaggaggactcgtgaaaaatcgcagggaatttcttaaaaaatccgcttttgccttaggggctgctggagtgcttggtagcacgactttagctctagctaaagatgaagaaagaaaagatttggttaaaggtaaaagtaagaaaaaagaagtgctttttcaaagaagtgctaattgggaaaaatattatataaaggctgagtaatgtcaagtgtaggtgaaaatatcaagcttacgcgtcgttcttttcttaaaatggcagcactttcaagcctagcaacaccgttgcttgctagaagtgaaactttaagagaagcgagtgctgatgagcttaaagaagcgtatgaaggtagtaaaaaagtaaaaacagtttgtacagcctgttctgtaggctgtgggattattgcagaagtgcaaaatggtgtttgggtgcgtcaagaaattgctcaagatcatcctgtgagttcaggtggacattgctgcaagggatctgatatgatcgatatggtgcgttcacatgtgcgtttaaaatatcccatgaaaaaagaaaatggagaatggaaacgcataagttatgagcaagctttaagtgagatcggagaaaaactagctgcttatcgtaaagaaaatcctgaaagtgttatgtttttaggttctgcaaaacttaataatgaacaagcttattatataagaaaatttgcagcattttttggaacgaacaatgtagatcatcaagctagaatttgacacagcgcaacagtcgccggtgtggcgaatacatttggttatggcgctatgacaaaccatcttggagacattcaaagaagtaaatgtatcattatcattggagcaaatccagcggtaaatcaccctgtgggttttagacatttcttaaaagcaaaagaaaaaggtgcaaagcttattgttgtagatcctagatttacaaaaagtgcagcaaaagcggatatttatgcaagaattcgtccaggaactgacattgctttcatgtatggaatgttaaaaatcatttttgatgaaggcttggaagatacaaaatatcttgatgaaagagtttttggaattgataaaattcgtgaagaagcagcaaaatggacagctgaagaagtggaaaatgttacagggatctctaaagaacttttggtgcaaatcactcacgaagtagctaaaaacaaaccaactacgcttatttgggctatgggtttaactcaacatactgtaggaacttcaaatacacgtttagcacctattgtgcaaatggtacttggaaatataggtaaatttggtggtggagttaatatcttacgcggacacgataatgttcaaggtgcttcagatatggcttgtttgagtgaaaatttacctggttattatcctttaaatgaagcgacttggagatactatgccaaaatttggggtgtggattatgagtggcttttaggaaattttgtaagtaaagattggatgcataaaactggactttcacttgctagatggtgggcagcggctttaaatggaaaagatggaaatgatgctatcgataatgcaggaacgcctttaaaagctttagtagttatgggaaatggtattacttcgactgcacaacaagtaaaagttaaagaaggtttggaagctttagagcttttagttttagccgatccttttgtaaatgaagcagggattatcgcagaaagaaaagatggaatttatcttttacctgcagcaacacagtttgaaacaagtggaagtgtaacagctacaaatcgtagtgggcaatggagatttaaagttgtagatccactttatgaaagtatggaagatcaagaaattttatttgagcttgctaaaaaattaggcttttatgaagactttaccaagactttacgcgatgaaaaaggtgagatcgtttggcctgaaaatgcaacaagagaaattgcaaaagcagttagaagtatagggcttaatggttggagtcctgaaaggcttaaaaaacatactttatactgggataaatttgatgaggtaactttagaaggaaaagacgaagttgcgggcgagtattatgggcttccttggccttgctggagtgataagcacccaggttctcctgtactttataataccgacattgaagtagcaaaaggtggtatgggctttagaaataattttggacttgagtatgaaggagagagtttgcttgctaaaaatgcacctttaaattcgcctattaatacaggttatccacaaattactaaagataatatagaaaaagttttaggtattactttaagtgctcaagaaaaagaaaaaatgggatcaacttggtcttatgatgatagcaatatcatagcaactaaatgtatagaaaaaggcatagttccttatggaaatgctaaagctagagctgtagtttggacttttaaagataaaattccactccaccgtgagcctttacattctccaagaaacgatttggtacaaaaatatccaagttttgaagatcaaaaagcactttatcgcgtggatact

SEQ ID NO: 3782 - DNA, 22957 bp, synthetic construct
  misc_feature 1..22957: note = Synthetic
  source 1..22957: mol_type = other DNA
gctatatagaaagttatttttcacaagccaaaaaagaaggaaagccagtttattttagcggggatggggctttttatgatgataatggctatattactatcacgggaagaactgatgatgtggtaaatgttgcagggcaccgtataggaacagctgaaatagaaagtgccatcgctaaacatccaagcgtagcagaatcagcagttgtaagtgtgcttgatgcgattaagggtgagtctttatttgcttttgtggttttaaatccaacttcaagttgtgatttaggaggggctatagaaaccttaaaagaattaaatgatattttaagagcagagattggacctatagctaagatcgaaaaaattctttatactacaggcttgcctaaaacaagaagtggtaagatcatgagaagaattttaagaaccatagcaaggggcgaggaattaaaacaagatatttcaactcttgaggattcaggagtggttcaaagtattatcgatgcagctaagacaggaattcaataaggcaaaaaattctttgccttatttttaaatacatgttaaacttagttttgatttatttaaaaattgtagtttttggttataataccaaaaacaaataaaggataattatgcttcaaacttgtatttttcccgcagcaggatatgggactaggtttctacccgcaaccaaagctttacctaaagagatgttgcctatacttaccaaacctttgattcattatggagtagatgaggctttagaagcaggtatggataatatgggttttgttacaggtcgtggaaaaagagctttggaggattattttgatatttcttatgagcttgagcatcaaatttcgggtacaaataaagagtatttgttaaaagatatccgctctttaatccatcgttgtacttttacctttacaagacaaaatgaaatgcgcgggctcggcgatgcggtattaaagggtaggcctttagcaggcgatgaggcttttggtgtgattttggctgatgatttgtgtatcaatgaagagggtgttaatgtgatggcacaaatggttaaaatttatgaaaaatatcgttgtaccattatagctgttatggaagttccaaaagagcaagtttcaagctatggagtgattgcaggaaatttcgtagaagaggatttaatcatggtaaattcaatgatagaaaaaccatctcctcaagaagctccaagcaatcttgctatcataggaagatatattttaactcctgatatttttggaattttagaaaatactaaagcaggaaaaaatggagaaattcaactcacagatgcacttttaacccaagcgactaatggtatggttttagcttacaaatttaagggaaaacgctttgattgcggaagtgtagagggctttgtagaggctacaaattatttttatgagaaaagtaaatgctaaataatactcttttttttaaagaaagtgaaattcgcactataagttcttatgcaaatcgtatcaatgatgaagtagaaagtggggatatagggtattatcatcttatcgatacaagtttaaccttaatagacgaaagcttaaatttcatacaagataaagagcatgtaaaaaatattgttttagtgggtatgggtggttcaagttgcggtgttaaagctttgcgtgatatgctttttgatgaaaaaaataatcaaagagaactttttatacttgataataccagttcgcactcctttagcaggactttagagaaaatcaagcttgaagaaagtttgtttttaatcatcagtaaaacaggtagcactatagaagtagtatcgctttttaagcttcttatagaacattttaaactcgatatgcaagaattaaaaaaatactttatttttatcacagataaagattctaaactgcataaagagggtgagaatttaggcatcaaatgcttttttatccctgcaaatgtaggagggcgttttagcatactttcagctgtgggtatagtgccactttgtttttgtggttataatactaaagctcttttagaaggagctaaggcatgctttgaagatttttttatacataaaaaagatgaaattttgcaaaaagcttatcattattgtactcacaaaagtgcaaatatcaatgtacttttttcttacagcgatgcttttaagggttttaatgaatggtatatccagcttattgctgaaagtttgggtaaaaaacaaggctacaaacgcataggtttaactcctatcgctcttataggagcaagggatcagcacagctttttacaactcattatggatgggccaaaaaacaaaactattacttttttaaaaatcaaagatagtcaaaaggctccggttatacccgacatccattttaaatttttagatgatttgagcaataaagtcaatttacacgatcttttaaatactcaatgtgacgcgacaatgcatgctttaattgctgaaaatttaagtgtcgatataatagagcttgaaaaattagatgcatggcatgcgggatatttgatgtattattatgagctttttacttcggcttgtggggtaatgctaggaattaatacttatgatcagcctggggttgaggttgggaagttgattttaaaaaatattttaaaatcatagtaaattttaaataaaaagagtataatagaaataagtaaaattaataataaaaatttttaactaataataattattatttaagaattttatgttataattttaaaaattaaaaaaaggagttaacatgtcagtaacaaaacaattattacaaatgcaagcagatgctcatcatttatgggttaaatttcacaattatcattggaatgttaagggtttacagttttattcaatccacgaatatacagaaaaagcttatgaagaaatggcagagctttttgataattgcgcagaaagagctttgcaacttggtgaaaaagctatcacttgccaaaaaactttaatggaaaatgcaaaaagtccaaaagtagaaaaagattgtttcactccagttgaagtgatggagttgatcaaaaaagattacgaatatcttttggcagaatttaaaaaattaaacgaagaagctgaaaaagctagcgatactactacagctgcttttgctcaagaaaatatagcaaaatacgaaaaaagcctttggatgcttgcttcagttttacaaaatacttgcaaaatgtaatttcaaggggctttttgcccctttatgatttaaatcaatttttagaactttctcataaaaaaacttaaattctcaagagtcaaatttaaagaaaaatttatattttgattttaagcaaaataaaaatactctaatacatttatatcattacgccttactttctcatgctgcttatcttaatttaaatacaacagatatttttttaaatatagatagaaaaacattgtttaaggttttaactcataatatttttcaaaaagaatgcgttataataggaaaatttgagcctttgatggcattttattttattaagcgatttgatttacttgctcatattaatgaagattatcttgattcaaggggtgggtttagagcaagtttatttcaaaacaaggaaaataaagaatttattttagctatcgcaggaagtgatttaagacctttaaaatttgatattggagatttgattagtgattttatacttctaaatggaaaaattcctaaaaaacaatttgattctttgttaaaattttatacactaataaaaaaagaattttgctttggtaaaattgctttagtaggacattctttaggtgggcatttagcacagctttttgttttagattttgccttagaagttcaaaatatttacacttttcaagccccaggtattgctaaaaaatactaaaggacatcaaaaatgaagcttatatccaaaaaatttcttatcattttcatacttgtggtgattttaaaaaaatgcatggtataaatttaattttgttcaaaatttgcattctaaaataggatatccaatttggctaaatataggaaataaattccatcatcctaagatttgtcccaagatattgtataaggttttaaatatgttataattttcctttttaaaaggataatatttgaaagtattaaattttttttacgaaaatcatcccaaatttgaaataagctatgaaagaaaggtacaaattcctctttgtaatatcatcatcaaagggccaaaatttagcggtaaaaaaaccttgatttttaattatttgtcccaatttaaacccaatgaaattttgtttttaaatttgcatgatactcgttttgaaaaccaaagtttagaacatcttccaaattttttagaaaaaaatgcccaaataaaattcctttgcatatataatgtcgaatttgccttaaatttgcaagatattaaaattcctatcatcataagtacagataaaaaagatttgcatatcgaaggatttcaagagcttgagcttgattattttgactttgaagaatttgtaagtatcagtagaaaaaacttaccgataaacaatctagtgggactttttttacaaagtgggcgtagtaaattaggtgaaaaaaatatacttttaagacaaaattttaacactctagaacttgaaattttaaaatacttagctttaaatttaggacagcagatcagtatttccaagctttttttagagcttaaaaaaaagctaaaaacatctaaagatagcgtttatcacaccataaaagagcttgaaaatacctatatcatccatcctataagccacgatgaaaaaaagcttcaaaaaatttattttagggattttggcttaagaaacaatctatgcatacaaaaagattttgctcatttgtttgaaaatcttattttaaatgagctttttaaatttaaacaagaatttttttataataaattttttacattttatagtaaggtttcaaaaatcgcatatatttccagtccgacgctagatatagacttgatcaaattgcgcgctaagaaaatcctttctaagggtttggagcttgggatttttcatgtggttttcatcactctttcgagcgaagatagcttttttgagcaaggggtgaaatttgaagttttgccttttgataaattttcactcggcttttagctaagactagaaagattttggagtatcgtatcgctcaagatcgtatcgttggatgattttagtaacgatattgatataataacccttgcgctcggagtaagaatctaaagttttaatagcctctagtcctgttatttctttgccttcgctttcaaatttagctctttcgttgcgaaattcctcataagcaaagtgccgatttaaattcagcacataagaatccacactatcttgcaagctatcaaaaattctaattttatgttttttatcaggatgtcttagatcagggattaagcccttttctccccaggtccattctccaaaaagattatttgcctctcttgcaaaacggcttgttcccgtagcactttcgaccaaagcttgggctatacccatggattttggaattttttgaatgcgttttttgtattctgtaaaatcataaagattttcaacgcggtatttgtttttaagattgattaatttttctagattgttttggtttgaatttctaagtccatttttatacgcatcataaaaaaaagcttctacaaaagccctttctttcgctatttcttcaaagcttttatcaaacattgcattcattttggtgaaaaatatttgtcttttttgctctacattgagtttataatactcctctccaaagccatttttaagctcgctattgccaaaaagagggagtaaataaaaactaagaaaaattataattcgcttcaaagcaatatctcacttttcccttaaaaaataattcttcattttcgaatttaaaacttagctcttcaccgctttttggaatcactctagcttgattgtgaatttttttatttaagaatgcaagataaaaacaagctcccatgcccgtgccacatgcttgcgtttcatcttctacgcctctttcaaaagtgcgaactcttaaagtattgtcgttttcaacttttacaaaatttacattggcattatatttttctctcatttgtttgcaaagcttaagatcaaactcatccaaattttcacaaaaatgcaccaaatgtggaactcccgtatcgcaaagttgccagtttttttcacactcactaaaggcatcttgtatgttttttatcttccctaaagaaacttctacgctattattatcaacatttgcttttataactcctgctccggtaagaaaagccatatggggtttgataccatttatatggtgtgcaaaatgtgccgcagcccttgagccattgccacacatagcagcccttgagccatcgttattataaaattcccattcaaagtcgtatttttcatgaggtaatatcacgataaagccatccgcacctataccctcataacgattgcaaagttctttagctaaagcacttctgtcttttttttcacttgcatttattatcacaaaatcattgccacttgcgcaatatttataaaacttcacatttttcctttagaaatttcttgtattactttaacacattcttgcctaaaatcggcataagagccaatatttttaatgataaaatctgcttttttaagtttttcttcaatatctatttgagaatcaagcctcgcttttgcagcttctaagcttaaattatctctttgtatgattctttttaggctgagttctttaggagcatagattaagatcacttttcccaaaccatcataagcaccgctttcaaaaaaaagaggaatttctacaaaaaaaggtttattttcttgttctagaatttgcatttgttctaaaatttgagcacgaattttaggatgggtgaaattttctaatatggttttggcttctttgttttgaaaaacaatttctccaagaatttttctatctatcttgccctctgctttcaataaattttttttatgaaatttagagaaaatttgagccagttccaaagcatatttatctaaaatttcgtgagcgatactgtctgcactaatgcttttaaagcccaaagaatttgctatttctataaaagtgctttttccacaggctatagaggcggttacaaaaaaagcgtttttcatcttatgccttattaaaacttttttcgttaaaatatctttttagttcttaaaggaaaataaatgaaaatttcatacgaagatgctggagtaagtatagataatggcaatgcctttgtagaggcgatcaaacctttggtaaaagaaacctttaacgataaagttgtaggaggtattggctcttttgctggagcttttagaatgccaagtggctttaaaaatcctgtaattttgggggctacagatggtgttgggactaaacttcgtttggctattgatgcaaaaaaatacgacaccatagggcaagatttagtagcaatgtgcgtgaatgatttgatttgtaattttgctactcctttgtttttcttggattattacgctacagccaagcttgaagtagaggttgcaaagtcagttgtggcaggcattgccgaggggtgtaaaatggcaaattgtgctttaataggcggagagactgccgaaatgcctggaatgtatgcaaaagatgattttgatcttgcgggttttgcagtgggcatggctgaagaagatgagatcgatagaagtaaatttgttaaaaatggcgatattttgcttgctcttcctagttcaggacttcattcaaatggctattctttagcaagaaaagtactttttgaaggtttaaaactgaaatttgatgataagatagaaggtaaaaatttaatcgatgttttattagagcctacaagaatttatgtacgcgattttcttactttaaagccttatatcaatgctttagcacacatcacagggggtggtttagtagaaaatttaccacgcgttttgcctcgcggaatgggagcaactatacgcaaacatcatcttaaaacccctgaaattttctataccataggacaagctgtagaagaaagtgaaatgtatagaagctttaatatgggtgtaggcttagtaatggtcgtagatccatctaatgtaagtaaggttttagaaaactcagacgcttttatcatcggcgaaatcacgatcaacgaaggtgttgttttagagtaaaataaagcgttaatgtgctttattttactctattaagttctatttttgtggaattttgctctttgggcaaaggattggtttgcgctagataaaaggcaacggctatattgattatcatagctataagtaaaagtggagtggtgcgttttataatatccatcggatctacttttacaaatccagccaaagctatgataccgcctgctatgggcgaggctgcgcgccctaaacaagatgcaatttctataggtaaaacaaaagtgataggggcaacgcctaattttgtagctatatcaggagctaatttcccaaaagcattaaaagcagcaatcccacttcccataatcactgtagcaaaataaactaaaaagcttaaaacagtgatgcttaaaagtatgccaaaccatgcaaaatttcctgttccaagatttgaaaccgcgttagcaaggatattaactccaccaagtgctttaatgccttcagcaaatactccagcggcgatgattatgcttacgactgagataaaaatttcagccatagcttttaaaatcaccatcatatcttcgcctaattttctagcatttctgtgtcttgcaaattcaacaagaaaaactaaagaaatgcttaaaaaatttgctgttacaacatcaagcttgatagtaaaaaaatatgctataaataaaaatacgacaggcagccaaggaaagagtatataaaaagtaggacatttaggatcaatgattggtggaatttcaacttcatcatttaaaacacctttttctttatctcttttatcaacccaagcaaagtaaaaaggtattaagatagcaataaccatcacataagcaatcacgctataaatttgataatttaaaaaaagccccacgacattatcgctttgtcctaccatatctgccatattgattgaatttccatcttttggaccataatcaagcgcaatcaaagaaagcacacatacagctgtaataggacggattttaagtgagattaaaacaggataaatacatgctaataaaagcaaaagaagtccagcatagctagaaataacaatttttaaggccattccaacgataaaagttccgcttaaaatcaaatatttatttttgatttttcctaaaggtttgtttgctaaaaaagcgagtttagccgaagcattgatatgtttcatataagcagcaaaacctgccacactcatgataataagtcctactccagaaagctgacttttaaaagtcgctgtgataaaagcatagctatcaagtaaaacattcaaaaagcttgcatgttctctgctcggagcttttggtataggtgttcctgtgatgtaaaaagcaaaaataagcaagataatacctgaaagaaaaaatacaaaaataggattgtattttttaagtatataataagcaacgacaattaccgctaaaagtgtagaacatatcataaaaattggcatgttttctcctaaagttattattagcttttattttattttagctaaaatttaactaataaatatttttcatttaaaattttacttattttttgcattataaaattaataatatgtatagtttggttactgaaaagtttatgtttgtttaaaaaaatgatttttgtattataattatacacaaatcataaatattaaaaaggatctagtgtggcaagaattttggcatttgatataggaataagctctattggctgggcatttagtgaaaatgatgagttaaaagattgtggagttaggatttttacaaaggctgaaaatcccaaaacaggagaatccttagccttgccaagacgccttgcaagaagtgccagaaaacgccttgctagacgcaaagcaaggctaaatcacttaaaacatttaatcgcaaatgaatttaagttaaattatgaagattatcaaagctttgatgaaagtttagctaaggcttataaaggctctttaattagcccttatgagttaagatttagagctttaaacgagcttttaagtaagcaagattttgcaagagtgattttacatattgcaaaaaggcgtggctatgatgatattaaaaataatggtgatgaagaaaagagcgagattttaaaagctatcaagcaaaatgaagaaaaactagtaaattatcaaagtgtgggagagtatctttataaagagtattttcaaaaattcaaagaaaattccaaagaatttataaatgttagaaataaaaaagaaagttatgaacgctgcatagcgcaaagttttttaaaagatgaattaaagcttatttttcaaaaacaaagagaatttggcttttctttttcaaagaaatttgaagaagaagtgcttagtgtagcattttataaaagggctttaaaagatttttctcatttagtgggaaattgtagtttttttactgatgaaaaaagagcgccaaaaaattcgcctttagcttttatgtttgtagcacttacaagaattatcaatcttttaaacaatcttaaaaatactgaaggaattttatatacaaaagatgatttaaacacccttttaaatgaagttttaaaaaacggcactctaacttataaacaaacaaaaaagcttttgggcttaagcgatgattatgaatttaaaggagaaaaaggaacttattttattgagtttaaaaaatacaaagaatttataaaagccctaggtgagcataatttaagccaagataatttaaatgaaatagcaaaagatattactcttataaaagatgagattaaacttaaaaaggctttagcaaaatatgatttaaatcaaaatcaaattgatagtttaagcaaattggaatttaaagaccatttaaatataagttttaaagccttaaaacttatcactcctttaatgcttgaaggtaaaaaatacgatgaagcttacaatgagcttaatttaaaagtagcaatcaatgaagataaaaaagactttttacccgcatttaatgaaacttattacaaagatgaagtaactaatcctgtggttttaagggcgattaaagaatatagaaaggtcttaaatgccttacttaaaaaatacggtaaagtgcataaaataaacattgaattagcaagagaagtaggtaaaaatcacagccaaagagctaaaatagaaaaagagcaaaacgaaaactacaaggccaaaaaagacgccgaacttgaatgtgaaaaactaggcttaaaaataaatagcaaaaatattttaaaattaagattatttaaagaacaaaaagaattttgtgcttatagtggagaaaagattaaaattagtgatttgcaagatgaaaaaatgcttgaaattgatcacatttacccttattctagaagttttgatgattcttatatgaataaagttttagtttttaccaagcaaaatcaagaaaaacttaatcaaaccccctttgaagcctttggcaatgatagtgcaaaatggcagaaaattgaagttttagcaaaaaatttacctactataaaaagcaaaaaagaattttagataaaaattacaaagacaaagagcaaaaagactttaaagatagaaatctaaacgatactcgctacatcgcaaggcttgttttaaactacactaaagattatttagattttttacctttaagcgatgatgaaaatacaaagttaaacgacacacaaaaaggctcaaaagtgcatgtagaagcaaaaagcggtatgcttacatcggctttaagacacacttggggctttagcgctaaggatagaaataaccatcttcatcacgccatcgatgcagtaattattgcttatgcaaacaactctatcgtaaaggctttttcagattttaaaaaagagcaagaaagcaacagtgcagaactttatgcaaaaaaaattagtgaattagattataaaaacaaaaggaagttttttgagccttttagtggttttaggcaaaaggttttagataaaattgatgaaatttttgtctcaaaacctgagagaaaaaagccaagtggagctttacatgaagaaacatttagaaaagaagaagaattctatcaatcatacggcggaaaagaaggagttttaaaagccctagagcttggtaaaatccgcaaagtaaatggtaaaatagttaaaaatggcgatatgtttagagtggatatttttaaacacaaaaagacaaataaattttatgctgtgccaatttatactatggattttgctttaaaagtattaccaaataaagctgtagcacgaagtaaaaaaggtgagataaaagactggattttaatggatgaaaattatgagttttgcttttctttatataaagatagtttgattttaattcaaactaaagatatgcaagagccagaatttgtttattataatgcttttacaagctctactgttagtttgattgtttcaaaacacgataataaatttgaaacgctaagcaaaaatcaaaaaatattgtttaaaaatgcaaatgaaaaagaagtaatcgcaaaaagcataggaattcaaaatctaaaagtatttgaaaaatacatagtttcagcacttggggaagttacaaaggctgagtttagacaaagagaagattttaaaaaatgagttacgatgaagcttttaaaacactgcttattagctctaatgccaagctaaatttagagctaaatcatcttgtgattaagcaagatgaaaatatagccaaattgtttttaaaagatataaacatcatcgttttagaaagcttacaagtaagcattagttccgcactttttaatgcctttgcaaggcataaaatcatcttgctaacctgcgatgaaactcatagtataaatggtgtttttactccttttttagggcattttcaaagtgcaaaaatcgcaaaagagcaaatgaatgtaagcgctcaaaaaaaggctattttatggcaaaaaatcattaaaaataaaatcctaaatcaagcctttgttttgaaaaaacacaataaaatagagcaaagcaatgagcttataaatttggctaaaaaagtaagcttaaatgatagtaaaaatattgaagctgttgcggcggcgctttattttaaaactttgtttggcgtttctttttcaagagatgagctttgctttgaaaattctgctttaaattatggctatgcaatcattagggcttgtattattagagcagtttgtataagtgggcttttgccttggcttggcataaagcacgataatatttataattcttttgcactttgcgatgatttgatagaagtgtttagggctagtgttgatgattgtgttttaaagcttaagggtgaaagtgagtttttaagcaaagatgacaaaagagcgttgattggcaatttacaaagcaaaatcaattttgatgggcaaaattatcctttaaacagagcgataaatcattatgtggcaaattttaaaaatgctttattgtatgaagatgaactaaagatagtgaaatttgatgattgaagataaatttatgcgtgtgcttttgatgtttgatgtgccaactaaaagtaaaaaagagcaaaaactagcaagtaaatttagaaataatcttataaaattaggttattttatgctgcaatttagtgtttatatgcgtatttgcaagggtttaagttctgcaaaaagttctattgaaaatgtaaaaaagattttgccaccttatggaaatgtaagggctttaatcatcactgaaaagcagtttgataaaatggagcttttgcttggtggcatagtttttaacgaaaaagttaataacgaaaccaatttaacgctttttgatatagatagtcatggagaatttaaatataaaaattcaaataatgaagaaattcaaataaacaaaaaacaagaaaaatatcatcagcaaaatttatttgaattttaaaagcggttttaggggattgtaacccggcagagtcccgcaaactctttattttagtccctttttaaatttcttatgagattatagcataatttttgctatttttcatgaaaaaccccgaaattttcattatctggtaaatatctattttaccataaagaaatttaaaaagggactaaaacagcttttttatagacaaatgggcttatttcattttaccataaagaaatttaaaaagggactaaaacttcacgcaatttcataaattataaaagggaattttaccataaagaaatttaaaaagggactaaaacttgtcaataacacctttagttgttaaatacattttaccataaagaaatttaaaaagggactaaaacttcatatgcattatataattttatctccttattttaccataaagaaatttaaaaagggactaaaactaactcattagtcttaagataatcaaatccattttaccataaagaaatttaaaaagggactaaaacgtagaagtgtgcccatgcccatctgctcctattttaccataaagaaatttaaaaagggactaaaacgattatttactaaatctacactcaatttaaattttaccataaagaaatttaaaaagggactaaaactctataatattttttaactcgtaaaaatcaattttaccataaagaaatttaaaaagggactaaaacttaggacttacaaaagcaaacgataatagtattttaccataaagaaatttaaaaagggactaaccctagtggattgaaactccgctagggctaattactccactaaaaggaggttgcgaatttgaaacttattgaaatttagggttgattaaaatcgaaataaaattatttaaataattttaaggcataaagataatatctactaaactttcattttctaacatttcacattcttttggcaccaccataagagcagctttattgttaagattatttatgatcgcactagagccttcttttttgccttcaagattggctaaaatgcgtccatttttaaactctatattgcaagcgacaaattccaaataaggtgtttttttcttgtaacttccttgtaaaaaggctttgcaaatatagtctttaggttgaagtaaccaagagtttaaaatctctcttgcataaagattaaacatcaccatggctgagtaaggaaaacctggtaaggcgatgatgaatttttcattagccttagctattttgatatgtctacctggttttatgtcggctttatcgatgatgatttcgtattctttgatggctttttttaaaaagtcaaaatctcccatagaaaccccacccgttgtaaccaaaatatcacaactttgcaaagcactttcaagggtggaaaaagtggctttctcatcatcttttaaaagaggaaaaacccttgtatcgcaatttaaatttttagctaaattagctatggcgatatgatttgaagagcggatttgagcaggattttccaaggcttctcctagatctttgatctcacttccactacttaaaacccctacaataggctttataaacacactaatgtgaaaaaatccaagttcagctaaaagagctatctcgctataatttaaccttgtgccttttttgagcaaaatttcatcttttttatagttttctcctactgcacgcacggcaaaagcttggggaacttttttttctataaaaagagtatcattttctacgcgtacattttcaacagggactaaagtatcacttccctcgctcatgagtgagcccgtaaaggtttttacacaagtaccattttgcacgctaaattgtggcatagtacccgcaggtgtgaggcctaaaatttttaaaggcttgtcttgatcttcaaatttgatcgcataaccatccatagccgaggttggaaattcaggctgatttttaagggcttttatatcttgagctaaaatgcgtcctaaacactctgtaagagctattttttcaatcttttcataagttttgatatgagaatgtaaaatttttaaactttcttcataagacattagcattttttatccttttaaaagtcctgcaccgcaaagcttggttgatctttctttggcataaattctttctttgtttatcacatcatacttccaaatgggcgcacttgctttaaaatcttcaacaaattcattaagaagtttaagtcctaattttctttgtttgcttaaaattcctgcaaaatacgagctttcatgtatcgctacatcgcctatagagtgagcaaaaagcaagctaataccatcaaaatctactcttttttgccactcatcaaaccatttttttaaaagcgattcataaatatcaaaactaagtgcctcaatacctccttcttcacgcacaataccacaaaaagtcagtaaagcaccgcagtttttatccttggaaaattcataccattggctataaattttaggaatatctaaagagccttgataaagtgtaaaatgtttcatttagcctccacaaactggcggtaaaagtgctattttatcaccatcttttaacttggtgttttcatcaaaaatgatttcatcatttaaagatatggcacaaagttctagccattcttttaaactctcatctttttgcaaaatttcttttaattcttttaaattttttacttcaagttctaaattttctttatttatagggcctaaaaattccacttttaccattttattcctttacttctaaatttcccatcattcctaaatcttcatgttctaaaatatggcaatgatacattctaagtcctttaaaatcttgtttcattctaagtcttaactcttcattaggacgcacatttatagtatctctgaaggctctaaattcggctttttgaactttgccattgagttttgatgagatgagttcaaattgcgtgccgtgtatgtggaaaggatgatccatgtgagatttgtttatcactatccagtcttcaactactccgattttagaatttaaatcaacgcgttttaaattataacttttgccatttattaaaaacatagatgcaagagcagtttttagttcatcttcgcttttgcccatcattccatgcatttgcatgtgatcttcactcatgattatttctttaaattccttaggttcttctaaaggtttgaaaatttttaaattttttggaagttctaatttttctttttttaggctaatactagctaaaaatagggtattagattcttcttttaccatcattttgtccctatcataataagcactttctagcttaaaattcccatcttttggagcgtcgattaaaacttctacacgagaagcaggacttaagaaaagttcttctttataaatagctttttctataagtccaccatcagtaccaacaagtataaacttagctccttgtatgcgtaaatttaaatatcttgctgcagtagcattataaatgcgtatgcgttcgtttgtggcgagtttgattttaggtttaaattgtccattgatgagtacaaattctccttctctaccatttagccaatcatttaggttgttgtttggaatttgagcgttttcatcaagacgcaaatcgctaatcatcaaatctttttcttttaaatgacttaaagcatctttttttgctttgatcacaaaagcccctgctaaacccataaaaacttgtttagaagccgtataatgaggatgtggatgataccagtaagttcctgcgctatcttgaggaatttcaaaacgatatattctttcttctcctgctaagataggatcatgtgggcttccatcttgatcaggtggcacaggaacgccatgccaatgtatagttgtagcttctttgagtttgtttttgactaaaatttcaagtttatctccttcaaaaacttctatttttggagcaggcacgaggccattgtaagtataaaataaggtttttttacctttgataagctctatatgattttctttgatttctagggtagcacgaaaaatatttttttctttactttcatttttgagtaaaggcaaggcttttaaaatttctccttgggggaattgttttggatctaaaagctttaaattttttggagcaaagtttataaaagaagtatctaagtcatgatttatagaatgatttttatgcatggagtgcatatcgtgcataggatttgcataggctacacccatacttgctagagtaagtgcattaaattttaaaaaatttcttctattcattagtttttccttttgcttgattttttgtattatagtcattatttttttaactttagtaaatatttattttgaaaatttggtttaattttgttatgattttagcaatttaatcaaggaaaaataatgttttatgaaaaaattcaaaccccagcttatattttagaagaagataaattaagaaaaaattgtgagcttttagcaagtgttggcgaaaaaagtggtgctaaagtgcttttagctttaaaaggttttgctttttcaggagcgatgaaaattgttggagaatacttaaaaggttgtacttgtagcggactttgggaagcaaaatttgctaaagaatacatggataaagaaattcatatttattcgcctgcctttaaagaagacgaaatgagtgagattgcccatttgtctcatcatattgtttttaattctttgtatcaatttgataaatttaaatccttgtgtgctaataactccttaggacttcgttgcaatttagaattttcttttgctcctaaagagctttataatccttgcgggaaatactctagactagggattttgagcaaggatttagaaaattttgatttaagcggagtagaaggacttcattttcatgcactttgtgaagagagtgctgatgctttagaagctgttttaaaggtttttgaagagaaatttggcaaatggatcaaacagatgaaatgggtcaattttggcggaggtcatcatatcacaaaacagggctatgatatccgaaaaatcatcactctttgtaagaattttagtgataaatatggcgtgcaagtttatcttgagccaggagaagctgtgggttggcaaagtggggttttggtagcaagtgtagtggatatagttgaaaatgagaaaagaattgctattttagacacttcaagtgaagctcatatgcctgataccatcatcatgccttatacgagcgaggttttaaatgctagaattttagcaacaagagaaaatgaaaaaatttcggatttcaaagaaaatgaatttgcctatttactcacaggaaatacttgtttagctggagatgtgatgggagagtacgcttttaaagaagaattaaaacgcggagatagggtggtatttttagatcaaattcattattctatagtgaaaaatacaacttttaatggcataagacttccaaatttaatgcttttaaattccaaaaatgagcttgaaatggtaagagaattttcttacaaggattacgctctaagaaattaaaattttttggaagaataattttattatttctttttagcataaaatattttttaaatgacaaaatgaaagttttgttttttaggtttaaatattttatgcaactttttttaaaaaacctcattaaaatactattttataggcttttaaagctaaattctattttttcagattaggcagatttttaagaaaatttcagtttattttaaaacaaatcatattaagataaatcagtcaaaaataaggattaagaaggaaaattaggtgtaatttgcataatattattttgcaaattatttaacggcaaatcttcaaaaatttgaatgagttaaaaatggatttagaaaaactaagattagctagaagtctttattatcagtgcttaggagaacttttcgttttttcattttctgaaaatagattgtgtaacttaaaagcttatttagaagctatgcaagagggtttatttgatgaaagtttaagaacaagctttgaaattttacttcgtaatttacaagatgtacaagatcttcaagcattttataaagaatacgatgagctttttttagcacttaaaaacactattcctatgactttttcttacatagaagaaggctttgaaaattcaaaggcattgcttaatgtaaggcagattttagctaaaagcacaatccgccgcaatgaaaaaatttttaaagaagctgaagatagtgtaggattttgttttgttttaatgagtgaatttctaaaaaataaggaagatgaacttgctaaggcattgtttgaaaaagtcatcaatcaaagcattgatgaatttttaatgcttattttttcaaattcaaaagcgaagctttataaagaaatagcaaatattgctgcgcagtttatagaatttgaaagatattgttttgaacttgaaaaacctactataaaaccttctaagaaagttcaaaatgatttatctcgttctgaatttttaagaagagaagcaaataaacaaaggagatctcgtgaaaaatcgcagggaatttcttaaaaaatctgctattgctttgggtactgcaagtcttttaggcggtgcaagtgtagcttttgggcaagatgaagaaagaaaggatcttgttagaggcaaaagcaaaaagaaggaagtgctttatcaaagaagtgctaattgggaaaaatattatatgagggctgaataatgtcaagtatgaatgaaactatcaagcttaatcgccgttcttttcttaaaatggccgcgctttcaagtttggcaagtccgttgctagctagaagcgaaactttaagagaagcaaatgcggatgaattaaaagaagcttatgaaggaagtcaaaagattaagagtgtatgtaccgcatgttctgtaggctgcggaattattgcagaagttcaaaacggagtgtggttgcgccaagaaatcgcacaagatcaccctgttagctcgggaggccattgctgtaagggctctgatatgatcgatatggtgcgttctcatgtgcgtttaaaataccctatgaaaaaagaaaatggagaatggaaacgcataagttatgagaaagctttaagtgagatcggagaaaaactagctgcttatcgtaaagaaaatccagaaagcgttatgtttttaggttctgcaaaactaaacaatgaacaagcttattatataagaaaattcgcagcattttttggaaccaataatgtagatcatcaagctagaatttgacacagcgcaacagtcgccggtgtggcgaatacatttggttatggcgctatgacaaaccatcttggagacatccaaagaagtaaatgtatcattatcattggagcaaatccagcggtaaatcaccctgtaggttttagacacttcttaaaagcaaaagaaaaaggtgctaagcttatcgttgtagatcctagatttacaaagagtgcagcaaaagcagatatttatgcaagaattcgtccaggtactgatattgctttcatgtatggaatgttaaaaatcatttttgatgaaggtttagaagatacaaaataccttgatgaaagagtttttggtatcgataaaattcgtgaagaagctgcaaaatggactgctgaagaagtagaaaatgtaacaggaatttctaaagaactcctcattcaaatcactcatgaagtagctaaaaataaaccaactacattgatttgggctatgggcttaacacagcacaccgtaggaacttcaaatacgcgtttagcacctatagtacaaatggttttaggaaatataggtaaattcggcggcggggtaaatattttacgcggacacgataatgtgcaaggtgcttcagatatggcgtgtttgagtgaaaatttacctggttattatcctttaaatgaagcgacttggagatactatgccaaaatttggggcgtggattatgagtggcttttaggaaattttgtaagcaaagattggatgcataaaactggactttcacttgctagatggtgggctgcagccttaaatggcaaagatggaaatgataaagtggataatgcaggaacgtctttgaaagctttggtggtaatgggaaatggtatcacttcgactgcacagcaagctaaagttaaagaaggtttggaagctttagaacttttggttttagctgatccttttgtcaatgaagcaggaattattgcagaaagaaaagatggaatttatcttttacctgctgcaacgcagtttgaaacaagtggaagcgtaacagctacaaatcgtagcggacaatggagatttaaggttatagatccactttatgaaagcaaagaagatcaagaaattttatttgagcttgccaaaaaattaggtttttatgaagactttactaaaaccttacgcgatgaaaatggcaagattgtttggcctgaaaatgctactagagaaattgcaagtgcagttagaagtataggacttaatggttggagccctgaaagacttaaaaaacatactttaaattgggataaatttgatgaggtgactttagaaggaaaagacgaagtagcgggtgaatactatgggcttccttggccttgctggagtgataaacatccaggatctcctgtac

SEQ ID NO: 3783 - DNA, 22956 bp, synthetic construct
  source 1..22956: mol_type = other DNA
  misc_feature 1..22956: note = Synthetic
ttgtgtatcaatgaagagggtgttaatgtgatggcacaaatggttaaaatttatgaaaaatatcgttgcaccatcatagctgttatggaagttccaaaagagcaagtatcaagttatggagtgattgcaggaaatttcgtagaagaggatttgatcatggtaaattcaatgatagaaaaaccatctcctcaagaagctccaagcaatcttgctatcataggaagatatattttaactcctgatatttttggaattttagaaaatactaaagcaggaaaaaatggagaaattcaactcacagatgcacttttaacccaagcgactaatggtatggttttagcttacaaatttaagggaaaacgctttgattgcggaagtgtagagggctttgtagaggctacaaattatttttatgagaaaagtaaatgctaaataatactcttttttttaaagaaagcgaaattcgcactataagttcttatgcaaatcgtatcaatgatgaagtagaaagtggggatatagggtattatcatcttatcgatacaagtttaaccttaatagacgaaagcttaaatttcatacaagataaagagcatgtaaaaaatatcgttttagtgggtatgggtggttcaagttgcggtgttaaagctttgcgtgatatgctttttgatgaaaaaaataatcaaagagaactttttatacttgataataccagttcgcactcctttagcaggactttagagaaaatcaagcttgaagaaagtttgtttttaatcatcagtaaaacaggtagcactatagaagtagtatcgctttttaagcttcttatagaacattttaaactcgatatgcaagaattaaaaaaatactttatttttatcacagataaagattctaaactgcataaagagagtgagaatttaggcatcaaatgcttttttatccctgcaaatgtaggagggcgttttagcatactttcagctgtgggtatagtgccactttgtttttgtggttataatgttaaagctcttttagaaggagctaaggcatgctttgaagatttttttatacataaaaaagatgaaattttgcaaaaagcttatcattattgtactcacaaaagtgcaaatatcaatgtacttttttcttacagcgatgcttttaagggttttaatgaatggtatatccagcttattgctgaaagtttgggtaaaaaacaaggctacaaacgcataggtttaactcctatcgctcttataggagcaagggatcagcacagctttttacaactcattatggatgggccaaaaaacaaaactattacttttttaaaaatcaaagatagtcaaaaggctccggttatacccgatatccattttaaatttttagatgatttgagcaataaagtcaatttacacgatcttttaaatgctcaatgtgacgcgacaatgcatgctttaattgctgaaaatttaagtgtcgatataatagagcttgaaaaattagatgcatggcatgcgggatatttgatgtattattatgagctttttacttcggcttgtggggtaatgctaggaattaatacttatgatcagcctggggttgaggttgggaagttgattttaaaaaatattttaaaatcatagtaaattttaaataaaaagagtataatagaaataagtaaaattaataataaaaatttttaaataataataattattatttaaggattttatgttataattttaaaaattaaaaaaaggagttaacatgtcagtaacaaaacaattattacaaatgcaagcagatgctcatcatttatgggttaaatttcacaattatcattggaatgttaagggtttacagttttattcaatccacgaatatacagaaaaagcttatgaagaaatggcagagctttttgataattgcgcagaaagagctttgcaacttggtgaaaaagctatcacttgccaaaaaactttaatggaaaatgcaaaaagtccaaaagtagaaaaagattgtttcactccagttgaagtgatggagttgatcaaaaaagattacgaatatcttttggcagaatttaaaaaattaaacgaagaagctgaaaaagctagcgatactactacagctgcttttgctcaagaaaatatagcaaaatacgaaaaaagcctttggatgcttgcttcagttttacaaaatacttgcaaaatgtaatttcaaggggctttttgcccctttatgatttaaatcaatttttagaactttctcataaaaaaacttaaattctcaagagtcaaatttaaagaaaaatttatattttgattttaagcaaaataaaaatactctaatacatttatatcattacgccttactttctcatgctgcttatcttaatttaaatacaacagatatttttttaaatatagatagaaaaacattgtttaaggttttaactcataatatttttcaaaaagaatgcgttacaataggaaaatttgagcctttgatggcattttattttattaagcgatttgatttacttgctcatactaatgaagattatcttgattcaaggggtgggtttagagcaagtttatttcaaaacaaggaaaataaagaatttattttagctatcgcaggaagtgatttaagacctttaaaatttgatattggagatttgattagtgattttatacttctaaatggaaaaattcctaaaaaacaatttgattctttgttaaaattttatacactaataaaaaaagaattttgctttgataaaattactttagtaggacattctttaggtgggcatttagcacagctttttgttttagattttgccttagaagttcaaaatatttacacttttcaagccccaggtattgctaaaaaaatactaaaggacatcaaaaatgaagcttatatccaaaaaatttcttatcattttcatacttgtgatgattttaaaaaaaatgcatggtataaatttaattttgttcaaaatttgcattctaaaataggatatccaatttggctaaatataggaaataaattccatcatcctaagatttgtcccaagatattgcataaggttttaaatatgttataattttcctttttaaaaggataatatttgaaagtattaaattttttttacgaaaatcatcccaaatttgaaataagctatgaaagaaaggtacaaattcctctttgtaatatcatcatcaaagggccaaaatttagcggtaaaaaaaccttgatttttaactatttatcccaatttaagcccaatgaaattttatttttaaatttgtatgatactcgttttgaaaaccaaagcttagggcatctttcaaattttttagaaaaaaatgtccaaataaaattcctttgcatatacaatgtcgaatttgccttaaatttgcaagatattaaaattcctatcatcataagtacagataaaaaagatttgcatatcgaaggatttcaagagcttgagcttgattattttgactttgaagaatttgtaagtatcagtagaaaaaacttaccgataaacaatctagtgggactttttttacaaagtgggcgtagtaaattaggtgaaaaaaatatacttttaagacaaaattttaacactctagaacttgaaattttaaaatacttagctttaaatttaggacagcagatcagtatttccaagctttttttagagcttaaaaaaaagctaaaaacatctaaagatagcgtttatcacaccataaaagagcttgaaaatacctatatcatccatcctataagccacgatgaaaaaaagcttcaaaaaatttattttagggattttggcttaagaaacaatctatgcatacaaaaagattttgctcatttgtttgaaaatcttattttaaatgagctttttaaatttaaacaagaatttttttacaataaattttttacattttatagtaaggtttcaaaaatcgcatatatttccagtccgacgctagatatagacttgatcaaattgcgcgctaagaaaatcctttctaagggtttggagcttgggatttttcatgtggttttcatcactctttcgagcgaagatagcttttttgagcaaggggtgaaatttgaagttttgccttttgataaattttcactcggcttttagctaagactagaaagattttggagtatcgtatcgctcaagatcgtatcgttggatgattttagtaacgatattgatataataacccttgcgctcggagtaagaatctaaagttttaatagcctctagtcctgttatttctttgccttcactttcaaatttagctctttcgttgcgaaattcctcataagcaaagtgccgatttaaattcagcacataagaatccacactatcttgcaagctatcaaaaattctaattttatgttttttatcaggatatcttagatcagggattaagcccttttctccccaggtccattctccaaaaagattatttgcctctcttgcaaaacggcttgttcccatagcactttcgaccaaagcttgggctatacccatggatttcggaattttttgaatgcgttttttgtattctgtaaaatcataaagattttcaacgcggtatttgtttttaagattgattaatttttctagattgttttggtttgaatttctaagtccatttttatacgcatcgtaaaaaaaagcttctacaaaagccctttctttggctatttcttcaaagcttttatcaaacattgcattcattttggtgaaaaatatttgtcttttttgctctacattgagtttataatactcctctccaaagccatttttaagctcgctattgccaaaaagagggagtaaataaaaactaagaaaaattataattcgcttcaaagcaatatctcacttttcccttaaaaaataattcttcattttcgaatttaaaacttagctcttcaccgctttttggaatcactctagcttgattgtgaatttttttatttaagaatgcaagataaaaacaagctcccatgcccgtgccacatgcttgcgtttcatcttctacgcctctttcaaaagtgcgaactcttaaagtattgtcgttttcaacttttacaaaatttacattggcattatatttttctctcatttgtttgcaaagcttaagatcaaactcatccaaattttcacaaaaatgcaccaaatgtggaactcccgtatcgcaaagttgccagtttttttcacactcactaaaggcatcttgtatgttttttatcttccctaaagaaacttctacgctattattatcaacatttgcttttataactcctgctccggtaagaaaagccatatggggtttgataccatttatatggtgtgcaaaatgtgccgcagcccttgagccattgccacacatagcagcccttgagccatcgttattataaaattcccattcaaagtcgtatttttcatgaggtaatatcacgataaagccatccgcacctataccctcataacgattgcaaagttctttagctaaagcacttctgtcttttttttcacttgcatttattatcacaaaatcattgccacttgcgcaatatttataaaacttcacatttttcctttagaaatttcttgtattactttaacacattcttgcctaaaatcggcataagagccaatatttttaatgataaaatctgcttttttaagtttttcttcaatatctatttgagaatcaagcctcgcttttgcagcttctaagcttaaattatctctttgtatgattctttttaggctgagttctttaggagcatagattaagatcacttttcccaaaccatcataagcaccgctttcaaaaaaaagaggaatttctacaaaaaaaggtttattttcttgttctagaatttgcatttgttctaaaatttgagcacgaattttaggatgggtgaaattttctaatatggttttggcttctttgttttgaaaaacaatttctccaagaatttttctatctatcttgccctctgctttcaataaattttttttatgaaatttagagaaaatttgagccagttccaaagcatatttatctaaaatttcgtgagcgatactgtctgcactaatgcttttaaagcccaaagaatttgctatttctataaaagtgcttttaccacaagcaattgaagcggttacaaaaaaagcgtttttcatcttatgccttattaaaacttttttcgttaaaatatctttttagttcttaaaggaaaataaatgaaaatttcatacgaagatgctggagtaagtatagataatggcaatgcctttgtagaggctataaaacctttggttaaagaaacttttaatgataatgttgtaggtggaattggttcttttgctggtgcttttagaatgccaagtggctttaaaaatcctgtaattttgggggctacagatggtgttgggactaaacttcgtttggctattgatgcaaaaaaatacgacaccatagggcaagatttagtagcaatgtgtgtgaatgatttgatttgtaattttgctactcctttgtttttcttggattattacgctacagccaagcttgaagtagaggttgcaaagtcagttgtatcaggcattgccaagggatgtaagatggcaaattgtgcattaattggcggagaaactgctgaaatgcctggaatgtatgcaaaagatgattttgatcttgcgggttttgcagtgggtatggctgaagaagatgagattgatagaagtaaatttgttaaaaatggtgatattttattggcactttctagttcaggacttcattcaaatggttattctttagctagaaaagtactttttgaaagtttaaaattaaaatttgatgacaagatagagggtaaaaatttaattgatattttgttagaacctacaaggatttatgtgcgtgattttcttacactaaagccttatatcagtgctctagcacatattacagggggtggtttagtagaaaatttaccacgcgttttacctcgtggtatgggtgcaactatacgcaaacatcatcttaaaactcctgaaattttttatactataggacaggctgtagaagaaagcgaaatgtatagaagctttaatatgggagtgggtttagtaatggttgtagatccttctaatgtaagtagggttttagaaaattcagatgcctttattatcggcgaaatttgcattaatgaaggtattgttttagagtaaaaagaattttttttaagatattttaagagtaaattaaaaaaataataaggaaaagtgatgaaaaatattgtctttcattcggatggttttggagatttattagtttgttttaaagctttgtatgctataaagcaactctatccaaagtataaattatttttattaacaaatggattaatggaaagtgattttttagaaaaaattccatttattgatgaagttttgatttataaggatgattttttagaaaaaattcaaagcaaaaatccagtaatttttattaccacgcgaagacaaggtttatattttaaaaaattaaaatttttaaatgttcaaaaatgtatagtattccctcatcttattagtataatttctaaaaatttaaccacacctttaccattttttagagctaaaaaacatatgagtgaaattgttttaaaattggttaggatgattaatactaggcattttgataaaaattttaatcaaattgatttttctaaaattaaaaatttattaccttatgatgcaagattaagtgataatttttttaaacaaattgatacaaaatatgaaaaaattataggtattaatgctttttcaaataatagcgaatatagaggatttaatttttttataaaagattggatagggcttgcaaggcaactttctttaaaatatcctaaatttttatttatacttttaaattttagtacgaattctattcagtataatattgatcagaatgcaaatttgaaagttttctgtaataataaaaatattgcttctttggtaagtatttctcaaaagctagattttttaattactgttgatactggaaatttacatctttgtgatattttacaaattcctactttggcttttacaagtagtcttgcagcttatagatttggaggtggaagttatggaggtagatttgataaattgatagtaaaaccagcttggcaaaaagaatatagaaaaatttatgaaatttttactaaaaaagcagaaaataatttagaaaatttatagtttttataaaataataaatatttattatttaaagatactgctatttttgtagtgttttgttcttttggcaaaggattggtttgtgctagataaaaggctacaagcacatttacaagcgtaaaagaggagtggttcgttttataatatccattggagctacttttgcaaatccagctaaagctatgattccgcctgctattggtgaagctgcacgacctaaacaagatgcaatttctataggtaaaacaaaagtgataggggcaacgcctaattttgtagctatatcaggagctaatttcccaaaagcattaaaagcagcaatcccacttcccataatcactgtagcaaaataaactaaaaagcttaaaatagctatactcaaaagaattccaaaccatgcaaaatttcctgttccaagatttgaaaccgcgttagcaaggatattaactccaccaagtgctttaatgccttcagcaaatactccagcggcgatgattatgcttacgactgagataaaaatttcagccatagcttttaaaatcaccatcatatcttcgcctaattttctagcatttctgtgtcttgcaaattcaacaagaaaaactaaagaaatgcttaaaaaatttgctgttacaacatcaagcttgatagtaaaaaaatatgctataaataaaaatacgacaggcagccaaggaaagagtatataaaaagtaggacatttaggatcaatgattggtggaatttcaacttcatcatttaaaacacctttttctttatctcttttatcaacccaagcaaagtaaaaaggtattaagatagcaataaccatcacataagcaatcacgctataaatttgataatttaaaaaaagccccacgacattatcgctttgtcctaccatatctgccatattgattgaatttccatcttttggaccataatcaagcgcaatcaaagaaagcacacatacagctgtaataggacggattttaagtgagattaaaacaggataaatacatgctaataaaagcaaaagaagtccagcatagctagaaataacaatttttaaggccattccaacgataaaagttccgcttaaaatcaaatatttatttttgatttttcctaaaggtttgtttgctaaaaaagcgagtttagccgaagcattgatatgtttcatataagcagcaaaacctgccacactcatgataataagtcctactccagaaagctgacttttaaaagtcgctgtgataaaagcatagctatcaagtaaaacattcaaaaagcttgcatgttctctgctcggggcttttggtataggtgttcctgtgatgtaaaaagcaaaaataagcaagataatacctgaaagaaaaaatacaaaaataggattgtattttttaagtatataataagcaacgacaattaccgctaaaagtgtagaacatatcataaaaattggcatgttttctcctaaagttattattagcttttattttattttagctaaaatttaactaataaatatttttcatttaaaattttacttattttttacattataacattaataatatgtatagtttggttactgaaaagtttatgtttatataaaaaatgatttttatattataattataaacaaattataaatatcaaaaaggatctagtgtggcaagaattttggcatttgatataggaataagctctattggttgggcatttagcgaaaatgatgagttaaaagattgtggagttaggatttttacaaaggctgaaaatcctaaaacaggagaatccttagccttaccaagacgccttgcaagaagtgccagaaaacgccttgctagacgcaaagcaaggctaaatcacttaaaacatttaatcgcaaatgaatttaagttaaattacgaagattatcaaagctttgatgaaagtttagctaaggcttataaaggctctttaattagtccttatgagttaagatttagagctttaaacgagcttttaagtaagcaagattttgcaagagtgattttacatattgcaaaaaggcgtggctatgatgatattaaaaataatggtgatgaagaaaagagcgagattttaaaagctatcaagcaaaatgaagaaaaactagtaaattatcaaagtgtgggagagtatctttataaagagtattttcaaaaattcaaagaaaattccaaagaatttataaatgttagaaataaaaaagaaagttatgaacgctgcatagcgcaaagttttttaaaagatgaattaaagcttatttttcaaaaacaaagagaatttggcttttctttttcaaagaaatttgaagaagaagtgcttagtgtagcattttataaaagggctttaaaagatttttctcatttagtgggaaattgtagtttttttactgatgaaaaaagagcgccaaaaaattcgcccttagcttttatgtttgtagcgcttacaagaattatcaatcttttaaacaatcttaaaaatactgaaggaattttatatacaaaagatgatttaaacgcccttttaaatgaagttttaaaaaacggcactctaacttataaacaaacaaaaaagcttttgggcttaagcgatgattatgaatttaaaggagaaaaaggaacttattttattgagtttaaaaaatacaaagaatttataaaagccctaggtgagcataatttaagccaagatgatttaaatgaaatagcaaaagatattactcttataaaagatgagattaaacttaaaaaggctttagcaaaatatgatttaaatcaaaatcaaattgatagtttaagcaaattggaatttaaagaccatttaaatataagttttaaagccttaaaacttatcactcctttaatgcttgaaggtaaaaaatacgatgaagcttgtaatgagcttaatttaaaagtagcaatcaatgaagataaaaaagattttttacccgcatttaatgaaacttattataaagatgaggtaactaatcctgtggttttaagagcgattaaagaatacagaaaggtcttaaatgctttacttaaaaaatacggcaaagtgcataaaataaacattgaattagcaagagaagtaggtaaaaatcacagccaaagagctaaaatagaaaaagagcaaaacgaaaactacaaggccaaaaaagacgccgaacttgaatgtgaaaaactaggcttaaaaataaatagcaaaaatattttaaaattaagattatttaaagaacaaaaagaattttgtgcttatagtggagaaaagattaaaattagtgatttgcaagatgaaaaaatgcttgaaattgatcacatttacccttattctagaagttttgatgattcttatatgaataaagttttagtttttaccaagcaaaatcaagaaaaacttaatcaaaccccctttgaagcctttggcaatgatagtgcaaaatggcagaaaattgaagttttagcaaaaaatttacctactaaaaagcaaaaaagaattttagataaaaattacaaagacaaagagcaaaaaaactttaaagatagaaatctaaacgatactcgctacatagcaaggcttgttttaaactacactaaagattatttagattttttacctttaagcgatgatgaaaatacaaaattaaacgatacacaaaaaggctcaaaagtgcatgtagaagcaaaaagcggtatgcttacatcggctttaagacacacttggggctttagcgctaaggatagaaataaccatcttcatcacgccatcgatgcagtaattattgcttatgcaaacaactctatcgtaaaggctttttcagattttaaaaaagagcaagaaagcaacagtgcagaactttatgcaaaaaaaaattagtgaattagattataaaaacaaaaggaagttttttgagccttttagtggttttaggcaaaaggttttagataaaattgatgaaatttttgtctcaaaacctgagagaaaaaagccaagtggagctttacatgaagaaacatttagaaaagaagaagaattctatcaatcatacggcggaaaagaaggagttttaaaagccctagagcttggtaaaatccgcaaagtaaatggtaaaatagttaaaaatggcgatatgtttagagtggatatttttaaacacaaaaagacaaataaattttatgctgtgccaatttatactatggattttgctttaaaagtattaccaaataaagctgtagcacgaagtaaaaaaggtgagataaaagactggattttaatggatgaaaattatgagttttgcttttctttatataaagatagtttgattttaattcaaactaaagatatgcaagagccagaatttgtttattataatgcttttacaagctctactgttagtttgattgtttcaaaacacgataataaatttgaaacgctaagcaaaaatcaaaaaatattgtttaaaaatgcaaatgaaaaagaagtaatcgcaaaaagcataggaattcaaaatctaaaagtatttgaaaaatacatagtttcagcacttggggaagttacaaaggctgagtttagacaaagagaagattttaaaaaatgagttacgatgaagcttttaaaacactgcttattagctctaatgccaagctaaatttagagctaaatcatcttgtgattaagcaagatgaaaatatagccaaattgtttttaaaagatataaacatcatcgttttagaaagcttacaagtaagcattagttccgcactttttaatgcctttgcaaggcataaaatcatcttgctaacctgcgatgaaactcatagtataaatggtgtttttactccttttttagggcattttcaaagtgcaaaaatcgcaaaagagcaaatgaatgtaagcgctcaaaaaaaggctattttatggcaaaaaatcattaaaaataaaatcctaaatcaagcctttgttttgaaaaaacacaataaaatagagcaaagcaatgagcttataaatttggctaaaaaagtaagcttaaatgatagtaaaaatattgaagctgttgcggcggcgctttattttaaaactttgtttggcgtttctttttcaagagatgagctttgctttgaaaattctgctttaaattatggctatgcaatcattagggcttgtattattagagcagtttgtataagtgggctcttggcataaagcacgataatatttataattcttttgcactttgcgatgatttgatagaagtgtttagggctagtgttgatgattgtgttttaaagcttaagggtgaaagtgagtttttaagcaaagatgacaaaagagcgttgattggcaatttacaaagcaaaatcaattttgatgggcaaaattatcctttaaacagagcgataaatcattatgtggcaaattttaaaaatgctttattgtatgaagatgaactaaagatagtgaaatttgatgattgaagataaatttatgcgtgtgcttttgatgtttgatgtgccaactaaaagtaaaaaagagcaaaaactagcaagtaaatttagaaataatcttataaaattaggttattttatgctgcaatttagtgtttatatgcgtatttgcaagggtttaagttctgcaaaaagttctattgaaaatgtaaaaaagattttgccaccttatggaaatgtaagggctttaatcatcactgaaaagcaatttgataaaatggagcttttgcttggtggcatagtttttaacgaaaaagttaataacgaaaccaatttaacgctttttgatatagatagtcatggagaatttaaatataaaaattcaaataatgaagaaattcaaataaacaaaaaacaagaaaaatatcatcagcaaaatttatttgaattttaaaagcggttttaggggattgtaacccggcagagtcccgcaaactctttattttagtccctttttaaatttcttatgagattatagcataatttttgctatttttcatgaaaaaccccgaaattttcattatctggtaaatatctattttaccataaagaaatttaaaaagggactaaaactgatgatgaagaatttaaaaagtacaaagaattttaccataaagaaatttaaaaagggactaaaacagaaaaagtggtgcccgaggccggacttgaattttaccataaagaaatttaaaaagggactaaaactactctataatttatttcaacatacacactattttaccataaagaaatttaaaaagggactaaaactacttcttcttttgtttgtcctccgccaaaattttaccataaagaaatttaaaaagggactaaaacacattgtattgaaattcaataggtaaattaattttaccataaagaaatttaaaaagggactaaaaccctaaagaaatattattccacatattatcaattttaccataaagaaatttaaaaagggactaaaacattattagttgcaggtatagattgtgtattattttaccataaagaaatttaaaaagggactaaaactgaatcttattacctgatttaacagcttgtattttaccataaagaaatttaaaaagggactaaaaaaccctagtggattgaaactccgctagggctaattactccactaaaaggaggttgcaaatttgaaacttattgaaatttagggttgattaaaatcgaaataaaattatttaaataattttaaggcataaagataatatccactaagctttcattttctaacatttcacattcttttggtactaccataagggcagctttattgttaagattgtttataatcgcactagagccttcttttttaccttcaagattagctaaaatgcgtccatttttaaattccacattacaagcgacaaattccaaataaggtgtttttttcttgtagcttccttgtaaaaaggctttgcaaatatagtctttaggctgaagtaaccaagagcttaaaatctctcttgcgtaaagattaaacattaccatagccgagtaaggaaaacctggtaaggcgatgatgaatttttcattagccttagctattttgatatgtctgcctggttttatgtcggctttatcgatgatgatttcatattctttgacggctttttttaaaaagtcaaaatctcccatagaaactccgcccgttgtaatcaaaatatcgcaactttgcaaagcactttcaagggtagaaaaagtggctttttcatcatcttttaaaagaggaaaaacccttgtatcgcaatttaaatttttagctaaattagctatggcgatatgatttgaagagcggatttgagcgggattttctaaggcttctcctagatctttgatctcgcttccactacttaaaacccctacaataggctttataaacacactaatgtgaaaaaatccaagttcagccaaaagagctatctcactataatttaaccttgtgccttttttgagtaaaatttcatcttttttatagttttctcctaccgcacgcacggcaaaagcttggggaacttttttttctataaaaagagtatcattttctacgcgtacattttcaacagggactaaagtatcacttccttcgctcatgagtgaacctgtaaaggtttttacacaagtattgttttctactttaaattcaggcatagtgcccgcaggtgtgaggcctaaaatttttaaaggcttgtcttgatcttcaaatttgatcgcataaccatccatagccgaagttggaaattcgggctgatttttaggtgcttttatgtcttgagctaaaatgcgtcctaaacactctgtaagggctattttttcaatcttttcataggttttgatatgagagtgtaaaatttttaaactttcttcataagacattaacattttttatccttttaaaagtcctgcaccgcaaagtttggttgatctttctttagcgtaaattctttgcttgtttatcacatcatatttccaaatgggcgcgcttgctttaaaatcttcaacaaattcattaagaagtttaagccctaattttctttgtttgcttaaaattcctgcaaaatacgagctttcatgaaccgcaacatcgcctatagagtgagcaaaaagcaagctaataccatcaaaatctactcttttttgccactcatcaaaccatttttttaaaagcggttcataaatatcaaaactaagtgcctcaatacctccttcttcacgcacaataccacaaaaagtcagtaaagcaccgcagtttttatccttggaaaattcataccattggctataaattttaggaatatctaaagagccttgataaagtgtaaaatgtttcatttagcctccacaaactggcggtaaaagtgctattttatcaccatcttttaacttggtgttttcatcaaaaatgatttcatcatttaaagatacagcacaaagttctagccattcttttaaactctcatctttttgcaaaatttcttttaattcttttaaattttttacttcaagttctaaattttctttatttatagggcctaaaaattccacttttaccattttattcctttacttctaaatttcccatcattcctaaatcttcatgttctaaaatatggcaatgatacattctaagtcctttaaaatcttgtttcattctaagtcttaactcttcattaggacgcacatttatagtatctcttaaggctctaaattcggctttttgaactttgccattgagttttgatgagatgagttcaaattgcgtgccatgtatatggaaaggatgatccatgtgagatttgtttatcactatccagtcttcaactactccaagtttggagcttaaatcaatgcgttttaaatcatagcttttgccattgattaaaaacatagacgcaagagcgatttttaattcgccttcactttttcccatcataccatgcatttgcatatgatcttcactcatgattatttctttaaattccttaggttcttctgaaggtttgaaaatttttaaattttttggaagttctatattttctttttttaggttaatattggctagaaatagggtattaggttcttcttttaccatcattttatccctatcataataagcactttctagcttaaaattcccatcttttggagcgtcgattaaaacttctacgcgagaagcaggacttaagaaaagttcttctttataaatagttttttctataagtccaccatcagtaccaacaagtataaacttagctccttgtatgcgtaaatttaaatatcttgccgcagtagcattataaatgcgtatgcgttcgtttgtggcgagtttgatttgaggtttaaattgtccattgatgagtacaaattctccttctctaccatttagccaatcatttaggttgttgttcggaatttgagcgttttcatcaagacgcaaatcgctaatcatcaaatctttttcttttaaatgacttaaagcatctttttttgctttgatcacaaaagcccctgctaaacccataaaaacttgtttagaagcggtataatgaggatgcggatgataccagtaagttcctgcgctatcttgaggaatttcaaaacgatatattctttcttctcctgctaagataggatcatgtgggcttccatcttgatcaggtggcacaggaacgccatgccaatgtatagttgtagcttctttgagtttgtttttgactaaaatttcaagtttatctccttcaaaaacttctatttttggagcaggcacgaggccattgtaagtataaaataaggtttttttacctttgataagttctatatgattttctttgatttctagggtagcacgaaaaatatttttttctttactttcatttttgagtaaaggcaaggcttttaaaatttctccttgggggaattgttttggatctaaaagctttaaattttttggagcaaagtttataaaagaagtatctaagtcatgatttatagaatgatttttatgcatggagtgcatatcgtgcataggatttgcataggctacacccatacttgctagagtaagtgcattaaattttaaaaaatttcttctattcattagtttttccttttgcttgattttttgtattatagtcattatttttttaactttagtaaatattttgaaaatttggtttaattttgttatgattttagcaatttaatcaaggaaaaataatgttttatgaaaaaattcaaaccccagcttatattttagaagaagataaattaagaaaaaattgtgagcttttagcaagtgttggcgaaaaaagtggtgctaaagtgcttttagctttaaaaggttttgctttttcaggagcgatgaaaattgttggagaatacttaaaaggttgtacttgtagcggactttgggaagcaaaatttgctaaagaatacatggataaagaaattcatacttattcacctgcttttaaagaagatgaaataggtgaaatagccagtttatctcatcatatagtgtttaactctttagcccaatttcataaatttcaagctaaaacacaaaaaaattccttaggtcttcgttgtaatgttgaattttctctagccccaaaagaactttacaatccttgtggaagatactcaagacttggaattcgtgctaaagattttgaaaatgtggatttaaatgctatagaaggacttcattttcacgcactttgtgaagaaagtgctgatgctttagaagcagttttaaaggcttttgaagagaaatttggcaaatggatagggcaaatgaaatgggtgaattttggaggaggacatcacatcactaaaaaaggctatgatgttgaaaagcttattgctttgtgtaaaaatttcagtgataaatatggcgtgcaagtttatcttgaaccaggcgaagcagtgggttggcaaacaggaaatttggtggctagtgtagtagatatcatagaaaatgaaaaacaaattgctattttagatacttcaagcgaagcacatatgccagatactatcatcatgccttatacaagtgaagttttaaatgctagaattttagccacaagagaaaatgaaaaaatttcagacttaaaagaaagcgaattttcctatttgcttactggaaatacttgtttagcgggtgatgtaatgggagaatacgcctttgataaaaagcttaaaatcggcgataaaattgtttttttagatcaaattcattacaccattgtgaaaaatacaacttttaatggcataagacttccaaatttaatgcttttaaattccaaaaatgagcttgaaatggtaagagaattttcttacaaggattacgctctaagaaattaaaattttttggaagaataattttattatttctttttagcataaaatattttttaaatgacaaaatgaaagttttgttttttaggtttaaatattttatgcaactttttttaaaaaacctcattaaaatactattttataggcttttaaagctaaattctattttttcagattaggcagatttttaagaaaatttcagtttattttaaaacaaatcatattaagataaatcagtcaaaaataaggattaagaaggaaaattaggtgtaatttgcataatattattttgcaaattatttaacggcaaatcttcaaaaatttgaatgagttaaaaatggatttagaaaaactaagattagctagaagtctttattatcagtgcttaggagaacttttcgttttttcattttctgaaaatagattgtgtaacttaaaagcttatttagaagctatgcaagagggtttatttgatgaaagtttaagaacaagctttgaaattttacttcgtaatttacaagatgtacaagatcttcaagcattttataaagaatacgatgagctttttttagcacttaaaaacactattcctatgactttttcttacatagaagaaggctttgaaaattcaaaggcattgcttaatgtaaggcagattttagctaaaagcacaatccgccgcaatgaaaaaatttttaaagaagctgaagatagtgtaggattttgttttgttttaatgagtgaatttctaaaaaataaggaagatgaacttgctaaggcattgtttgaaaaagtcatcaatcaaagcattgatgaatttttaatgcttattttttcaaattcaaaagcgaagctttataaagaaatagcaaatattgctgcgcagtttatagaatttgaaagatattgttttgaacttgaaaaacctactataaaaccttctaagaaagttcaaaatgatttatctcgttctgaatttttaagaagagaagcaaataaacaaaggagatctcgtgaaaaatcgcagggaatttcttaaaaaatctgctattgctttgggtactgcaagtcttttaggcggtgcaagtgtagcttttgggcaagatgaagaaagaaaggatcttgttagaggcaaaagcaaaaagaaggaagtgctttatcaaagaagtgctaattgggaaaaatattatatgagggctgaataatgtcaagtatgaatgaaactatcaagcttaatcgccgttcttttcttaaaatggccgcgctttcaagtttggcaagtccgttgctagctagaagcgaaactttaagagaagcaaatgcggatgaattaaaagaagcttatgaaggaagtcaaaagattaagagtgtatgtaccgcatgttctgtaggctgcggaattattgcagaagttcaaaacggagtgtggttgcgccaagaaatcgcacaagatcaccctgttagctcgggaggccattgctgtaagggctctgatatgatcgatatggtgcgttctcatgtgcgtttaaaataccctatgaaaaaagaaaatggagaatggaaacgcatttcttatgaacaagctttaagtgaaatcggagaaaaattagcagcttatcgtaaagaaaatccagaaagcgttatgtttttaggttctgcaaaactaaacaatgaacaagcttattatataagaaaattcgcagcattttttggaaccaataatgtagatcatcaagctagaatttgacacagcgcaacagtcgccggtgtggcgaatacatttggttatggcgctatgacaaaccatcttggagatattcaaagaagtaaatgtattattattattggagcaaatccagcagtaaatcaccctgtaggttttagacacttcttaaaagcaaaagaaaaaggtgctaagcttatcgttgtagatcctagatttacaaagagtgcagcaaaagcagatatttatgcaagaattcgtccaggtactgatattgctttcatgtatggaatgttaaaaatcatttttgatgaaggtttagaagatacaaaataccttgatgaaagagtttttggtatcgataaaattcgtgaagaagcagcaaaatggactgctgaagaagtagaaaatgtaacaggaatttctaaagaactcctcattcaaatcactcatgaagtagctaaaaataaaccaactacattgatttgggctatgggcttaacacagcacaccgtaggaacttcaaatacgcgtttagcacctatagtacaaatggttttaggaaatataggtaaattcggcggcggggtaaatattttacgcggacacgataatgtgcaaggtgcttcagatatggcgtgtttgagtgaaaatttaccaggctattatcctttaaatgaagcgacttggagatattatgctaagatttggggcgttgattatgagtggcttttaggaaattttgtaagcaaagattggatgcataaaactggactttcacttgctagatggtgggctgcagccttaaatggcaaagatggaaatgataaagtggataatgcaggaacgtctttgaaagctttggtggtaatgggaaatggtatcacttcgactgcacagcaagctaaagttaaagaaggtttggaagctttagaacttttggttttagctgatccttttgtcaatgaagcaggaattattgcagaaagaaaagatggaatttatcttttacctgctgcaacgcagtttgaaacaagtggaagcgtaacagctacaaatcgtagcggacaatggagatttaaggttatagatccactttatgaaagcaaagaagatcaagaaattttatttgagcttgccaaaaaattaggtttttatgaagactttactaaaaccttacgcgatgaaaatggcaagattgtttggcctgaaaatgctactagagaaattgcaagtgcagttagaagcataggacttaatggttggagccctgaaagacttaaaaaacatactttaaattgggataaatttgatgaggtaactttagaaggcaaagacgaattagcgggtgaatactatgggcttccttggccttgctggagtgataaacatccaggatctcctgtactttataataccgatatcgaagtagcaaaaggtggtatgggatttagaaataattttggccttgagtatgagggtga

SEQ ID NO: 3784 - DNA, 22955 bp, synthetic construct
  misc_feature 1..22955: note = Synthetic
  source 1..22955: mol_type = other DNA
cggctgatggtgcttttcgtcgtggcaaaccttatatgttaaaacctgcagtagataaggctttaagtgaagggtgtgaaagtgtagaaaaagtacttatagttatacgcaataatgagcctatagaatatattaaaggaagggactatgtttataacgaacttgtgaaaaatgaatcttataagtgtgaacccgaaatcatggatagcgaggatttgttgtttttgctttacacttcaggatcaacgggcaagccaaaaggagttatgcatgcaagtgcaggatatatactttgggcacaaatgactatggaatgggtttttgatattaaagattatgataattattggtgtagtgctgatgtgggttggattacaggacatacttatgtagtttatgggcctttagcatgtggagcaacgactataatgcatgaaggaactcctacttatccaaattctgggcgttggtggagaatgatagaagagtatcaaataagcaaattctacacttcgccaactgctataagaatgcttcatgctgatgcacctgatgagccaagaaaatatgatttaagtacgcttgaagtgcttggaacggttggagagcctatcaatcctagtgcttggaagtggttttatgatgaaatagggggaactaaaagtcctatagtcgatacttggtggcaaacagaaacaggtgggcatatgatcacgcctttaccaggtgctactcctttaaaaccaggttgtgccaccttgcctttgccagggatttttgcagaagttattgatgaagaaggcaataaaaaagatgagggtgaagatgggttgctttgtataatcaaaccttggccttcgatgattcgtggaatttggggtaatgatgaacgctatatagaaagttatttttctcaagctaaaaaagatggaaaagctgtatattttagtggcgatggtgctttttatgataaaaatggttatataactatcacaggaagaacagatgatgtggttaatgttgcaggacatcgtataggaacggctgaaattgaaagcgctattgctaaacatccaagtgtagcagaatcagctgtagtgagtattttggatgtgattaagggcgagtcattgtttgcttttgtggttttaagtcctgcatccagttgtgatcttggcggagctatagaaactttaaaagaacttaatgacattttaagagtagaaataggacctatagctaaaatagaaaaaattctttatactccaggtttgccaaaaactagaagcggtaaaataatgagaagaattttaagaactatagcaagaggcgaagaaatcaaacaggatatttcaacacttgaagattctaaagtagtagaaaccattgttaaattagctaaggcagagtttgaataacaaggcaaaaagaactttgcctagttgcatgaaaattcataaaaataagctataatgataaaaaaataaaaggaaatttttatgcttcaaacttgtattttccctgcggcaggttatgggacgagatttttacctgcaacaaaaactttacctaaagagatgttacctatcttaaccaaacctttgatccattatggtgttgatgaagctttggaagcaggaatggaaaatatgggctttgtcacagggcgtggaaaaagagctttggaggattattttgatatttcttatgaacttgagcatcaaatttcaggtacaaaaaaagaatacttacttgatgaaattcgctctttgatcaatcgttgcacctttacttttacaagacaaaatcaaatgaaaggtttaggtgatgcggttttaaaaggtagacctttggttggcgatgaagcttttggcgtaattttagctgatgatttgtgtgtcaatgaagaaggcttaaatgttatggctcaaatggtaaaaatttatgaaaaatatcgctgcaccatcatagctgtgatggaagtaccaaaagagcaagtttcaaactatggagtaatttctggaaattttgtagaagaaaatcttatcatggttaattctatgatagaaaaaccaagtcctgatgaagctccaagtaatcttgctatcataggaagatatattttaactcctgatatttttggaattttagaaaatactaaagcgggaaaaaatggtgaagtccaacttaccgacgcgcttttaactcaagcaaccaatggtatggttttagcttataaatttcaaggaaaacgctttgattgtggaagtgtagaaggctttgtagaagcgacaaattatttttacgagaaaagtaaatgttaaacaatacacttttttttaagcaaagtgaaattcacactataagttcttatgcaaatcgtattaatgatgaggtaaaaagtggagatatagggtattatcatcttattgatacaagtttgaatttaatcgatgagagtttggcttttatcaaagacaaagaacacataaaaaatatcgttttagtgggaatgggtggttcaagttgtggtgtaaaagccttgcgtgatatgctttttaatgaaaaaagcaaccaaagagaactttttatactcgataacacaagttcacattcttttaataagactttagaaaaaatcaagcttgaggaaagtttgtttttaatcatcagcaaaacaggtagtactatagaagttgtatcgctttttaaacttcttattgaacattttaaacttgatatgcaagaattaaaaaaatactttgtttttattaccgataaggattcaaaacttcatcaagaaggtgaaaatttaggtattaaatgcttttttatccctgcaaatgtaggaggtcgttttagcatactttcagccgtaggtatagttccgctttgtttttgtggctataatgccaaagctcttttagaaggagctaaagcttgttttgaagatttttttactcataaaaaagatgaaattttacaaaaagcctatcattattgcacacacaaaaatgccaatatcaatgtacttttttcatatagtgatgcttttaaaggctttaatgaatggtatatccagcttattgctgaaagtttaggtaaaaagcaaggctataaacgtataggtttaactcctattgcactcattggagcaagagatcagcatagttttttacaactcattatggatggacctaaaaataaaactgtaacttttttaaaaatcaaagacgctcaaaaagcacctattatccctgatattcattttaaatttttagattctttaagtaataaagtcaatcttcacgaacttttaaacgctcaatgtaatgcaactatgcacgctttaatcgctgaaaatttgagcgttgatgtgatagaacttgaaaaacttgatgcttggcatgcgggatatttgatgtattattatgaactttttacttcaacttgcggtgttatgctagggattaacacctatgatcaacctggtgtggaagttggaaagttgatcttaaaaaatatattaaattcttaatcaaaattcattaaaaaagagtataataattttaagttaaaattataataaaaatttttaattaataataattattatttaagaattttatgttataattttaaaaattaaaaaaaggagtcaatcatgtcagttacaaaacaattattacaaatgcaagcagatgctcatcatctatgggttaaatttcataattatcactggaatgtaaaaggtttgcaatttttttctatacacgagtacacagaaaaagcttatgaagaaatggcagaactttttgatagttgtgctgaaagagttttacaacttggcgaaaaagctatcacttgccaaaaagttttaatggaaaatgcaaaaagtccaaaagttgcaaaagattgctttactccgcttgaagtcatagaactgatcaaacaagattatgaatatcttttagcagaatttaaaaaactcaatgaagcagcagaaaaagaaagtgatactacaacagctgcttttgcacaagaaaatatcgcaaaatatgaaaaaagtctttggatgataggcgctactttacaaggtgcttgcaaaatgtaatttaaggggctttatgccccaattatacaaactaggttataatatccttttttaaaggataaaattgaaagtacttaattttttttatgaaaaccaccctaaatttgaagtaagttatgaaagaaaaaatcaaatttcaaaaccaaatattatcataaaaggcccacgattttgtggtaaaaaaacacttatttttaattttttatctcaatttaaagcaagtgaaattttgtttttagatttatatgatacacgctttgaaaaacaaagtttagaaagacttgctgattttctgaatgaaaatttacaaattaaaattctttgcctttataatttggattttatccctaatttagaaaaaattaacattcccatcatcttaagtacaaatataaaagatttaaatgtaaatgggtttgaagagcttgaacttgattattttgattttgaagaatttattagtgtaagtaagaaaaatttacctataaataatttagtaggtctttttttgcaaagtggacgcagtaaatttggagaaaaaaacatacttctaagacaaagctttactcttttagaattagaaattttaaagtatttagctttaaatttgggtcagcaaatcagtatttctaagatatttatagaactcaaaaaaagattaaaaacttcaaaagatagtgtttatcaagctatcaaaaaattagaaaatacttatgtgatttataccttaaaacatgatgaaaaaaaacttcaaaagatttattttaaagattttggcctaagaaataatctttgtatttcaaaggatttttcacatttatttgaaaatttagttttaagcgagttgtttaaatttaaagaagaatttttttataacaaatactttaacttttatagccaaatatctaaaattgcttatatttcaagtccaactttagatattgatttgattaaattacgtgctaagaaaattttaccaaaggctttagaacttggaatttttcatgtgatttttatcactctttcaagcgaggatagtttttttgagcaaggggttaaatttgaagtcatatcttttgataaattttcacttggattttaggtgttgtttgagtttgtatcgtatttttcaaggttgtatcgtttgatgatttttgtaataagattgatataatatcccttgcgttcagaataagaatctaaagttttaatagcctctagtcctgttatctctttgccttcgcttgcaaatttagctcttgcatcgcgaaacttttcataagcaaaatgacgatttaaatttaaaacataagagtaaacactatcttgcagactatcaaaaatcttaattttatgttttttatctggatgtcttaaatcaggaattaaacctttctcaccccaagtccattctccaaaaagattgtttgcttctcttgcgaagcgactggtacctgtagcactttcaactaaagcttgggctatacccatggattttggaattttttgaatacgttttttatattctgcaaaatcataaagattttcaatacgatatttgttttttatcatgataagtttttcaagatttatttggtttgaagtcctaaagcctgttttgtaagcatctttaaaaaaggcttcgataaaagctctttcttgttcaatttttttaaagctttgatcaaacatttcattcatttttataaaaaaaatttgtcttttttgatctatatcaagtttgtaatattcttctccaaatccactctttagatcatcagcaaaaagtgggattagaaaaagactaagaaaaattataattggcttcaaaacaatactttacctttccttcaaaaaacaattcttcatttttatatgcaaaccctacctcttcaccacttttaggagttattttaactttattttgtacttttttatttaaaaatgccagataaaaacaagcccccattcctgtgccgcaagctaaggtttcatcttcaactccgcgttcataggtgcgaacttttaaatgattttcatctaaaatttttacaaaattaacattggcattatatttttgtctcattttttgacaaagcattgtatcaaattcatctaaattttgacaaaaatgtactagatgtggaactccagtgttgcaaagttgccaagtttttcctaattcttcaaaagtattttgcacgctttttattttgcctaaagatacttcaactttatcttgatttacctttgcttttattactcctgcaccggttaaaaaactcatgttaggatttattttgttaatatgatgtgcaaaatgtgccgcagcccttgagccatttccacacatagcagcccttgagccatcgttattataaaattcccattcaaagtcgtatttttcatgaggcaatatcacgataaagccatccgcacctataccctcataacgattacaaagttctttagctaaagcacttctatcttcttttctatcagcatttgttatgacaaaatcattcccacttgcacaatatttataaaatttcacatttttcctttagaaatttcttgtattactttaacacattcttgcctaaaatcggcataagaattagtatttttaatgataaaatctgcttttttaagtttttcttcaatatctatttgagaatcaagtcttgcttttgcagcttctaagctgagcttatctctttgcatgattcttttaaggcttaattctttaggtgtgtaaattacaatgactttgcctaaattttcataagcaccgctttcaaaaaaaagaggaatttctacaaaaaaagctttattttccttatctagaatttgcatttgttctaaaattttagctcgaattttaggatgagtgaaattttctaaggtttttttagcttctttgttgttaaaaacaatttttccaaggatttttctatcgattttcttttcttttgtgagtaaattttttaagctaaagggagaaaaaatcttttcaagttctaaagcattttcatctaaaatttcatgagcgattttatctgcactaatgcttttaaagcctaaagaattcgctatttctataaaggtgcttttaccacaagcaattgaagcggttacaaaaaaagcatttttcatcttatgccttattaaaacttttttcgttaaaataactttttagttcttaaaggaaaataaatgaaaatttcatatgaagatgcaggcgtaagtatagataatggaaatgcctttgtagaggctataaaacctttggttaaagaaacttttaatgataatgttgtaggtggaattggttcttttgctggtgcttttagaatgccaagtggttttaaaaagcctgtgattttaggtgcaacagatggggttggtaccaagcttcgcttggcaattgatgctaaaaaatatgatactatagggcaagatttagtagcaatgtgtgtgaatgatttgatttgtaattttgctacgcctttgtttttcctagattattatgctacagccaagctcgaagtagaagtagcaaaggctgttgtatcaggcattgccaagggatgtaagatggcaaattgtgcattaattggcggagaaactgctgaaatgcctggaatgtatgcaaaagatgattttgatcttgcgggttttgcagtgggtatggctgaagaagatgagattgatagaagtaaatttgttaaaaatggtgatattttattggcacttcctagttcaggacttcattcaaatggttattctttagctagaaaagtactttttgaaagtttaaaattaaaatttgatgacaagatagagggtaaaaatttaattgatattttattagaacctacaaggatttatgtgcgtgattttcttacactaaagccttatatcagtgctctagctcatattacagggggtggtttagtagaaaatttaccacgcgttttacctcgtggtatgggtgcaactatacgcaaacatcatcttaaaactcctgaaattttttatactataggacaggttgtagaagaaagcgaaatgtatagaagctttaacatgggagtaggtttagtagtggttgtagatccttctaatgtaagtaaggttttagaaaattcagatgcctttattattggcgaaatttgcattaatgaaggtattgttttagaatgaaaataaagcgtcaatacgctttatttttgtattttaagttctatttttgtagtgttttgttcttttggcaaaggatggtttgtgctagataaaaggctacaagtacatttacaagcatagcgataagtaaaagaggagtggttcgttttataatatccattggagctacttttgcaaatccagctaaagctatgattccgcctgctattggtgaagctgcacgacctaaacaagatgcaatttctataggtaaaactagagtaataggtgcaacgcctaattttgtagctatatcaggagctagttttccaaaagcattaaaagcggcaattccacttcccataatcactgtggcaaaataaactaaaaagcttaaaatagctatactcaaaagaattccaaaccatgcaaaatttcctgttccaagacttgaaaccgcgttggcaaggatattaactccaccaagtgctttaatgccttcagcaaatactccagcggcgatgattatgcttacgactgagataaaaatttcagccatagcttttaaaatcaccatcatatcttcgcctaattttctagcatttctatgtcttgcaaattcaacaagaaaaactaaagaaatgcttacaaaatttgctgttacaacatcgagcttgatagtaaaaaaatacgctgtaaataaaaatacaacaggtaaccaaggaaagagtatgtaaaaagtagggcatttaggatcaatgatttgcggaatttcaacttcatcatttaaaacacctttttctttatctcttttatcaatccaagcaaaataaaaaggaatcaagatggcaataactacaacataggcaatcacactataaatttggtaatttaaaaaaagccctacgacattatcactttgtcctaccatatctgccatattgattgaatttccatcttttggaccataatcaagcgcaattaaagaaagcacacatacagctgtaataggacggattttaagtgagattaaaacaggataaatacatgctaacaaaagcaaaagcaatccagcatagctagaaatgacgatttttaaagccattccaacaacaaaagttccacttaaaatcaagtatttatttttgatttttcctaagggtttatttgctaaaaaagcaagttttgctgaagcattgatatgtttcatataagcagcaaaacctgccacactcatgataataagtcctactccagaaagctgacttttaaaagtcgctgtgataaaagcataactatcaagtaaaacattcaaaaagcttgcatgttctctgctcggggcttttggtataggtgttcctgtgatgtaaaaagcaaaaataagcaagataatacctgaaagaaaaaatacaaaaataggattgtattttttaagtatataataagtaacgacaattaccgctaaaagtgtagaacatatcataaaaattggcatgatttctcctaaagttattattagcttttattttattttagctaaaatttaactaataaatatttttcatttaaaattttacttattttttgcattataaaattaataatatgtatagtttggttactgaaaagtttatgtttgtataaaaaatgatttttatattataattataaacaaattataaatatcaaaaaggatctagtgtggcaagaattttggcatttgatataggtataagctctattggctgggcgtttagcgaaaatgatgagttaaaagattgcggagttaggatttttacaaaggctgaaaatcctaaaacaggagaatccctagccttaccaagacgccttgcaagaagtgccagaaaacgccttgctagacgcaaagcaaggctaaatcacttaaaacatttaatcgcaaatgaatttaagttaaattacgaagattatcaaagctttgatgaaagtttagctaaggcttataaaggctctttaattagcccttatgagttaagatttagagctttaaacgagcttttaagtaagcaagattttgcaagagtgattttacatattgcaaaaaggcgtggctatgatgatattaaaaataatggtgatgaagaaaaaggcaagattttaaaagctatcaagcaaaatgaagaaaaactagtaaattatcaaagtgtgggagagtatctttataaagagtattttcaaaaattcaaagaaaattccaaagaatttataaatgttagaaataaaaaagaaagttatgaacgctgcataacgcaaagttttttaaaatatgaattaaagcttatttttcaaaaacaaagagaatttggcttttctttttcaaagaaatttgaagaggaagtgcttagtgtagcattttataaaagggctttaaaagatttttctcatttagtgggaaattgtagtttttttactgatgaaaaaagagcgccaaaaaattcgcctttagcttttatgtttgtagcactcacaagaattatcaatattttaaacaatcttaaaaatactgaaggaattttatatacaaaagatgatttaaacgcccttttaaatgaagttttaaaaaacggcactctaacttataaacaaacaaaaaagcttttgggcttaagcgatgattatgaatttaaaggagaaaaaggaacttattttattgagtttaaaaaatacaaagaatttataaaagccctaggtgagcataatttaagccaagatgatttaaatgaaatagcaaaagatatcactcttataaaagatgagattaaacttaaaaaggctttagcaaaatacgatttaaatcaaaatcaaattgatagcttaagcaaattggaatttaaagaccatttaaatataagttttaaagccttaaaacttatcactcctttaatgcttgaaggtaaaaaatacgatgaagcttgcaatgagcttaatttaaaagtagcaatcaatgaagataaaaaagattttttacccgcatttaatgaaacttattataaagatgaggtaactaatcctgtggttttaagggcgattaaagaatatagaaaggtcttaaatgctttacttaaaaaatacggcaaagtgcataaaataaacattgaattagcaagagaagtaggtaaaaattacagccaaagagctaaaatagaaaaagagcaaaatgaaaactacaaggccaaaaaagacgccgaacttgaatgtgaaaaactaggcttaaaaataaatagcaaaaatattttaaaattaagattatttaaagaacaaaaagaattttgtgcttatagtggagaaaagattaaaattagtgatttgcaagatgaaaaaatgcttgaaattgaccatatttacccttattctagaagttttgatgattcttatatgaataaggttttagtttttaccaagcaaaatcaagaaaagcttaataaaaccccatttgaagcctttggcaatgatagtacaaaatggcagaaaattgaagttttggcaaaaaatttacctgaaaaaaagcaaaaaagaattttagataaaaactataaagacaaagagcaaaaagactttaaagatagaaatctaaacgatactcgctacatcgcaaggcttgttttaaactatactaaagattatttagattttttacctttaagcgatgatgaaaatacaaagttaaacgacacacaaaaaggctcaaaagtgcatgtagaagcaaaaagcggtatgctaacatcggctttaaggcacacttggggctttagcactaaggatagaaataatcatcttcatcacgctattgatgcagtaattattgcttatgcaaacaactctatcgtaaaggctttttctgattttaaaaaagagcaagaaagcaacagtgcagaactttatgcaaaaaaaattagtgaattagattataaaaacaaaaggaagttttttgagccttttagtggttttaggcaaaaggttttagataaaattgatgaaatttttgtctcaaaacctgagagaaaaaagccaagcggagccttacacgaagaaacatttagaaaagaagaagaattctatcaatcatacggcggaaaagaaggagttttaaaagccctagagcttggtaaaatccgcaaagtaaatggtaaaattgttaaaaatggcgatatgtttagagtggatatttttaaacacaaaaagacaaataaattttatgctgtgccaatttatactatggattttgctttaaaagtattaccaaataaagctgtagcacgaagtaaaaaaggtgagataaaagactggattttaatggatgaaaattatgagttttgcttttctttatacaaagatagtttgattttaattcaaactaaagatatgcaagagccagaacttgtttattttaatgcttttacaagctctactgttagtttgattgtttcaaaacacgataataaatttgaaacgctaagcaaaaatcaaaaaatattgtttaaaaatgcaaatgaaaaagaagtaatcgcaaaaagcataggaattcaaaatctaaaagtatttgaaaaatacatagtttcagcacttggggaagttacaaaggctgagtttagacaaagagaagattttaaaaaatgagttacgatgaagcttttaaaacactgcttattagctctaatgccaagctaaatttagagctaaatcatcttgtgattaagcaagatgaaaatatagccaaattgtttttaaaagatataaatatcatcgttttagaaagcttacaaataagcattagttccgcactttttaatgcctttgcaaagtataaaattatcttgctaacctgcgatgaaactcatagtataaatggtgtttttactccttttttagggcattttcaaagtgcaaaaatcgcaaaagagcaaatgaatgtaagtgctcaaaaaaaggctattttatggcaaaaaatcattaaaaataaaatcctaaatcaagcctttatcttaaaaaaacacaataaaatagagcaaagcaatgagcttataaatttggctaaaaaagtaagcttaaatgatagtaaaaatattgaagctgttgcggcggcgctttattttaaaactttgtttggtacttctttttcaagagatgagctttgctttgaaaattctgctttaaattatggctatgcaatcattagggcttgtattattagagcagtttgcataagtgggcttttgccttggcttggcataaagcacgataatatttataattcttttgcgctttgcgatgatttgatagaagtgtttagggctagtgttgatgattgtgttttaaagcttaagggtgaaagtgagtttttaagcaaagatgacaaaagagcgttgattggcaatttacaaagcaaaatcaattttgatgggcaaaattatcctttaaacagagcgataaatcattatgtggcgaattttaaaaatgctttattgtatgaagatgaactaaagatagtgaaatttgatgattgaagataaatttatgcgcgtgcttttgatgtttgatgtacctactaaaagtaaaaaagagcaaaaactagcaagtaaatttagaaacaatcttataaaattaggttattttatgctgcaatttagtgtttatatgcgtatttgcaagggtttaagttctgcaaaaagttctattgaaaatgtaaaaaagattttgccaccttatggaaatgtaagggctttaatcatcactgaaaagcaatttgataaaatggagcttttgcttggtggcatagtttttaatgaaaaagttaataacgaaaccaatttaacactttttgatatagatagtcatggagaatttaaatacaaaaattcaaataatgaagaaatacaactaaacaaaaaacaagaaaaatatcatcagcaaaatttatttgaattttaaaagcggttttaggggattgtaaccccgcagagtcccgcaaactctttattttagtccctttttaaatttcttatgagattatagcataatttttgctatttttcatcaaaaaaccccgaaattttcattatctggtaaatatctattttaccataaagaaatttaaaaagggactaaaacacgtgtgggagggagagcctttagagtataattttaccataaagaaatttaaaaagggactaaaacagtgctacagcctttactacacttcaatcaattttaccataaagaaatttaaaaagggactaaaataaaccctagtggattgaaactccgctagggctaattactccactaaaaggaggttgcgaatttgaaacttattgaaatttagggttgattaaaatcgaaataaaattatttaaataattttaaggcataaagataatatctactaaactttcattttctaaaatttcacattcttttggcaccaccataagggcagctttattgttaagattgtttataatcgcactagagccttcttttttgccttcaagattggctaaaatgcgtccatttttaaactctatattgcaagcgacaaattccaaataaggtgtttttttcttgtaacttccttgtaaaaaggctttgcaaatatagtctttaggttgaagtaaccaagagtttaaaatctctcttgtgtaaagattaaacattaccatagccgagtaaggaaaacctggtaaggcgatgatgaatttttcattagccttagctattttgatatgtctgcctggttttatgtcggctttatcgatgatgatttcgtattctttgatggctttttttaaaaagtcaaaatctcccatagaaaccccgcccgttgtaaccaaaatatcacaactttgcaaagcactttcaagggtggaaaaagtggctttctcatcatcttttaaaagaggaaaaacccttgtatcgcaatttaaatttttagctaaattagctatggcgatatgatttgaagagcggatttgagcaggattttccaaggcttctcctagatctttgatctcacttccactacttaaaacccctacaataggctttataaacacactaatgtgaaaaaatccaagttcagctaaaagagctatctcgctataatttaaccttgtgccttttttgagtaaaatttcatcttttttatagttttctcctaccgcacgcacggcaaaagcttggggaacttttttttctataaaaagagtattattttctatgcgtatattttcaacagggactaaagtatcgcttccttcgctcatgagtgagcctgtaaaggtttttacacaagtgccattttgcacgctaaattgtggcatagtacccgcaggtgtgaggcctaaaatttttaaaggcttgtcttgatcttcaaatttgatcgcataaccatccatagccgaggttggaaattcaggctgatttttaggggcttttatatcttgagctaaaatgcgtcctaaacactctgtaagagctattttttcaatcttttcataagttttgatatgagaatgtaaaatttttaaactttcttcataagacattagcattttttatccttttaaaagtcctgcaccgcaaagcttggttgatctttctttggcataaattctttctttgtttatcacatcatacttccaaatgggcgcacttgctttaaaatcttcaacaaattcattaagaagtttaagtcctaattttctttgtttgcttaaaattcctgcaaaatacgagctttcatgtatcgctacatcgcctatagagtgagcaaaaagcaagctaataccatcaaaatctactcttttttgccactcatcaaaccatttttttaaaagcgattcataaatatcaaaactaagtgcctcaatacctccttcttcacgcacaataccacaaaaagtcagtaaagcaccgcagtttttatccttggaaaattcataccattggctataaattttaggaatatctaaagagccttgataaagtgtaaaatgtttcatttagcctccacaaactggcggtaaaagtgctattttatcaccagtttttaacttagtgttttcatcaaaaatgatttcatcatttaaagatacagcacaaagttctagccattcttttaaactctcatctttttgcaaaatttcttttaattcttttaaattttttacctcaagctctaaattatctttatttatggggcctaaaaattccacttttaccattttattcctttacttctaaatttcccatcattcctaaatcttcatgttctaaaatatggcaatgatacattctaagccctttaaaatcttgtttcattctaagtcttaactcttcattaggacgcacatttatagtatctcttaaggctctaaattcggctttttgaactttgccattgagttttgatgagatgagttcaaattgcgtgccgtgtatgtggaaaggatgatccatgtgagatttgtttatcactatccagtcttcaactactccaagtttggagcttaaatcaatgcgttttaaatcatagcttttgccattgattaaaaacatagacgcaagagcgatttttaattcgctttcactttttcccatcataccatgcatttgcatatgatcttcactcatgattatttctttaaattccttaggttcttctgaaggtttgaaaatttttaatttttttggaagttctacattttctttttttaggttaatattggctagaaatagggtattaggttcttcttttaccatcattttatccctatcataataagcactttctagcttaaaattcccatcttttggagcatcgattaaaacttctacacgagaagcaggacttaagaaaagttcttctttataaatagctttttctataagtccaccatcagtaccaacaagtataaacttagctccttgtatgcgtaaatttaaatatcttgctgcagtagcattataaatgcgtatgcgttcgtttgtggcgagtttgattttaggtttaaattgtccattgatgagtacaaattctccttctctaccatttagccaatcatttaggttattgtttggaatttgagcgttttcatcaagacgcaaatcgctaatcatcaaatctttttcttttaaatgacttaaagcatctttttttgctttgatcacaaaagcccctgctaaacccataaaaacttgtttagaagccgtataatgaggatgtggatgataccagtaagttcctgcgctatcttgaggaatttcaaaacgatatattctttcttctcctgctaagataggatcatgtgggcttccatcttgatcaggtggcacaggaacgccatgccaatgtatagttgtagcttctttgagtttgtttttgactaaaatttcaagtttatctccttcaaaaacttgtatttttggagcaggcacgaggccattgtaagtataaaataaggtttttttacctttgataagctctatatgattttctttgatttctagggtagcacgaaaaatatttttttctttactttcatttttgagtaaaggcaaggcttttaaaatttctccttgggggaattgttttggatctaaaagctttaaattttttggagcaaagtttataaaagaagtatctaagtcatgatttatagaatgatttttatgcatggagtgcatatcgtgcataggatttgcataggctacacccatacttgctagagtaagtgcattaaattttaaaaaatttcttctattcattagtttttccttttgcttgattttttgtattatagtcattatttttttaactttagtaaatatttattttgaaaatttggtttaattttgttatgattttagcaatttaatcaaggaaaaataatgttttatgaaaaaattcaaactccagcttatattttagaagaagataaattaagaaaaaattgtgagcttttagcaagtgttggcgaaaaaagtggtgctaaagtgcttttagctttaaaaggttttgctttttcaggagcgatgaaaattgttggagaatacttaaaaggttgtacttgtagcggactttgggaagcaaaatttgctaaagaatacatggataaagaaattcatacttattcgcctgcttttaaagaagatgaaataggtgaaatagccagcttatctcatcatatagtgtttaactctttagctcaatttcataaatttcaagctaaaacacaaaaaaattccttaggtcttcgttgtaatgttgaattttctctagccccaaaagaactttacaatccttgtggaagatactcaagacttggaattcgtgctaaagattttgaaaatgtggatttaagtaccatagaaggacttcattttcacgcactttgcgaagaaagtgctgatgctttagaagctgttttaaaggtttttgaagagaaatttggcaaatggatagggcaaatgaaatgggtgaattttggaggagggcatcacatcactaaaaaaggctatgatgttgaaaaacttattgctttgtgtaaaaatttcagtgataaatatagcgtgcaagtttatcttgaaccaggtgaagcggtaggttggcaaacaggaaatttagtggctagtgtagtagatatcatagaaaatgaaaaacaaattgctattttagacacttcaagcgaagcgcatatgccagatactatcatcatgccttatacaagtgaagttttaaatgctagaattttagccacaagagaaaatgaaaaaatttcagacttaaaagaaaacgaatttgcctatttacttactggaaatacttgtttagcaggtgatgtaatgggagaatatgcctttgataaaaagcttaaaatcggcgataaaattgtttttttagatcaaattcattacaccattgtgaaaaacacaacttttaatggtataagacttccaaatctcatgcttttaaatgcaaaaaatgaacttcaaatgataagagaattttcttataaggattattctttaagaaattagtattatttataatttgcataaaatgttaattttactcggaagagaatcaaagatgtaaattttatgcaaagtattttatttttttcaaatataaaatcaactcaaatatctaattttcaatactttggtatgattttttaatattttaaatccttgtggaattttattgaaattcagtgatttttaaatcaaatagtattaagataaatcgatttaaaaatcggctttaaaatgaatattaggtatattttgcataatattcattcaagcaaaatttaaagctatttttgaaaattttgaatgcatgggagctttaatggatttggaaaaattaagattagctagaagtctttattatcaatgtctaggagagctttttgttttttcattttctgaagaaagattgtcaaaattacaagagtatttaaagacaatgcaagaatgtttatttgatgaaaatttaaaatcaaattttgatatcttgcttaagcatttagatgatgaaaattttatacaagcattttttaaagaatatgatttgctttttttaagtcttaaaaatagcattccaacgactttttcttacatagaagaaggttttgaaaattcaaatcctttactttgcgtgcgtcaaattttagtcaaaagtaaaataagacgcaatgaaaaattttttaaagaaagtgaagatagtgttggattttgtttattgttgatgagtgaatttttaaggcaaaatgaagatgatttagccaaagagctttttgaaaaagtgatcaataaaagcattgatgagtttttaggcgatgttttcatgaataaaaatgcgaatttatataaggaaattgcaagtattgcatcggcttttatggaatttgaaagactttgctttgaagtggaaaaacctgcaaaaataaattctaaaaaagtgcaaaacgatctatcgcgttcagaatttttaagaagagaagcaaataaacaaaggaggactcgtgaaaaatcgcagggaatttcttaaaaaatccgcttttgccttaggggctgctggagtgcttggtagcacaactttagctctagctaaagatgaagaaagaaaagatttggttaaaggtaaaagtaagaaaaaagaagtgctttttcaaagaagtgctaattgggaaaattattatataaaggctgagtaatgtcaagtgtaggtgaaaatatcaagcttacgcgtcgttcttttcttaaaatggcagcactttcaagcctagcaacaccgttgcttgctagaagtgaaactttaagagaagcgagtgctgatgagcttaaagaagcttatgaaggtagtaaaaaagtaaaaacagtttgtacagcctgttctgtaggctgtgggattattgcagaagtgcaaaatggtgtttgggtgcgtcaagaaatcgctcaagatcatcctgtgagttcaggtggacattgctgcaagggatctgatatgatcgatatggtgcgttcacatgtgcgtttaaaatatcctatgaaaaaagaaaatggagaatggaaacgcataagttatgagcaagctttaagtgagatcggagaaaaactagctgcttatcgtaaagaaaatcctgaaagtgttatgtttttaggttctgcaaaacttaataatgaacaagcttattatataagaaaatttgcagcattttttggaacgaacaatgtagatcatcaagctagaatttgacacagcgcaacagtcgccggtgtggcgaatacatttggttatggcgctatgacaaaccatcttggagacatccaaagaagtaaatgtatcattatcattggagcaaatccagcggtaaatcaccctgtgggttttagacatttcttaaaagcaaaagaaaaaggtgcaaagcttatcgttgtagatcctagatttacaaaaagtgcggcaaaagcggatatttatgcaagaattcgtccaggaaccgacattgctttcatgtatggaatgctaaaaatcatctttgatgaaggcttagaagatacaaaatatcttgatgaaagagtttttggaatcgataaaattcgcgaagaagcagcaaaatggacagccgaagaagtagaaaatgttacagggatctctaaagaacttttggtgcaaatcactcacgaagtagctaaaaacaaaccaactacgcttatttgggctatgggtttaactcaacacactgtaggaacttcaaatacacgtttagcacctattgtgcaaatggtacttggaaatataggtaaatttggtggtggagttaatatcttacgcggacacgataatgttcaaggtgcttcagatatggcttgtttgagcgaaaatttaccaggttattatcctttaaatgaagcgacttggagatactatgccaaaatttggggtgtggattatgagtggcttttaggaaattttgtaagcaaagattggatgcataaaactgggctttcacttgctagatggtgggcagcggctttaaatggaaaagatggaaatgatgctatcgataatgcaggaacgcctttaaaagctttagtagttatgggaaatggtattacttcgactgcacaacaagtaaaagttaaagaaggtttggaagctttagagcttttagttttagccgatccttttgtaaatgaagcagggattattgcagaaagaaaagatggaatttatcttttacctgcagcaacacagtttgaaacaagcggaagtgtaacagcaacaaatcgtagcggacaatggagatttaaagttgtagatccactttatgaaagcatggaagatcaagaaattttatttgagcttgctaaaaaattaggtttttatgaagactttaccaagactttacgcgatgaaaaaggtgagattgtttggcctgaaaatgcaacaagagaaattgcaaaagcagttagaagtatagggcttaatggttggagtcctgaaaggcttaaaaagcatactttatactgggataaatttgatgaggtaactttagaaggaaaagacgaagttgctggcgagtattacgggcttccttggccttgttggagtgataagcacccaggttctcctgtgctttataataccgacattgaagtagcaaaaggtggtatgggctttagaaacaattttggacttgaatatgaaggagagagtttacttgctaaaaatgcacctttaaattcacctattgatacaggttatccacaaattactaaagataatatagaaaaagttttaggtattactttaagtgctcaagaaaaagaaaaaatgggatcaacttggtcttatgatgatagcaatatcatagcaactaaatgtatagaaaaaggcatagttccttatggaaatgctaaagctagagctgtagtttggacttttaaagataaaattccactccaccgtgagcctttacattctccaagaaacgatttggtgcaaaaatatccaagttttgaagatcaaaaagcgctttaccgcgtggatactaaatttgtttctgtgcaacaagctaaggattattctaaagaattcccgcttaat

SEQ ID NO: 3785 - DNA, 22954 bp, synthetic construct
  misc_feature 1..22954: note = Synthetic
  source 1..22954: mol_type = other DNA
tctcctgaagccttaagagatagaattatagatgcaggagctaaacttgtagtaacggctgatggtgcttttcgtcgtggcaaaccttatatgttaaaacctgcagtagataaggctttaagtgaagggtgtgaaagtgtagaaaaagtacttatagttatacgcaataatgagcctatagaatatattaaaggaagggactatgtttataacgaacttgtgaaaaatgagtcttataagtgtgaacccgaaattatggatagtgaggatttgttgtttttgctttacacttcaggatcaacaggcaagccaaaaggagttatgcatgcaagtgcaggatatatactttgggcacaaatgactatggaatgggtttttgatattaaagattatgataattattggtgtagtgctgatgtgggttggattacaggacatacttatgtagtttatgggcctttagcatgtggagcaacgactataatgcatgaaggaactcctacttatccaaattctgggcgttggtggagaatgatagaagagtatcaaataagcaaattctacacttcgccaactgccataagaatgcttcatgctgatgcacctaatgagccaagaaaatatgatttaagtacgcttgaagtgcttggaacggttggagagcctatcaatcctagtgcttggaagtggttttatgatgaaatagggggaactaaaagtcctatagtcgatacttggtggcaaacagaaacaggtgggcatatgatcacgcctttaccaggcgccactcctttaaaaccaggttgtgccaccttgcctttgccagggatttttgcagaagttattgatgaagaaggcaataaaaaagatgaaggtgaagatgggttgctttgtataactaaaccttggccttcgatgattcgtggaatttggggcaatgatgaacgctatatagaaagttatttttctcaagctaaaaaagatggaaaagctgtatattttagtggcgatggtgctttttatgataaaaatggttatattaccatcacaggaagaacagatgatgtggttaatgttgcaggacatcgtataggaacggctgaaattgaaagcgctattgctaaacatccaagtgtagcagaatcagctgtagtgagtattttggatacgattaagggcgagtcattgtttgcttttgtggttttaagtcctgcatccagttgtgatcttggcggagctatagaaactttaaaagaacttaatgacattttaagagtagaaataggacctatagctaaaatagaaaaaattctttatactccagatttgccaaaaactagaagtggtaaaataatgagaagaattttaagaactatagcaagaggtgaagaaatcaaacaggatatttcaacacttgaagattctaaagtagtagaaaccattgttaaattagctaaggcagagtttgaataacaaggtaaaaagaactttgcctagttgcatgaaaattcataaaaataagctataatgataaaaaaataaaaggaaatttttatgcttcaaacttgtattttccctgcggcaggttatgggacgagatttttacctgcaacaaaaactttacctaaagagatgttacctatcttaaccaagcctttgatccattatggagttgatgaagctttagaagcaggaatggaaaatatgggatttgtcacagggcgtggaaaaagagctttggaggattattttgatatttcttatgaacttgaacatcaaatttcaggtacaaaaaaagaatacttacttgatgaaattcgctctttgatcaatcgttgtacctttacttttacaagacaaaatcaaatgaaaggcttaggtgatgcggttttaaaaggtagacctttggttggcgatgaagcttttggcgtaattttggctgatgatttgtgtgttaatgaagaaggcttaaatgttatggctcaaatggtaaaaatttatgaaaaatatcgctgcaccatcatagctgtgatggaagtaccaaaagagcaagtttcaaactatggagtaatttctggaaattttgtagaagaaaatcttatcatggttaattctatgatagaaaaaccaagtcctgatgaagctccaagtaatcttgctatcataggaagatatattttaactcctgatatttttggaattttagaaaatactaaagcgggaaaaaatggtgaagtccaacttaccgatgcgcttttaactcaagcaactaatggtatggttttagcttataaatttcaaggaaaacgctttgattgtggaagtgtagaaggctttgtagaagcgacaaattatttttacgagaaaagtaaatgttaaacaatacacttttttttaagcaaagtgaaattcacactataagttcttatgcaaatcgtattaatgatgaggtaaaaagtggagatatagggtattatcatcttattgatacaagtttgaatttaatcgatgagagtttggcttttatcaaagacaaagaacacataaaaaatatcgttttagtgggaatgggtggttcaagttgtggtgtaaaagccttgcgtgatatgctttttaatgaaaaaagcaaccaaagagaactttttatactcgataacacaagttcacattcttttaataagactttagaaaaaatcaagcttgaggaaagtttgtttttaatcatcagcaaaacaggtagtactatagaagttgtatcgctttttaaacttcttattgaacattttaaacttgatatgcaagaattaaaaaaatactttgtttttattaccgataaggattcaaaacttcatcaagaaggtgaaaatttaggtattaaatgcttttttatccctgcaaatgtaggaggtcgttttagcatactttcagccgtaggtatagttccgctttgtttttgtggctataatgccaaagctcttttagaaggagctaaagcttgttttgaagatttttttactcataaaaaagatgaaattttacaaaaagcctatcattattgcacacacaaaaatgccaatatcaatgtacttttttcatatagtgatgcttttaaaggctttaatgaatggtatatccagcttattgctgaaagtttaggtaaaaagcaaggctataaacgtataggtttaactcctattgcactcattggagcaagagatcagcatagttttttacaactcattatggatggacctaaaaataaaactgtaacttttttaaaaatcaaagacgctcaaaaagcacctattatccctgatattcattttaaatttttagattctttaagtaataaagtcaatcttcacgaacttttaaacgctcaatgtaatgcaactatgcacgctttaatcgctgaaaatttgagtgttgatgtgatagaacttgaaaaacttgatgcttggcatgcgggatatttgatgtattattatgaactttttacttcaacttgcggtgttatgctagggattaacacctatgatcaacctggtgtggaagttggaaagttgatcttaaaaaatatattaaattcttaatcaaaattcattaaaaaagagtataataattttaagttaaaattataataaaaatttttaattaataataattattatttaagaattttatgttataattttaaaaattaaaaaaaggagtcaatcatgtcagttacaaaacaattattacaaatgcaagcagatgctcatcatctatgggttaaatttcataattatcactggaatgtaaaaggtttgcaatttttttctatacacgagtacacagaaaaagcttatgaagaaatggcagaactttttgatagttgtgctgaaagagttttacaacttggcgaaaaagctatcacttgccaaaaagttttaatggaaaatgcaaaaagtccaaaagttgcaaaagattgctttactccgcttgaagtcatagaactgatcaaacaagattatgaatatcttttagcagaatttaaaaaactcaatgaagcagcagaaaaagaaagtgataccacaacagctgcttttgcgcaagaaaatattgcaaaatatgaaaaaagtctttggatgataggtgctactttacagggtgcttgcaaaatgtaatttaaggggctttatgccccaattatacaaactaggttataatatccttttttaaaggataaaattgaaagtacttaattttttttatgaaaatcaccctaaatttgaagtaagttatgaaagaaaaaatcaaatttcaaaaccaaatattatcataaaaggcccacgattttgtggtaaaaaaacacttatttttaattttttatctcaatttaaagcaagtgaaattttgtttttagatttatatgatacacgctttgaaaaacaaagtttagaaagacttgctgattttctgaatgaaaatttacaaattaaaattctttgcctttataatttggattttatccctaatttagaaaaaattaaaattcccatcatcttaagtacaaatataaaagatttaaatataaatgggtttgaagagcttgaacttgattattttgattttgaagaatttattagtgtaagtaagaaaaatttacctataaataatttagtaggtctttttttacaaagtggacgcagtaaatttggagaaaaaaacatacttctaagacaaagctttactcttttagaattagaaattttaaagtatttagctttaaatttgggtcagcaaatcagtatttctaagatatttatagaacttaaaaaaagattaaaaacttcaaaagatagtgtttatcaagctataaaaaaattagaaaatacttatgtgatctatactttaaaacatgatgaaaaaaaacttcaaaagatttattttaaagattttggcctaagaaataatctttgtatttcaaaggatttttcgcatttatttgaaaatttagttttaagcgagttgtttaaatttaaagaagattttttttataacaaatactttaacttttatagccaaatatctaaaattgcttatatttcaagtccaactttagatattgatttgattaaattacgtactaagaaaattttaccaaaggctttagaacttggaatttttcatgtgatttttatcactctttcaagcgaggatagtttttttgagcaaggggttaaatttgaagtcatatcttttgataaattttcacttggattttaggtgttatttgagtttgtatcgtatttttcaaggttgtatcgtttgatgatttttgtaataagattgatataatatcccttgcgttcagaataagaatctaaagttttaatagcctctagtcctgttatctctttgccttcgcttgcaaatttagctcttgcatcgcgaaacttttcataagcaaaatgacgatttaaatttaaaacataagagtaaacactatcttgcagactatcaaaaatcttaattttatgttttttatctggatgtcttaaatcaggaattaaacctttctcaccccaagtccattctccaaaaagattatttgcttctcttgcgaagcgacttgtacctgtagcactttcaactaaagcttgggctatacccatggattttggaattttttgaatacgttttttatattctgcaaaatcataaagattttcaatgcgatatttgttttttatcgtgataagtttttcaagatttgtttgatttgaagtcctaaagcctgttttgtaagcatctttaaaaaaggcttcaataaaagctctttcttgttcaatttttttaaagctttgatcaaacatttcattcatttttataaaaaaaatttgtcttttttgatctatatcaagtttgtaatattcctctccaaagccattttttagatcatcagcaaaaagtgggattagaaaaagactaagaaaaattataattggcttcaaaacaatactttacctttccttcaaaaaacaattcttcatttttatatgtaaacccaacctcttcaccacttttaggagttattttaactttattttgtacttttttatttaaaaatgccagataaaaacaagcccccattcctgtgccacaagctaaggtttcatcttcaactccgcgttcataggtacgaacttttaaatgattttcatctaaaatttttacaaaattaacattggcattatatttttgtctcattttttgacaaagtattgtatcaaattcatctaaattttgacaaaaatgcactagatgtggaactccagtgtcgcaaagttgccaagtttttcctaattcttcaaaagtattttgcacgctttttattttgcctaaagatacttcaactttatcttgatttacctttgcttttattattcctgcaccggttaaaaaactcatgttaggatttattttgttaatatgatgtgcaaaatgtgccgcagcccttgagccattgccacacatagcagcccttgagccatcgttattataaaattcccattcaaagtcgtatttttcatgaggcaatatcacgataaagccatccccacctatgccctcataacgattgcaaagttctttagctaaagcacttctatcttcttttctatcagcatttgttatgacaaaatcattcccacttgcacaatatttataaaatttcacatttttcctttagaaatttcttgtattactttaacacattcttgcctaaaatcgacataagaattagtatttttaatgataaaatctgcttttttaagtttttcttcaatatctatttgagaatcaagtctcacttttgcagcttctaagctgagcttatctctttgcatgattcttttaaggcttaattctttaggtgtgtaaattacaatgactttgcctaaattttcataagcaccgctttcaaaaaaaagaggaatttctacaaaaaaagctttattttctttatctagaatttgcatttgttctaaaattttagctcgaattttaggatgagtgaaattttctaaggtttttttagcttctttgttgttaaaaacaatttctccaaggatttttctatcgattttcttttcttttgtgagtaaattttttaagttaaagggagaaaaaatcttttcaagttctaaagcattttcatctaaaattttatgagcaattttatctgcgctaatgcttttaaagcctaaagaattcgctatttctataaaagtgcttttaccacaagcaattgaagcggttacaaaaaaagcatttttcatcttatgccttattaaaacttttttcgttaaaatacctttttagttcttaaaggaaaataaatgaaaatttcatatgaagatgcaggcgtaagtatagataatggaaatgcctttgtagaggctataaaacctttggttaaagaaacttttaatgataatgttgtaggcggaattggttcttttgctggtgcttttagaatgccaagcggttttaaaaagcctgtgattttaggtgcaacagatggagttggtaccaagcttcgcttggcaattgatgctaaaaaatatgatactataggacaagatttagtagcaatgtgcgtgaatgatttgatttgtaattttgctacgcctttgttttttctagattattatgctacagctaaacttgaagtagaagtagcaaaggctgttgtatcaggcattgccaagggatgtaagatggcaaattgtgcattaatcggcggagaaactgctgaaatgcctggaatgtatgcaaaagatgattttgatcttgcgggttttgcagtgggtatggctgaagaagatgagatcgatagaagtaaatttgttaaaaatggtgatattttattggcacttcctagttcaggacttcattcaaatggttattctttagctagaaaagtactttttgaaagtttaaaattaaaatttgatgacaagatagaggataaaaatttaattgatattttattagagcctacaaggatttatgtgcgtgattttcttacattaaagccttatattagtgctctagctcatattacagggggtggtttagtagaaaatttaccacgcgttttgcctcgtggcatgggtgcaactatacgcaaacaccatcttaaaactcctgaaattttttatattataggacaggctgtagaagaaagcgaaatgtatagaagctttaacatgggagtgggtttagtaatggttgtagatccttctaatgtaagtaaggttttagaaaattcagatgcctttattatcggcgaaatttgcattaatgaaggtattgttttagaatgaaaataaagcgtcatacgctttatttttttattttaagttctatttttgtagtgttttgttcttttggcaaaggattggtttgtgctagataaaaggctacaagtacatttacaagcatagcgataagtaaaagaggagtggtccgttttataatatccattggagctacttttgcaaatccagctaaagctatgattccgcctgctattggtgaagctgcgcgacctaaacaagatgcaatttctacaggtaaaactagagtaataggtgcaatgcctaatttcgtagctatatcaggagctagttttccaaaagcattaaaagcagcaattccacttcccataatcactgtggcaaaataaactaaaaagcttaaaatagctatactcaaaagaattccaaaccatgcaaaatttcctgttccaagatttgaaaccgcgttagcaaggatattaactccaccaagtgctttaatgccttcagcaaatactccagcggcgatgattatgcttacgactgagataaaaattttagccatagcctttaaaatcaccatcatatcttcgcctaattttctagcatttctgtgtcttgcaaattcaacaagaaaaactaaagaaattcttacaaaatttgcttcacaacatcgagcttgatagtaaaaaaatatgctataaataaaaatacaacaggtaaccaaggaaagagtatgtaaaaaagtagggcatttaggatcaatgatttgcggaatttcaacttcatcatttaaaacacctttttctttatctcttttatcaatccaagcaaaataaaaaggaatcaagatggcaataactacaacataggcaatcacactataaatttggtaatttaaaaaaagccctacgacattatcactttgtcctaccatatctgccatattgattgaatttccatcttttggatcataatcaagtgcaattaaagaaagcgcacatacagttgtaataggacggattttaagtgagattaaaacaggataaatacatgctaacaaaagcaatccagcatagctagaaatgacgatttttaaagccattccaataacaaaagttccacttaaaattaagtatttattttttgatttttcctgagggtttatttgctaaaaaagcaagttttgccgaagcattgatatgtttcatgtaagcagtaaagcctgccacactcatgataataagccctgctccagaaagctgacttttaaaagtcgctgtgataaaagataactatcaagtaaaacatttaaaagcttgtatactctctgcttggagcttttggtataggtgttcctgtgatataaaaagcaaaaataagcaagataatatttgaaagaaaaatacaaaaatgggatcgtatttttttgagtatatcataaaaattagcatagggtctcttgaatttacaataaattggattttatctaaatttttaaataaaaaatattttttatttaaaaattacttgttttttgtattataaaattaacatatatagtttggttactgaaaagtttatgtttgtttaaaaaaatgatttttgtattataattatacacaaatcataaatattaaaaaggatctagtgtggcaagaattttggcatttgatataggaataagctctattggctgggcatttagtgaaaatgatgagttaaaagattgtggagttaggatttttacaaaggctgaaaatcccaaaacaggagaatccttagccttgccaagacgccttgcaagaagtgctagaaaacgccttgctagacgcaaagcaaggctaaatcacttaaaacatttaatcgcaaatgaatttaagttaaattacgaagattatcaaagctttgatgaaagtttagccaaggcttataaaggatctttaattagcccttatgagttaagatttagagctttaaacgagcttttaagtaagcaagattttgcaagagtgattttacatattgcaaaaaggcgtggctatgatgatattaaaaatagtgatgataaagaaaaaggtgcgattttaaaagctatcaagcaaaatgaagaaaaactagcaaattatcaaagtgtgggcgagtatctttataaagagtattttcaaaaattcaaagaaaattccaaagaatttacaaatgttagaaataaaaaagaaagttatgaacgctgcatagcgcaaagttttttaaaagatgaattaaagcttatttttaaaaaacaaagagaatttggcttttctttttcaaaaaaatttgaagaagaggtgcttagtgtagcattttataaaagggctttaaaagatttttctcatttggtgggaaattgtagtttttttaccgatgaaaaaagagcgccaaaaaattcgcccttagcttttatgtttgtagcacttacaagaattatcaatcttttaaacaatcttaaaaatactgaaggaattttatatacaaaagatgatttaaacgcccttttgaatgaagttttaaaaaacggcactctaacttataaacaaacaaaaaagcttttgggcttaagcgatgattatgaatttaaaggggaaaaaggaacttattttattgagtttaaaaaatataaagaatttataaaagccttaggtgatcatagtttaagccaagatgatttaaatgaaatagcaaaagatattacccttataaaagatgagattaagcttaaaaaggctttagcaaaatatgatttaaatcaaaatcaaattgatagtttaagcaaattggaatttaaagaccatttaaatataagttttaaagccttaaaacttatcactcctttaatgcttgaaggtaaaaaatacgatgaagcttgtaatgagcttaatttaaaagtagcaatcaatgaagataaaaaagattttttacccgcatttaatgaaacttattataaagatgaggtaactaatcctgtggttttaagagcgattaaagaatacagaaaggtcttaaatgctttacttaaaaaatacggcaaagtgcataaaataaacattgaattagcaagagaagtaggtaaaaattacagccaaagagctaaaatagaaaaagagcaaaatgaaaactacaaggccaaaaaagacgccgaacttgaatgtgaaaaactaggcttaaaaataaatagcaaaaatattttaaaattaagattatttaaagaacaaaaagaattttgtgcttatagtggagaaaagattaaaattagtgatttgcaagatgaaaaaatgcttgaaattgatcacatttacccttattctagaagttttgatgattcttatatgaataaagttttagtttttaccaagcaaaatcaagaaaaacttaatcaaaccccctttgaagcctttggcaatgatagtgcaaaatggcagaaaattgaagttttagcaaaaaatttacctactaaaaagcaaaaaagaattttagataaaaattacaaagacaaagagcaaaaagactttaaagatagaaatctaaacgatactcgctacatcgcaaggcttgttttaaactacactaaagattatttagattttttacctttaagcgatgatgaaaatacaaagttaaacgacacacaaaaaggctcaaaagtgcatgtagaagcaaaaagcgctatgcttacatcggctttaagacacacttggggctttagcgctaaggatagaaataaccatcttcatcacgccatcgatgcagtaattattgcttatgcaaacaactctatcgtaaaggctttttcagattttaaaaaagagcaagaaagcaacagtgcagaactttatgcaaaaaaaaatagtgaattagattataaaaacaaaaggaagttttttgagccttttagtggttttaggcaaaaggttttagataaaattgatgaaatttttgtctcaaaacctgagagaaaaaagccaagcggagctttacatgaagaaacatttagaaaagaagaagaattctatcaatcatacggcgaaaagaaggagttttaaaagccctagagcttggtaaaatccgcaaagtaaatggtaaaatagttaaaaatggcgatatgtttagagtggatatttttaaacacaaaaagacaaataaattttatgctgtgccaatttatactatggattttgctttaaaagtattaccaaataaagctgtagcacgaagtaaaaaaggtgagataaaagactggattttaatggatgaaaattatgagttttgcttttctttatacaaagatagtttgattttaattcaaactaaagatatgcaagagccagaatttgtttattataatgcttttacaagctctactgttagtttgattgtttcaaaacacgataataaatttgaaacgctaagcaaaaatcaaaaaatattgtttaaaaatgcaaatgaaaaagaagtaatcgcaaaaagcataggaattcaaaatctaaaagtatttgaaaaatacatagtttcagcacttggggaagttacaaaggctgagtttagacaaagagaagattttaaaaaatgagttacgatgaagcttttaaaacactgcttattagctctaatgccaagctaaatttagagctaaatcatcttgtgattaagcaagatgaaaatatagccaaattgtttttaaaagatataaatatcatcgttttagaaagcttacaagtaagcattagttccgcactttttaacgcttttgcaaggcataaaatcatcttgctaacctacgatgaaactcatagtataaatggtgtttttactccttttttagggcattttcaaagtgcaaaaatcgcaaaagagcaaatgaatgtaagtgctcaaaaaaaggctattttatggcaaaaaatcattaaaaataaaatcctaaatcaagcctttatcttaaaaaaatacaataaaatagagcaaagcaatgagcttataaatttggctaaaaaagtaagcttaaatgatagtaaaaatattgaagctgttgcggcggcgctttattttaaaactttgtttgggacttctttttcaagagatgagctttgctttgaaaattctgctttaaattatggctatgcaatcattagggcttgtattattagagcagtttgtataagtgggcttttgccttggcttggcattaagcacgataatatttataattcttttgcgctttgtgatgatttgatagaagtgtttagggctagtgttgatgattgtgttttaaagcttaagggtgaaagtgagtttttaagcaaagatgacaaaagagcgttgattggcaatttacaaagcaaaatcaattttgatgggcaaaattatcctttaaacagagcgataaatcattatgtggcaaattttaaaaatgctttattgtatgaagatgaactaaagatagtgaaatttgatgattgaagataaatttatgcgcgtgcttttgatgtttgatgtacctactaaaagtaaaaaagagcaaaaactagcaagtaaatttagaaacaatcttataaaattaggttattttatgctgcaatttagcgtttatatgcgtatttgcaagggtttaagttctgcaaaaagttctattgaaaatgtaaaaaagattttgccaccttatggaaatgtaagggctttaatcatcactgaaaagcaatttgataaaatggagcttttgcttggtggcatagtttttaatgaaaaagttaataacgaaaccaatttaacactttttgatatagatagtcatggagaatttaaatacaaaaattcaaataatgaagaaatacaactaaacaaaaaacaagaaaaatatcatcagcaaaatttatttgaattttaaaagcggttttaggggattgtaaccccgcagagtcccgcaaactctttattttagtccctttttaaatttcttatgagattatagcataatttttgctatttttcatgaaaaaaccccgaaattttcattatctggtaaatatctattttaccataaagaaatttaaaaagggactaaaacagctactaatgaaaatgaaacaattttagaattttaccataaagaaatttaaaaagggactaaaacattaataccagcaaagataattctactaccattttaccataaagaaatttaaaaagggactaaaataaaccctagtggattgaaactccgctagggctaattactccactaaaaggaggttgcgaatttgaaacttattgaaatttagggttgattaaaatcgaaataaaattatttaaataattttaaggcataaagataatatccactaaactttcattttctaaaatttcacattcttttggcgccaccataagggcagctttattgttaagattgtttataatcgcactagagccttcttttttgccttcaagattggctaaaatgcgtccattttcaaactttatgttacaagcgacaaattccaaataaggtgtttttttcttgtaacttccttgtaaaaaggctttgcaaatatagtctttaggctgaagtaaccaagagtttaaaatctctcttgcgtaaagattaaacattaccatagccgagtaaggaaaacctggtaaggcgatgatgaatttttcattagccttagctattttgatatgtctacctggttttatgtcggctttatcgatgatgatttcgtattctttgatggctttttttaaaaagtcaaaatctcccatagaaaccccgcccgttgtaaccaaaatatcacaactttgcaaagcactttcaagggtggaaaaagtggctttctcatcatcttttaaaagaggaaaaacccttgtatcgcaatttaaatttttagctaaattagctatggcgatatgatttgaagagcggatttgagcaggattttccaaggcttctcctagatctttgatctcacttccactacttaaaacccctacaataggctttataaacacactaatgtgaaaaaatccaagttcagctaaaagagctatctcgctataatttaactttgtgccttttttgagtaaaatttcatcttttttatagttttctcctaccgcacgcacggcaaaagcttggggaacttttttttctataaaaagagtatcattttctatgcgtatattttcaacagggactaaagtatcgcttccttcgctcatgagtgagcctgtaaaggtttttacacaagtgccattttgtacgctaaattgtggcatagtgcccgcaggtgtgaggcctaaaatttttaaaggcttgtcttgatcttcaaatttgatcgcataaccatccatagccgaggttggaaattcaggctgatttttaggggcttttatgtcttgagctaaaatgcgtcctaaacactctgtaagagctattttttcaatcttttcataggttttgatatgagagtgtaaaatttttaaactttcttcataagacattagcatctttattccttcatactgatataaatttgagtcttgtttgttgtataaaattcaaaatctgtgtcaaattttctttggagacttgaatttttaaaaaattcattgatattttgccaaagttttggggcaatgatttcaggttttccagagtcttcaaaaagcatgtatttgccaccttttatacaaattttttcgcctttttcgtgaggatttttcatacccacacaaattttatactctaacttgtgagtgtttttataatcataatacacgctataaatttcatcgggcgcaccaaagatgctatgaaattttttccacaaaggaaaaattaaagagctgtttaaatcgctctcaagttcctcatcagttttaacgcttactccataaatactaaattcttctatttcttgtatcattttaaaagtcctgcaccgcaaagtttggttgatctttctttggcataaattctttctttgtttatcacatcatacttccaaatgggtgcacttgctttaaaatcttcaacaaattcattaagaagtttaagtcctaattttctttgtttgcttaaaattcctgcaaaatacgagctttcatgaaccgccacatcgcctatagagtgagcaaaaagcaagctaataccatcaaaatctactcttttttgccactcatcaaaccatttttttaaaagcggttcataaatatcaaaactaagtgcctcaatacctccttcttcacgcacaataccacaaaaagtcagtaaagcaccgcagtttttatccttggaaaattcataccattggctataaattttaggaatatctaaagagccttgataaagtgtaaaatgtttcatttagcctccacaaactggcggtaaaagtgctattttatcaccatcttttaacttggtgttttcatcaaaaatgatttcatcatttaaagatacagcacaaagttctagccattcttttaaactctcatctttttgcaaaatttcttttaattcttttaaattttttacttcaagttctaaattttctttatttatagggcctaaaaattccacttttaccattttattcctttacttctaaatttcccatcattcctaaatcttcatgttctaaaatatggcaatgatacattctaagtcctttaaaatcttgtttcattctaagtcttaacttttcattaggacgcacatttatagtatctctgaaggctctaaattcggctttttgaactttgccattgagttttgatgagatgagttcaaattgcgtgccgtgtatgtggaaaggatgatccatgtgagatttatttatcactatccagtcttcaactactccaagcttggagcttaaatcaatgcgttttaaatcatagcttttgccattgattaaaaacatagacgcaagagcgatttttaattcattttcactttttcccatcattccatgcatttgcatatgatcttcactcatgattatttctttaaattccttaggttcttctaaaggtttgaaaatttttaaattttttggaagttctaatttttctttttttaggctaatactagctaaaaatagggtattaggttcttcttctaccatcattttatccctatcataataagcactttctagtctaaattccccatcttttggagcgtcgattaaaacttctacacgagaagcaggacttaagaaaagttcttctttataaatagctttttctataagtccaccatcagtaccaacaagtataaacttagctccttgtatgcgtaaatttaaatatcttgctgcagtagcattataaatgcgtatgcgttcgtttgtggcgagtttgattttaggtttgaattgtccattgatgagtacaaattctccttctctaccattaagccaatcatttaggttgttgtttggaatttgagcgttttcatcaagacgcaaatcgctaatcatcaaatctttttcttttaaatgacttaaagcatctttttttgctttgatcacaaaagcccctgctaaacccataaaaacttgtttagaagccgtataatgaggatgtggatgataccagtaagttcctgcgctatcttgaggaatttcaaaacgatatattctttcttctcctgctaagataggatcatgtgggcttccatcttgatcaggtggcacaggaacgccatgccaatgtatagttgtagcttctttgagtttgtttttgactaaaatttcaagtttatctccttcaaaaacttctatttttggagcaggcacgaggccattgtaagtataaaataaggtttttttacctttgataagctctatatgattttctttgatttctagggtagcacgaaaaatatttttttctttactttcatttttgagtaaaggcaaggcttttaaaatttctccttgggggaattgttttggatctaaaagctttaaattttttggagcaaagtttataaaagaagtatctaagtcatgatttatagaatgatttttatgcatggagtgcatatcgtgcataggatttgcataggctacacccatacttgctagagtaagtgcattaaattttaaaaaatttcttctattcattagtttttccttttgcttgattttttatattatagtcattatttttttagttttagtaaatatttattttgaaaatttggtttaattttgttatgattttagcaatttaatcaaggaaaaataatgttttatgaaaaaattcaaactccagcttatattttagaagaagataaattaagaaaaaattgtgagcttttagcaagtgttggtgaaaaaagtggtgctaaagtgcttttagctttaaaaggttttgctttttcaggagctatgaaaattgtcggagaatacctaaaaggttgcacttgtagcggactttgggaagcaaaatttgctaaagaatacatggataaagaaattcatacttattcgcctgcttttaaagaagatgaaataggtgaaatagccagtttatctcatcatatagtgtttaactctttagctcaatttcataaatttcaagctaaaacacaaaaaaattccttaggtcttcgttgtaatgttgaattttctctagccccaaaagaactttacaatccttgtggaagatactcaagacttggaattcgtgctaaagattttgaaaatgtggatttaaatgctatagaaggacttcattttcacgcactttgcgaagaaagtgctgatgctttagaggctgttttaaaggcttttgaggagaaatttggtaaatggatagggcaaatgaaatgggtgaattttggaggaggacatcacatcaccaaaaaaggctatgatgttgaaaaacttattgctttgtgtaaaaatttcagcgataaatatggtgtacaagtttatcttgaaccaggtgaagcagtgggttggcaaacaggaaatttggttgctagtgtagtagatatcatagaaaatgaaaaacaaattgctattttagatacttcaagcgaagcacatatgccagatactatcatcatgccttatacaagtgaagttttaaatgctagaattttagccacgagagaaaatgaaaaaatttcagacttaaaagaaaacgaattttcctatttactaaccggaaatacttgtttagcaggtgatgtaatgggagaatatgcctttgataaaaagcttaaaatcggcgataaaattgtttttttagatcaaattcattacaccattgtgaaaaacacaacttttaatggtataagacttccaaatctcatgcttttaaatgcaaaaaatgaacttcaaatgataagagaattttcttataaggattattctttaagaaattagtattatttataatttgcataaaatgttaattttatttggaagagaatcaaagatataaattttatgcaaagtattttattttttcaaatataaaatcaactcaaatatctaattttcaatactttggtatgatttttttaagattttaaatccttgtggaattttattgaaattcagtgatttttaaatcaaatagtattaagataaatcgatttaaaaatcggctttaaaatgaatattaggtatattttgcataatattcattcaagcaaaatttaaagctatttttgaaaattttgaatgcatgggggctttaatggatttggaaaaattaagattagctagaagtctttattatcaatgtctaggagagctttttgttttttcattttctgaagaaagattgtcaaaattacaagagtatttaaagacaatgcaagaatgtttatttgatgaaaatttaaaatcaaattttgatatcttgcttaagcatttagatgatgaaaattctatacaagcattttttaaagaatatgatttgctttttttaagtcttaaaaatagcattccaacgactttttcttacatagaagaaggttttgaaaattcaaatcctttactttgcgtgcgtcaaattttagtcaaaagtaaaataagacgcaatgaaaaattttttaaagaaagtgaagatagtgttggattttgtttattgttgatgagtgaatttttaaggcaaaatgaagatgatttagccaaagagctttttgaaaaagtgatcaataaaagcattgatgagtttttaggcgatgttttcatgaataaaaatgcgaatttatataaggaaattgcaagtattgcatcggcttttatggaatttgaaagactttgctttgaagtggaaaaacctgcaaaaataaattctaaaaaagtgcaaaacgatctatcgcgttcagaatttttaagaagagaagcaaataaacaaaggaggactcgtgaaaaatcgcagggaatttcttaaaaaatctgcttttgccttaggggctgctggagtgcttggtagcacgactttagctctagctaaagatgaagaaagaaaagatttggttaaaggtaaaagtaagaaaaaagaagtgctttttcaaagaagtgctaattgggaaaaatattatataaaggctgagtaatgtcaagtgtaggtgaaaatatcaagcttacgcgtcgttcttttcttaaaatggcagcactttcaagcctagcaacaccgttgcttgctagaagtgaaactttaagagaagcgagtgctgatgagcttaaagaagcgtatgaaggtagtaaaaaagtaaaaacagtttgtacagcctgttctgtaggctgtgggattattgcagaagtgcaaaaaggtgtttgggtgcgtcaagaaattgctcaagatcatcctgtgagttcaggtggacattgctgcaagggatctgatatgatcgatatggtgcgttcacatgtgcgtttaaaatatcctatgaaaaaagaaaatggagaatggaaacgcataagttatgagcaagctttaagtgagatcggagaaaaactagctgcttatcgtaaagaaaatcctgaaagtgttatgtttttaggttctgcaaaacttaataatgaacaagcttattatataagaaaatttgcagcattttttggaacgaacaatgtagatcatcaagctagaatttgacacagcgcaacagtcgccggtgtggcgaatacatttggttatggcgctatgacaaaccatcttggagacattcaaagaagtaaatgtatcattatcattggggcaaatccagcggtaaatcatcctgtgggttttagacatttcttaaaagcaaaagaaaaaggtgcaaagcttatcgttgtagatcctagatttacaaaaagtgcggcaaaagcggatatttatgcaagaattcgtccaggaaccgacattgctttcatgtatggaatgctaaaaatcatctttgatgaaggcttagaagatacaaaatatcttgatgaaagagtttttggaatcgataaaattcgcgaagaagcagcaaaatggacagccgaagaagtagaaaatgttacagggatctctaaagaacttttggtgcaaatcactcacgaagtagctaaaaacaaaccaactacgcttatttgggctatgggtttaactcaacacactgtaggaacttcaaatacacgtttagcacctattgtgcaaatggtgcttggaaatataggtaaatttggtggtggagttaatatcttacgcggacacgataatgttcaaggtgcttcagatatggcttgtttgagcgaaaatttaccaggttattatcctttaaatgaagcgacttggagatactatgccaaaatttggggtgtggattatgagtggcttttaggaaattttgtaagcaaagattggatgcataaaactgggctttcacttgctagatggtgggcagcggctttaaatggaaaagatggaaatgatgctatcgataatgcaggaacgcctttaaaagctttagtagttatgggaaatggtattacttcgactgcacaacaagtaaaagttaaagaaggtttggaagctttagagcttttagttttagccgatccttttgtaaatgaagcagggattattgcagaaagaaaagatggaatttatcttttacctgcagcaacacagtttgaaacaagcggaagtgtaacagcaacaaatcgtagcggacaatggagatttaaagttgtagatccactttatgaaagcatggaagatcaagaaattttatttgagcttgctaaaaaattaggtttttatgaagactttaccaagactttacgcgatgaaaaaggtgagattgtttggcctgaaaatgcaacaagagaaattgcaaaagcagttagaagtatagggcttaatggttggagtcctgaaaggcttaaaaagcatactttatactgggataaatttgatgaggtaactttagaaggaaaagacgaagttgctggcgagtattacgggcttccttggccttgttggagtgataagcacccaggttctcctgtgctttataataccgacattgaagtagcaaaaggtggtatgggctttagaaacaattttggact

SEQ ID NO: 3786 - DNA, 22954 bp, synthetic construct
  source 1..22954: mol_type = other DNA
  misc_feature 1..22954: note = Synthetic
acagatgatgtggttaatgttgcaggacatcgtataggaacggctgaaattgaaagcgctattgctaaacatccaagtgtagcagaatcagctgtagtgagtattttggatgcgattaagggcgagtcactgtttgcttttgtggttttaagtcctgcatccagttgtgatcttggcggagctatagaaactttaaaagaacttaatgacattttaagagtagaaataggacctatagctaaaatagaaaaaattctttatactccaggtttgccaaaaactagaagtggtaaaataatgagaagaattttaagaactatagcaagaggtgaagaaatcaaacaggatatttcaacgctcgaagattctggagtagtagaaactattgttaaattagctaaggcagagtttgaataacaaggcaaaaagaactttgccttgttgcataaaaattcataaaaataagctataatgataaaaaaataaaaggaaatttttatgcttcaaacttgtattttccctgcggcaggttatgggacgagatttttacctgcaacaaaaactttacctaaagagatgttacctatcttaactaagcctttgatccattatggggttgatgaagctttggaagcaggaatggaaaatatgggctttgtcacagggcgtggaaaaagagctttggaggattattttgatatttcttatgaacttgagcatcaaatttcaggtacaaaaaaagaatacttacttgatgaaattcgctctttgatcaatcgttgcacctttacttttacaagacaaaatcaaatgaaaggattaggtgatgcggttttaaaaggtaaacctttggttggtgatgaagcttttggcgtaattttggctgatgatttgtgtgtcaacgaagaaggcttaaatgttatggctcaaatggtaaaaatttatgaaaaatatcgctgcaccatcatagctgtgatggaagtaccaaaagaacaagtttcaaactatggagtaatttttggaaattttgtagaagaaaatcttatcatggttaattctatgatagaaaaaccaagtcctgatgaagctccaagtaatcttgctatcataggaagatatattttaactcctgatatttttggaattttagaaaatactaaagcgggaaaaaatggcgaaattcaacttaccgacgcgcttttaactcaagcaaccaatggtatggttttagcttataaatttcaagggaaacgctttgattgtggaagtgtagaaggctttgtagaggctacaaattatttttacgagaaaagtaaatgttaaacaatacacttttttttaaacaaagtgaaattcacactataagctcttatgcaaatcgtattaatgatgaggtaaaaagtggagatatagggtattatcatcttattgacacgagcttaagcctgattgatgagagtttggcttttatcaaagacaaagaacacataaaaaatattgttttagtgggaatgggtggttcaagttgcggtgtaaaagccttgcgtgatatgctttttaatgaaaaaagtaatcaaagagaactttttatactcgataacacaagttcacattcttttaataagactttagaaaaaatcaagcttgaagaaagtttgtttttaatcatcagtaaaacaggtagcactatagaagtcgtatcgctttttaaacttcttattgaacattttaaacttgatatgcaagaattaaaaaaatactttgtttttattaccgataaggattcaaaacttcatcaagaaggtgaaaatttaggtattaaatgcttttttatccctgcaaatgtaggaggtcgttttagcatactttcagccgtaggtatagttccgctttgtttttgtggctataatgccaaagctcttttggaaggagctaaagcttgttttgaagatttttttactcacaaaaaagatgaaattttacaaaaagcctaccattattgcacgcataaaaatgccaatatcaatgtacttttttcatatagtgatgcttttaaaggctttaatgaatggtatattcagcttattgctgaaagtttaggtaaaaagcaaggctataaacgcataggtttgactcctattgcacttattggcgcaagagatcagcatagttttttacaactcatcatggatggacctaaaaataaaactgtaacttttttaaaaatcaaagacgctcaaaaagcacctattatccctgatattcattttaaatttttagattctttaagcaataaagtcaatcttcacgaacttttaaacgctcaatgtgatgcaactatgcacgctttaatcgctgaaaatttgagtgttgatgtgatagaacttgaaaaacttgacgcttggcatgcgggatatttgatgtattattatgaactttttacttcaacttgcggtgttatgctagggattaacacttatgatcaacctggtgtggaagttggaaagttgatcttaaaaaatatattaaattcttaatcaaaattcattaaaaaagagtataatgattttaagttaaaattataataaaaatttttaattaataataattattatttaagaattttatgttataattttaaaaattaaaaaaaggagtcaatcatgtcagttacaaaacaattattacaaatgcaagcagatgctcatcatctatgggttaaatttcataattatcactggaatgtaaaaggtttgcaatttttttctatacacgagtacacagaaaaagcttatgaagaaatggcagaactttttgatagttgtgctgaaagagttttacaacttggcgaaaaagctatcacttgccaaaaagttttaatggaaaatgcaaaaagtccaaaagttgcaaaagattgctttactccgcttgaagtcatagaactgatcaaacaagattatgaatatcttttagcagaatttaaaaaactcaatgaagaagcagaaaaagaaagcgatactacaacagctgcttttgcgcaagaaaatatcgcaaaatatgaaaaaagtctttggatgataggcgctactttacaaggtgcttgcaaaatgtaatttaaggggctttatgccccaattatacaaactaggttataatatccttttttaaaggataaaattttgaaagtacttaattttttttatgaaaaccaccctaaatttgaagtaagttatgaaagaaaaaatcaaatttcaaaaccaaatattatcataaaaggcccacgattttgtggtaaaaaaacacttatttttaattttttatctcaatttaaagcaagtgaaattttgtttttagatttatatgatacacgctttgaaaaacaaagtttagaaagacttgctgattttctgaatgaaaatttacaaattaaaattctttgcctttataatttggattttatccctaatttagaaaaaattaaaattcccatcatcttaagtacaaatataaaagatttaaatataaatgggtttgaagagcttgaactcgattattttgattttgaagaatttattagtgtaagtaagaaaaatttacctataaataatttagtaggtctttttttacaaagtggacgcagtaaatttggagaaaaaaacatacttctaagacaaagcttcactcttttagaattagaaattttaaagtatttagctttaaatttgggtcagcaaatcagtatttctaagatatttatagaactcaaaaaaagattaaaaacttcaaaagatagtgtttatcaagctataaaaaaattagaaaatacttatgtgatctatactttaaaacatgatgaaaaaaaacttcaaaagatttattttaaagattttggcctaagaaataatctttgtatttcaaaggatttttcacatttatttgaaaatttagttttaagcgagttgtttaaatttaaagaagaatttttttataacaaatactttaacttttatagccaaatatctaaaattgcttatatttcaagtccaactttagatattgatttgatcaagctacgtgctaagaaaattttaccaaaggctttagaacttggaatttttcatgtgatttttatcactctttcaagcgaggataatttttttgagcaaggggttaaatttgaagtcatatcttttgataaattttcacttggattttaggtgttgtttgagtttgtatcgtatttttcaaggttgtatcgtttgatgatttttgtaataagattgatataatatcccttgcgttcagaataagaatctaaagttttaatagcctctagccctgttatctctttgccttcgctttcaaatttagctcttgcatcgcgaaacttttcataagcaaaatgacgatttaaatttaaaacataagagtcaacactatcttgcagactatcaaaaattttaattttgtgttttttatctggatgtcttaaatcaggaattaaacctttctcaccccaagtccattctccaaaaagattgtttgcttctcttgcgaagcgactggtacctgtagcactttcaactaaagcttgggctatacccatggattttggaattttttgaatacgttttttatattctgcaaaatcataaagattttcaatgcgatatttgttttttatcgtgataagtttttcaagatttatttggtttgaagtcctaaagcctgttttgtaagcatctttaaaaaaggcttcgataaaggctctttcttgttcaatttttttaaagctttgatcaaacatttcattcatttttgtaaaaaaaatttgccttttttgatctatatcaagtttgtaatattcctctccaaatccactctttagatcatcagcggcaaaaagtgggattagaaaaagactaagaaaaattataattggcttcaaaacaatactttacctttccttcaaaaaacaattcttcatttttatatgcaaaccctacctcttcaccacttttaggagttattttaactttattttgtacttttttatttaaaaatgccagataaaaacaagcccccattcctgtgccacaagctaaggtttcatcttcaactccgcgttcataggtgcgaacttttaaatgattttcatctaaaatttttacaaaattaacattggcattatatttttgtctcattttttgacaaagcattgtatcaaattcatctaaattttgacaaaaatgtactagatgtggaactccagtgttgcaaagttgccaagtttttcctaattcttcaaaagtattttgcacgctttttattttgcctaaagatacttcaactttatcttgatttacctttgcttttattactcctgcaccagttaaaaaactcatgttaggatttattttgttaatatgatgtacaaaatgtgccgcagcccttgagccattgccacacatagcagcccttgagccatcgttattataaaattcccattcaaagtcgtatttttcatgaggtaatatcacgataaagccatccgcgcctataccctcataacgattacaaagttctttagctaaagcacttctatcttcttttctatcagcatttgttatgacaaaatcattcccacttgcacaatatttataaaatttcacatttttcctttagaaatttcttgtattactttaacacattcttgcctaaaatcggcataagaattagtatttttaatgataaaatctgcttttttaagtttttcttcaatatctatttgagaatcaagtcttgcttttgcagcttctaagctaagcttatctctttgcatgattcttttaaggcttaattctttaggtgtgtaaattacaatgactttgcctaaattttcataagcaccgctttcaaaaaaaagaggaatttctacaaaaaaagctttattttccttatctagaatttgcatttgttctaaaattttagctcgaattttaggatgagtgaaattttctaagatttttttagcttctttgttgttaaaaacaatttctccaaggatttttctatcgattttcttttcttttgtgagtaaattttttaaactaaagggagaaaaaatcttttcaagctctaaagcattttcatctaaaatttcatgagcgattttatctgcactaatgcttttaaagcctaaagaattcgctatttctataaaggtgcttttaccacaagcaattgaagcggttacaaaaaaagcatttttcatcttatgccttattaaaacttttttcgttaaaatacctttttagttcttaaaggaaaataaatgaaaatttcatatgaagatgcaggcgtaagtatagataatggaaatgcctttgtagaggctataaaacctttggttaaagaaacttttaatgataatgttgtaggcggaattggttcttttgctggtgcttttagaatgccaagtggttttaaaaagcctgtgattttaggtgcaacagatggggttggtaccaagcttcgcttggcaattgatgctaaaaaatatgatactatagggcaagatttagtagcaatgtgtgtgaatgatttgatttgtaattttgctacacctttgtttttcctagattattatgctacagtcaagctcgaagtagaagtagcaaaggctgttgtatcaggcattgccaagggatgtaagatggcaaattgtgcattaatcggcggagaaactgctgaaatgcctggaatgtatgcaaaagatgattttgatcttgcgggttttgcagtgggtatggctgaagaagatgagattgatagaagtaaatttgttaaaaatggtgatattttgttggcacttcctagttcaggacttcattcaaatggctattctttagccagaaaagtactttttgaaagtttaaaattaaaatttgatgacaagatagagggtaaaaatttaatcgatattttattagaacctacaaggatttatgtgcgtgattttcttacactaaagccttatatcagtgctctagctcatattacagggggtggtttagtagaaaatttaccacgcgttttacctagtggtatgggtgcaactatacgcaaacatcatcttaaaactcctgaaattttttatactataggacaggctgtagaagaaagtgaaatgtatagaagctttaacatgggagtgggtttagtaatggttgtagatccttctaatgtaagtaaggttttagaaaattcagatgcctttattatcggcgaaatttgcattaatgaaggtattgttttagagtgaaaagaatttattttttaagatattttaagagtaaattaaaaaaataataaggaaaagtgatgaaaaatattgtctttcattcggatggttttggagatttattagtttgttttaaagctttgtatgctataaagcaactctatccagagtataaattatttttattaacaaatggattaatggaaagtgattttttagaaaaaattccatttattgatgaagttttgatttataaggatgattttttagaaaaaattcaaagcaaaaatccagtaatttttattaccacacgaagacaaggtttatattttaaaaaattaaaatttttaaatgttcaaaaatgtatagtattccctcatcttattagtataatttctaaaaatttaaccacacctttaccattttttagagctaaaaaacatatgagtgaaattgttttaaaattggttaggatgattaatactaggcattttgataaaaattttaatcaaattgatttttctaaaattaaaaatttattaccttatgatgcaagattaagtgataatttttttaaacaaattgatacaaaatatgaaaaaattataggtattaatgctttttcaaataatagcgaatatagaggatttaatttttttataaaagattggatagggcttgcaaggcaactttctttaaaatatcctaaatttttatttatacttttaaattttagtacgaattctattcagtataatattgatcagaatgcaaatttgaaagttttctgtaataataaaaatattgcttctttggtaagtatttctcaaaagctagattttttaattactgttgatactggaaatttacatctttgtgatattttacaaattcctactttggcttttacaagtagtcttgcagcttatagatttggaggtggaagttatggaggtagatttgataaattgatagtaaaaccagcttggcaaaaagaatatagaaaaatttatgaaatttttactaaaaaagcagaaaataatttagaaaatttatagtttttataaaataataaatatttattatttattatttaaagatactgctatttttgtagtgttttgttcttttggcaaaggattggtttgtgctagataaaaggctacgagtacatttacaagcatagcgataagcaaaagaggagtggttcgttttataatatccattggagctacttttgcaaatccagctaaagctatgattccgcctgctattggtgaagctgcacgacctaaacaagatgcaatttctataggtaaaactagagtaataggtgcaacgcctaattttgtagctatatcaggagctagttttccaaaagcattaaaagcagcaattccacttcccataatcactgtggcaaaataaactaaaaagcttaaaatagctatactcaaaagaattccaaaccatgcaaaatttcctgttccaagatttgaaaccgcgttagcaaggatattaactccaccaagtgctttaatgcctttagcacatactccagcggcgatgattatgcttacgactgagataaaaatttcagccatagtcttttaaaatcaccatcatatcttcgcctaatttactagcatttctgtgtcttgcaaattcaacaagaaaaactaaagaaattcttacaaaatttgctatcacaacatcgagcttgatagtaaaaaaatacgctataaataaaaatataacaggtaaccaaggaaagagtatgtaaaaagtagggcatttaggatcaatgatttgcggaatttcaacttcatcatttaaaacacctttttctttatctcttttatcaatccaagcaaaataaaaaggaatcaagatggcaataattacaacataggtaatcacactataaatttggtaatttaaaaaaagccctacgacattatcactttgtcctaccatatctgccatattgattgaatttccatcttttggatcataatcaagtgcaattaaagaaagcacgcatacagttgtaataggacggattttaagtgagattaaaacaggataaatacatgctaacaaaagcaaaagcaattcagcatagctagaaatgacgatttttaaagccattccaacaacaaaagttccacttaaaattaagtatttattttttgatttttcctgagggtttatttgctaaaaaagcaagttttgccgaagcattgatatgtttcatttaagcagtaaagcctgccacactcatgataataagccctgctccagaaagctgacttttaaaagttgctgtgataaaagataactatcaagtaaaacatttaaaagcttgtatactctctgcttggagcttttggtataggtgttcctgtgatataaaaagcaaaaataagcaagataatatttgaaagaaaaatacaaaaatgggatcgtattttttgagtatatcataaaaattagcatagggtctcttgaatttacaataaattggattttatctaaatttttaaataaaaaatatttttttatttaaaaattacttgttttttgtattataaaattaacatatatagtttggttactgaaaagtttatgtttgtttaaaaaatgatttttgtattataattatacacaaatcataaatattaaaaaggatctagtgtggcaagaattttggcatttgatataggaataagctctattggctgggcatttagcgaaaatgatgagttaaaagattgcggagttaggatttttacaaaggctgaaaatcctaaaacaggagaatccttagccttgccaagacgccttgcaagaagtgctagaaaacgccttgctagacgcaaagcaaggctaaatcacttaaaacatttaatcgcaaatgaatttaagttaaattatgaagattatcaaagctttgatgaaagtttagccaaggcctataaaggctctttaattagcccttatgagttaagatttagagctttaaacgagcttttaaataagcaagattttgcaagagtgattttacatattgcaaaaaggcgtggctatgatgatattaaaaatagtgatgataaagaaaaaggtgcgattttaaaagctatcaagcaaaatgaagaaaaactagcaaattatcaaagtgtgggcgagtatctttataaagagtattttcaaaaattcaaagaaaattccaaagaatttacaaatgttagaaataaaaaagaaagttatgaacgctgcatagcgcaaagttttttaaaagatgaattaaagcttatttttaaaaaacaaagagaatttggcttttctttttcaaaaaaatttgaagaagaggtgcttagtgtagcattttataaaagggctttaaaagatttttctcatttggtgggaaattgtagtttttttaccgatgaaaaaagagcgccaaaaaattcgcccttagcttttatgtttgtagcacttacaagaattatcaatcttttaaacaatcttaaaaatactgaaggaattttatatacaaaagatgatttaaacacgcttttgaatgaagttttaaaaaacggcactctaacttataaacaaacaaaaaagcttttgggtttaagcgatgattatgaatttaaaggagaaaaaggaatttattttattgagtttaaaaaatataaagaatttataaaagccctaggtgatcatagtttaagccaagatgatttaaatgaaatagcaaaagatattgctcttataaaagatgagattaagcttaaaaaagctttagcaaaatacgatttaaatcaaaatcaaattgatagtttaagcaaattggaatttaaagaccatttaaatataagttttaaagtcttaaaacttatcactcctttaatgcttgaaggtaaaaaatacgatgaagcttgtaatgagcttaatttaaaagtagcaatcaatgaagataaaaaagattttttactcgcatttaatgaaacttattataaagatgaggtaactaatcctgtggttttaagggcgattaaagaatacagaaaggtcttaaatgctttacttaaaaaatacggcaaagtgcataaaataaacattgaattagcaagagaagtaggtaaaaattatagccaaagagctaaaatagaaaaagagcaaaatgaaaactacaaggccaaaaaagacgccgaacttgaatgtgaaaaactaggcttaaaaataaatagtaaaaatattttaaaattaagattatttaaagaacaaaaagaattttgtgtttatagtggggaaaagattaaaattagtgatttgcaagatgaaaaaatgcttgaaattgaccatatttacccttattctagaagttttgatgattcttatatgaataaggttttagtttttaccaagcaaaatcaagaaaagcttaataaaaccccatttgaagcctttggcaatgatagtacaaaatggcagaaaattgaagttttggcaaaaaatttacctgaaaaaagcaaaaaagaattttagataaaaactataaagacaaagagcaaaaagactttaaagatagaaatctaaacgatactcgctacatcgcaaggcttgttttaaactatactaaagattatttagattttttacctttaagcgatgatgaaaatacaaagttaaacgacacacaaaaaggctcaaaagtgcatgtagaagcaaaaataggtatgctaacatcggctttaagacacacttggggctttagcactaaggatagaaataatcatcttcatcacgccatcgatgcagtaattattgcttatgcaaacaactctatcgtaaaggctttttctgattttaaaaaagagcaagaaagcaacagtgcagaactttatgcaaaaaaaattagtgaattagattataaaaacaaaaggaagttttttgagccttttagtggttttaggcaaaaggttttagataaaattgatgaaatttttgtctcaaaacctgagagaaaaaagccaagcggagccttacacgaagaaacatttagaaaagaagaagaattctatcaatcatacggcggaaaagaaggagttttaaaagccctagagcttggtaaaatccgcaaagtaaatggtaaaattgttaaaaatggcgatatgtttagagtggatatttttaaacacaaaaagacaaataaattttatgctgtgccaatttatactatggattttgctttaaaagtattaccaaataaagctgtagcacgaagtaaaaaaggtgagataaaagactggattttaatggatgaaaattatgagttttgcttttctttatacaaagatagtttgattttaattcaaactaaagatatgcaagagccagaacttgtttattttaatgcttttacaagctctactgttagtttgattgtttcaaaacacgataataaatttgaaacgctaagcaaaaatcaaaaaatattgtttaaaaatgcaaatgaaaaagaagtaatcgcaaaaagcataggaattcaaaatctaaaagtatttgaaaaatacatagtttcagcacttggagaagtgacaaaggctgagtttagacaaagagaagattttaaaaaatgagttacgatgaagcttttaaaacactgcttattagctctaatgccaagctaaatttagagttaaatcatcttgtgattaagcaagatgaaaatatagccaaattgtttttaaaagatataaatatcatcgttttagaaagcttacaagcaagccttagttccgcactttttaatgcttttgcaaggcataaaatcatcttgctaacctgcgatgaaactcatagtataaatggtgtttttactccttttttagggcattttcaaagtgcaaaaatcgcaaaagaacaaataaatgtaagtgctcaaaaaaaggctattttatggcaaaaaatcattaaaaacaaaatcctaaatcaagcctttgttttgaaaaaacacaataaaatagagcaaagcaatgagcttataaatttggctaaaaaagtaagcttaaatgatagtaaaaatatcgaagctgttgctgcggcgctttattttaaaactttgtttagcgtttctttttcaagagatgagttttgctttgaaaattctgctttaaattatggctatgcaatcattagggcttgtattattagagcagtttgtataagtgggcttttgccttggcttggcattaagcacgataatatttataattcttttgcgctttgtgatgatttgatagaagtgtttagggctagtgttgatgattgtgttttaaagcttaagggtgaaagtgagtttttaagcaaagatgacaaaagagcgttgattggcaatttacaaagcaaaatcaattttgatgggcaaaattatcctttaaacagagcgataaatcattatgtggcgaattttaaaaatgctttattgtatgaagatgaactaaagatagtgaaatttgatgattgaagataaatttatgcgtgtacttttgatgtttgatgcacctactaaaagtaaaaaagagcaaaaactagcaagtaaatttagaaacaatcttataaaattaggttattttatgctgcaatttagcgtttatatgcgtatttgcaagggtttaagttccgcaaaaagttctattgaaaatgtaaaaaagattttgccaccttatggaaatgtaagggctttaatcatcactgaaaagcaatttgataaaatggagcttttgcttggtggcatagtttttaatgaaaaagttaataacgaaactaatttaacgctttttgatatagatagtcatggagaatttaaatacaaaaattcaaataatgaagaaatacaactaaacaaaaaacaagaaaaatatcatcagcaaaatttatttgaattttaaaagcggttttaggggattgtaaccccgcagagtcccgcaaactctttattttagtccctttttaaatttcttatgagattatagcataatttttgctatttttcatcaaaaaacccctaaattttcattatctggtaaatatctattttaccataaagaaatttaaaaagggactaaaacacttaaagcttcatatccaaatttataaatattttaccataaagaaatttaaaaagggactaaaaccctagtggattgaaactctgctagggctaattactccactaaaaggaggttgcaaatttgaaacttattgaaatttagggttgattaaaatcgaaataaaattatttaaataattttaaggcataaagataatatccactaaactttcattttctaacatttcacattcttttggtaccaccataagggcagctttattgttaagattgtttataatcgcactagaaccttctttcttaccttcaagattggctaaaatgcgtccatttttaaactctatattgcaagcgacaaattccaaataaggtgtttttttcttgtaacttccttgtaaaaaggctttgcaaatataatctttaggttgaagtaaccaagagtttaaaatctctcttgcgtaaagattaaacattaccatagccgagtaaggaaaacctggtaaggcgatgatgaatttttcattagccttagctattttgatatgtctgcctggttttatgtcggctttatcgatgatgatttcatattctttgacggctttttttaaaaagtcaaaatctcccatagaaactccgcccgtcgtaaccaaaatatcgcaactttgcaaagcactttcaagggtagaaaaagtggctttttcatcatcttttaaaagaggaaaaacccttgtatcgcaatttaaatttttagctaaattagctatggcgatatgatttgaagagcggatttgagcgggattttctaaggcttctcctagatctttgatctcgcttccactacttaaaacccctacaataggctttataaacacactaatgtgaaaaaatccaagttcggccaaaagagctatctcgctataatttaaccttgtgccttttttgagtaaaatttcatcttttttatagttttctcctaccgcacgcacggcaaaagcttggggaacttttttttctataaaaagagtatcattttctacgcgtacattttcaacagggactaaagtatcgcttccttcgctcatgagtgagcctgtaaaggtttttacacatgtgccattttgtacgctaaattgtggcatagtgcccgcaggtgtgaggcctaaaatttttaaaggcttgtcttgatcttcaaatttgatcgcataaccatccatagccgaggttggaaattcaggctgatttttaggggcttttatatcttgagctaaaatgcgtcctaaacactctgtaagagctattttttcaatcttttcataggttttgatatgagagtgtaaaatttttaaactttcttcataagacattagcatctttattccttcatactgatataaatttgagtcttgtttgttgtataaaattcaaaatctgtgtcaaattttctttggagacttgaatttttaaaaaattcattgatattttgccaaagttttggggcaatgatttcaggttttccagagtcttcaaaaagcatgtatttgccaccttttatacagattttttcgcctttttcgtgaggatttttcacgcccacacaaattttatactctagcttgtgagtgtttttataatcataatacacgctataaatttcatcgggcgcaccaaagatgctatgaaattttttccacaaaggaaaaatcaaagaactatttaaatcgctctcaagttcctcatcagttttaacgcttactccataaatactaaattcttctatttcttgtatcattttaaaagtcctgcaccgcaaagtttggttgatctttctttggcataaattctttctttgtttatcacatcatacttccaaatgggcgcacttgctttaaaatcttcaacaaattcattaagaagtttaagtcctaattttctttgtttgcttaaaattcctgcaaaatacgagctttcatgtatcgctacatcgcctatagagtgagcaaaaagcaagctaataccatcaaaatctactcttttttgccactcatcaaaccatttttttaaaagcggttcataaatatcaaaactaagtgcctcaatacctccttcttcacgcacaataccacaaaaagtcagtaaagcaccgcagtttttatccttggaaaattcataccattggctataaattttaggaatatctaaagagccttgataaagtgtaaaatgttccatttaacccccacaaactggtggtaaaagtgctattttatcaccatcttttaacttggtgttttcatcaaaaatgatttcatcatttaaagatacagcacaaagttctagccattcttttaaactctcatctttttgcaaaatttcttttaattcttttaaattttttacttcaagttctaaattttctttatttatagggcctaaaaattccacttttaccattttattcctttacttctaaatttcccatcattcctaaatcttcatgttctaaaatatggcaatgatacattctaagtcctttaaaatcttgtttcattctaagtcttaactcttcattaggacgcacatttatagtatctctgaaggttctaaattcggctttttgaactttgccattgagttttgatgagatgagttcaaattgcgtgccgtgtatgtggaaaggatgatccatgtgagatttatttatcactatccagtcttcaactactccaagcttggagcttaaatcaatgcgttttaaatcatagcttttgccattgattaaaaacatagacgcaagagcgatttttaattcgctttcactttttcccatcataccatgcatttgcatatgatcttcactcatgattatttctttaaattccttaggctcttctaaaggtttgaaaatttttaaattttttggaagttctaatttttctttttttaggctaatactagctaaaaatagggtattaggttcttcttttaccatcattttatccctatcataataagcactttctagtctaaattccccatcttttggagcatcgattaaaacttctacgcgagaagcaggacttaagaaaagttcttctttataaatagctttttctataagtccgccatcagtaccaacaagtataaatttagccccttgtatgcgtaaatttaaatatcttgccgcagtagcattataaatgcgtatgcgttcgtttgtggcgagtttgattttaggtttaaattgtccattgatgagtacaaattctccttctctaccattaagccaatcatttaggttgttgtttggaatttgagcgttttcatcaagacgcaaatcgctaatcatcaaatctctttcttttaaatgacttaaagcatcttttttcgctttgatcacaaaagcccccgccaaacccataaagacttgtttagaagtggtataatgaggatgcggatgataccagtaagttcctgcgctatcttgaggaatttcaaaacgatatattctttcttcccctgctaagataggatcatgtgggcttccatcttgatcaggtggtacaggaacgccatgccaatgtatagttgtagcttctttgagtttatttttgactaaaatttcaagtttatctccttcaaaaacttctatttttggagcaggtactaggccgttgtaagtataaaataaggtttttttacctttgataagttctatatgattttctttgatttctatggtagcacgaaaaatatttttttctttactttcatttttgagcaaaggtaaggcttttaaaatttctccttgggggaattgttttggatctaaaagttttaaattttttggagcaaaatttataaaagaagtatctaagtcatgatttatagaatgatttttatgcatggagtgcatatcgtgcataggatttgcataggctacacccatacttgctagagtaagtgcattaaattttaaaaaatttcttctattcattagtttttccttttgcttgattttttgtattatagtcattatttttttagttttagtaaatatttattttgaaaattcggtttaattttgttatgattttagcaatttaatcaaggaaaaataatgttttatgaaaatattcaaaccccagcttatattttagaagaagataaattaagaaaaaattgcgagcttttagcaagtgttggcgaaaaaagtggtgctaaagtgcttttagctttaaaaggttttgctttttcaggagcgatgaaaattgttggagaatacttaaaaggttgtacttgtagcggactttgggaagcaaaatttgctaaagaatacatggataaagaaattcatacctattcgcctgcttttaaagaagatgaaatcgatgaaatagccagcttatctcatcatatagtgtttaactctttagctcaatttcataaatttcaagctaaaacacaaaaaaattccttaggtcttcgttgtaatgttgaattttctctagccccaaaagaactttacaatccttgtggaagatactcaagacttggaattcgtgctaaagattttgaaaatgtggatttaaatgctatagaaggacttcattttcacgcactttgtgaagaaagtgctgatgctttagaagctgttttaaaggcttttgaagagaaatttggcaaatggatagggcaaatgaaatgggtgaattttggaggaggtcatcacatcaccaaaaaaggctatgatgttgaaaaacttattgctttgtgtaaaaatttcagcgataaatatggtgtacaagtttatcttgaaccaggtgaagcggtaggttggcaaacaggaaatttggttgctagtgtagtagatatcatagaaaatgaaaaacaaattgccattttagatacttcaagcgaagcgcatatgccagatactatcatcatgccttatacaagtgaagttttaaatgctagaattttagccacaagagaaaatgaaaaaatttcagacttaaaagaaaacgaatttgcctatttgcttactggaaatacttgtttagcaggtgatgtaatgggagaatatgcctttgataaaaagcttaaaatcggcgataaaattgtttttttagatcaaattcattacaccattgtgaaaaacacaacttttaatggcataagacttccaaatctcatgtttttagaccgtaaaaatgaacttcaaatgataagagaattttcttataaggattattctttaagaaattagtattatttataatttgcataaaatgttaattttactcggaagagaatcaaagatataaattttatgcaaagtattttattttttcaaatataaaatcaactcaaatatctaattttaatactttggtatgattttttaatattttaaatccttgtggaattttatttaaattcagtgatttttaaatcaaatagtattaagataaatcgatttaaaaatcggctttaaaatgaatattaggtatattttgcataatattcattcaagcaaaatttaaagctatttttgaaaattttgaatgcatgggggctttaatggatttggaaaaattaagattagctagaagtctttattatcaatgtctaggagagctttttgttttttcattttctgaagaaagattgtcaaaattacaagagtatttaaagacaatgcaagaatgtttatttgatgaaaatttaaaatcaaattttgatatcttgcttaagcatttagatgatgaaaattctatacaagcattttttaaagaatatgatttgctttttttaagtcttaaaaatagcattccaacgactttttcttatatagaagaaggttttgaaaattcaaatcctttactttgcgtgcgtcaaattttagtcaaaagtaaaataagacgcaatgaaaaattttttaaagaaagtgaagatagtgttggattttgtttattgttgatgagtgaatttttaaggcaaaatgaagatgatttagccaaagagctttttgaaaaagtgatcaataaaagcattgatgagtttttaggtgatgttttcatgaataaaaatgcgaatttatacaaggaaatttcaagtattgcattggcttttatggaatttgaaagactttgctttgaagtagaaaaacctgcaaaaataaattctaaaaaagtgcaaaacgatctatcgcgttcagaatttttaagaagagaagcaaataaacaaaggaggactcgtgaaaaatcgcagggaatttcttaaaaaatccgcttttgccttaggggctgctggagtgcttggtagcacgactttagctctagctaaagatgaagaaagaaaagatttggttaaaggtaaaagtaagaaaaaagaagtgctttttcaaagaagtgctaattgggaaaattattatataaaggctgagtaatgtcaagtgtaggtgaaaatatcaagcttacgcgtcgttcttttcttaaaatggcagcactttcaagcctagcaacaccgttgcttgctagaagtgaaactttaagagaagcgagtgctgatgagcttaaagaagcgtacgaaggtagtaaaaaagtaaaaacagtttgcacagcctgttctgtaggctgtgggattattgcagaagtgcaaaatggtgtttgggtgcgtcaagaaattgctcaagatcatcctgtgagttcaggtggacattgctgcaagggatctgatatgatcgatatggtgcgttcacatgtgcgtttaaaatatcctatgaaaaaagaaaatggagaatggaaacgcataagttatgagcaagctttaagtgagatcggagaaaaactagctgcttatcgtaaagaaaatcctgaaagtgttatgtttttaggttctgcaaaaatgagcaatgaacaagcttattatgtgcgtaaatttgcagcgttttttggaacgaacaatgtagatcatcaagctagaatttgacacagcgcaacagtcgccggtgtggcgaatacatttggttatggcgctatgacaaaccatcttggagacattcaaagaagtaaatgtatcattatcattggggcaaatccagcggtaaatcaccctgtgggttttagacatttcttaaaagcaaaagaaaaaggcgcaaagcttattgttgtagatcctagatttacaaaaagtgcagctaaggcagatatttatgcaagaattcgtccgggaactgacattgctttcatgtatggaatgctaaaaatcatctttgatgaaggcttagaagatacaaaatatcttgatgaaagagtttttggaatcgataagattcgtgaagaagcagcaaaatggacagctgaagaagtagaaaatgttacgggaatttctaaagaacttttggtgcaaatcactcatgaagtagctaaaaacaaacccactacgcttatttgggctatgggtttaactcaacatactgtaggaacttcaaatacacgtttagcacctattgtacaaatggtacttggaaatataggtaaatttggcggcggagttaatatcttacgcggacacgataatgttcaaggtgcttcagatatggcttgtttaagcgaaaatttgccaggttattatcctttaaatgaagcgacttggagatactatgccaaaatttggggtgtggattatgagtggcttttaggaaattttgtaagtaaagattggatgcataaaactggactttcacttgctagatggtgggcagcggctttaaatggaaaagatggaaatgatgctatcgataatgcaggaacgcctttaaaagctttagtagttatgggaaatggtatcacttcgactgcacaacaagtaaaagttaaagaaggtttggaagctttagagcttttagttttagccgatccttttgtaaatgaagcagggattatcgcagaaagaaaagatggaatttatcttttacctgcagcaacacagtttgaaacaagtggaagtgtaacagctacaaatcgtagtgggcaatggagatttaaagttgtagatccactttatgaaagtatggaagatcaagaaattttatttgagcttgctaaaaaattaggcttttatgaagactttaccaagactttacgcgatgaaaaaggtgagatcgtttggcctgaaaatgcaacaagggaaattgcaaaagcagttagaagtataggacttaatggttggagtcctgaaaggcttaaaaagcatactttatactgggataaatttgatgaggtaactttagaaggaaaagacgaggttgctggtgagtattatgggcttccttggccttgttggagtgataagcatccaggttctcctgtactttataataccgacattgaagttgcaaaaggtggtatgggctttagaaataattttggactcgagtatgaaggagagagtttgcttgctaaaaatgcacctttaaattcgcctattaatacaggttatccaca

SEQ ID NO: 3787 - DNA, 22954 bp, synthetic construct
  source 1..22954: mol_type = other DNA
  misc_feature 1..22954: note = Synthetic
agtaacggctgatggtgcttttcgtcgtggcaaaccttatatgttaaaacctgcagtagataaggctttaagtgaagggtgtgaaagtgtagaaaaagtacttatagttatacgcaataatgagcctatagaatatattaaaggaagggactatgtttataacgaacttgtgaaaaatgagtcttataagtgtgaacccgaaattatggatagtgaggatttgttgtttttgctttacacttcaggatcaacaggcaagccaaaaggagttatgcatgcaagtgcaggatatatactttgggcacaaatgactatggaatgggtttttgatattaaagattatgataattattggtgtagtgctgatgtgggttggattacaggacatacttatgtagtttatgggcctttagcatgtggagcaacgactataatgcatgaaggaactcctacttatccaaattctgggcgttggtggagaatgatagaagagtatcaaataagcaaattctacacttcgccaactgccataagaatgcttcatgctgatgcacctaatgagccaagaaaatatgatttaagtacgcttgaagtgcttggaacggttggagagcctatcaatcctagtgcttggaagtggttttatgatgaaatagggggaactaaaagtcctatagtcgatacttggtggcaaacagaaacaggtgggcatatgatcacgcctttaccaggcgccactcctttaaaaccaggttgtgccaccttgcctttgccagggatttttgcagaagttattgatgaagaaggcaataaaaaagatgaaggtgaagatgggttgctttgtataactaaaccttggccttcgatgattcgtggaatttggggcaatgatgaacgctatatagaaagttatttttctcaagctaaaaaagatggaaaagctgtatattttagtggcgatggtgctttttatgataaaaatggttatattaccatcacaggaagaacagatgatgtggttaatgttgcaggacatcgtataggaacggctgaaattgaaagcgctattgctaaacatccaagtgtagcagaatcagctgtagtgagtattttggatacgattaagggcgagtcattgtttgcttttgtggttttaagtcctgcatccagttgtgatcttggcggagctatagaaactttaaaagaacttaatgacattttaagagtagaaataggacctatagctaaaatagaaaaaattctttatactccagatttgccaaaaactagaagtggtaaaataatgagaagaattttaagaactatagcaagaggtgaagaaatcaaacaggatatttcaacacttgaagattctaaagtagtagaaaccattgttaaattagctaaggcagagtttgaataacaaggtaaaaagaactttgcctagttgcatgaaaattcataaaaataagctataatgataaaaaaataaaaggaaatttttatgcttcaaacttgtattttccctgcggcaggttatgggacgagatttttacctgcaacaaaaactttacctaaagagatgttacctatcttaaccaagcctttgatccattatggagttgatgaagctttagaagcaggaatggaaaatatgggatttgtcacagggcgtggaaaaagagctttggaggattattttgatatttcttatgaacttgaacatcaaatttcaggtacaaaaaaagaatacttacttgatgaaattcgctctttgatcaatcgttgcacctttacttttacaagacaaaatcaaatgaaaggtttaggtgatgcggttttaaaaggtagacctttggttggcgatgaagcttttggcgtaattttagctgatgatttgtgtgtcaatgaagaaggcttaaatgttatggctcaaatggtaaaaatttatgaaaaatatcgctgcaccatcatagctgtgatggaagtaccaaaagagcaagtttcaaactatggagtaatttctggaaattttgtagaagaaaatcttatcatggttaattctatgatagaaaaaccaagtcctgatgaagctccaagtaatcttgctatcataggaagatatattttaactcctgatatttttggaattttagaaaatactaaagcgggaaaaaatggtgaagtccaacttaccgacgcgcttttaactcaagcaaccaatggtatggttttagcttataaatttcaaggaaaacgctttgattgtggaagtgtagaaggctttgtagaagcgacaaattatttttacgagaaaagtaaatgttaaacaatacacttttttttaagcaaagtgaaattcacactataagttcttatgcaaatcgtattaatgatgaggtaaaaagtggagatatagggtattatcatcttattgatacaagtttgaatttaatcgatgagagtttggcttttatcaaagacaaagaacacataaaaaatatcgttttagtgggaatgggtggttcaagttgtggtgtaaaagccttgcgtgatatgctttttaatgaaaaaagcaaccaaagagaactttttatactcgataacacaagttcacattcttttaataagactttagaaaaaatcaagcttgaggaaagtttgtttttaatcatcagcaaaacaggtagtactatagaagttgtatcgctttttaaacttcttattgaacattttaaacttgatatgcaagaattaaaaaaatactttgtttttattaccgataaggattcaaaacttcatcaagaaggtgaaaatttaggtattaaatgcttttttatccctgcaaatgtaggaggtcgttttagcatactttcagccgtaggtatagttccgctttgtttttgtggctataatgccaaagctcttttagaaggagctaaagcttgttttgaagatttttttactcataaaaaagatgaaattttacaaaaagcctatcattattgcacacacaaaaatgccaatatcaatgtacttttttcatatagtgatgcttttaaaggctttaatgaatggtatatccagcttattgctgaaagtttaggtaaaaagcaaggctataaacgtataggtttaactcctattgcactcattggagcaagagatcagcatagttttttacaactcattatggatggacctaaaaataaaactgtaacttttttaaaaatcaaagacgctcaaaaagcacctattatccctgatattcattttaaatttttagattctttaagtaataaagtcaatcttcacgaacttttaaacgctcaatgtaatgcaactatgcacgctttaatcgctgaaaatttgagcgttgatgtgatagaacttgaaaaacttgatgcttggcatgcgggatatttgatgtattattatgaactttttacttcaacttgcggtgttatgctagggattaacacctatgatcaacctggtgtggaagttggaaagttgatcttaaaaaatatattaaattcttaatcaaaattcattaaaaaagagtataataattttaagttaaaattataataaaaatttttaattaataataattattatttaagaattttatgttataattttaaaaattaaaaaaaggagtcaatcatgtcagttacaaaacaattattacaaatgcaagcagatgctcatcatctatgggttaaatttcataattatcactggaatgtaaaaggtttgcaatttttttctatacacgagtacacagaaaaagcttatgaagaaatggcagaactttttgatagttgtgctgaaagagttttacaacttggcgaaaaagctatcacttgccaaaaagttttaatggaaaatgcaaaaagtccaaaagttgcaaaagattgctttactccgcttgaagtcatagaactgatcaaacaagattatgaatatcttttagcagaatttaaaaaactcaatgaagcagcagaaaaagaaagtgatactacaacagctgcttttgcacaagaaaatatcgcaaaatatgaaaaaagtctttggatgataggcgctactttacaaggtgcttgcaaaatgtaatttaaggggctttatgccccaattatacaaactaggttataatatccttttttaaaggataaaattgaaagtacttaattttttttatgaaaaccaccctaaatttgaagtaagttatgaaagaaaaaatcaaatttcaaaaccaaatattatcataaaaggcccacgattttgtggtaaaaaaacacttatttttaattttttatctcaatttaaagcaagtgaaattttgtttttagatttatatgatacacgctttgaaaaacaaagtttagaaagacttgctgattttctgaatgaaaatttacaaattaaaattctttgcctttataatttggattttatccctaatttagaaaaaattaacattcccatcatcttaagtacaaatataaaagatttaaatgtaaatgggtttgaagagcttgaacttgattattttgattttgaagaatttattagtgtaagtaagaaaaatttacctataaataatttagtaggtctttttttgcaaagtggacgcagtaaatttggagaaaaaaacatacttctaagacaaagctttactcttttagaattagaaattttaaagtatttagctttaaatttgggtcagcaaatcagtatttctaagatatttatagaactcaaaaaaagattaaaaacttcaaaagatagtgtttatcaagctatcaaaaaattagaaaatacttatgtgatttataccttaaaacatgatgaaaaaaaacttcaaaagatttattttaaagattttggcctaagaaataatctttgtatttcaaaggatttttcacatttatttgaaaatttagttttaagcgagttgtttaaatttaaagaagaatttttttataacaaatactttaacttttatagccaaatatctaaaattgcttatatttcaagtccaactttagatattgatttgattaaattacgtgctaagaaaattttaccaaaggctttagaacttggaatttttcatgtgatttttatcactctttcaagcgaggatagtttttttgagcaaggggttaaatttgaagtcatatcttttgataaattttcacttggattttaggtgttgtttgagtttgtatcgtatttttcaaggttgtatcgtttgatgatttttgtaataagattgatataatatcccttgcgttcagaataagaatctaaagttttaatagcctctagtcctgttatctctttgccttcgcttgcaaatttagctcttgcatcgcgaaacttttcataagcaaaatgacgatttaaatttaaaacataagagtaaacactatcttgcagactatcaaaaatcttaattttatgttttttatctggatgtcttaaatcaggaattaaacctttctcaccccaagtccattctccaaaaagattgtttgcttctcttgcgaagcgactggtacctgtagcactttcaactaaagcttgggctatacccatggattttggaattttttgaatacgttttttatattctgcaaaatcataaagattttcaatacgatatttgttttttatcatgataagtttttcaagatttatttggtttgaagtcctaaagcctgttttgtaagcatctttaaaaaaggcttcgataaaagctctttcttgttcaatttttttaaagctttgatcaaacatttcattcatttttataaaaaaaatttgtcttttttgatctatatcaagtttgtaatattcttctccaaatccactctttagatcatcagcaaaaagtgggattagaaaaagactaagaaaaattataattggcttcaaaacaatactttacctttccttcaaaaaacaattcttcatttttatatgcaaaccctacctcttcaccacttttaggagttattttaactttattttgtacttttttatttaaaaatgccagataaaaacaagcccccattcctgtgccgcaagctaaggtttcatcttcaactccgcgttcataggtgcgaacttttaaatgattttcatctaaaatttttacaaaattaacattggcattatatttttgtctcattttttgacaaagcattgtatcaaattcatctaaattttgacaaaaatgtactagatgtggaactccagtgttgcaaagttgccaagtttttcctaattcttcaaaagtattttgcacgctttttattttgcctaaagatacttcaactttatcttgatttacctttgcttttattactcctgcaccggttaaaaaactcatgttaggatttattttgttaatatgatgtgcaaaatgtgccgcagcccttgagccattgccacacatagcagcccttgagccatcgttattataaaattcccattcaaagtcgtatttttcatgaggcaatatcacgataaagccatccccacctatgccctcataacgattgcaaagttctttagctaaagcacttctatcttcttttctatcagcatttgttatgacaaaatcattcccacttgcacaatatttataaaatttcacatttttcctttagaaatttcttgtattactttaacacattcttgcctaaaatcgacataagaattagtatttttaatgataaaatctgcttttttaagtttttcttcaatatctatttgagaatcaagtctcacttttgcagcttctaagctgagcttatctctttgcatgattcttttaaggcttaattctttaggtgtgtaaattacaatgactttgcctaaattttcataagcaccgctttcaaaaaaaagaggaatttctacaaaaaaagctttattttctttatctagaatttgcatttgttctaaaattttagctcgaattttaggatgagtgaaattttctaaggtttttttagcttctttgttgttaaaaacaatttctccaaggatttttctatcgattttcttttcttttgtgagtaaattttttaagttaaagggagaaaaaatcttttcaagttctaaagcattttcatctaaaattttatgagcaattttatctgcgctaatgcttttaaagcctaaagaattcgctatttctataaaagtgcttttaccacaagcaattgaagcggttacaaaaaaagcatttttcatcttatgccttattaaaacttttttcgttaaaatacctttttagttcttaaaggaaaataaatgaaaatttcatatgaagatgcaggcgtaagtatagataatggaaatgcctttgtagaggctataaaacctttggttaaagaaacttttaatgataatgttgtaggcggaattggttcttttgctggtgcttttagaatgccaagcggttttaaaaagcctgtgattttaggtgcaacagatggagttggtaccaagcttcgcttggcaattgatgctaaaaaatatgatactataggacaagatttagtagcaatgtgcgtgaatgatttgatttgtaattttgctacgcctttgttttttctagattattatgctacagctaaacttgaagtagaagtagcaaaggctgttgtatcaggcattgccaagggatgtaagatggcaaattgtgcattaatcggcggagaaactgctgaaatgcctggaatgtatgcaaaagatgattttgatcttgcgggttttgcagtgggtatggctgaagaagatgagatcgatagaagtaaatttgttaaaaatggtgatattttattggcacttcctagttcaggacttcattcaaatggttattctttagctagaaaagtactttttgaaagtttaaaattaaaatttgatgacaagatagagggtaaaaatttaattgatattttattagaacctacaaggatttatgtgcgtgattttcttacactaaagccttatatcagtgctctagctcatattacagggggtggtttagtagaaaatttaccacgcgttttacctcgtggtatgggtgcaactatacgcaaacatcatcttaaaactcctgaaattttttatactataggacaggttgtagaagaaagcgaaatgtatagaagctttaacatgggagtaggtttagtagtggttgtagatccttctaatgtaagtaaggttttagaaaattcagatgcctttattattggcgaaatttgcattaatgaaggtattgttttagaatgaaaataaagcgtcaatacgctttatttttgtattttaagttctatttttgtagtgttttgttcttttggcaaaggatggtttgtgctagataaaaggctacaagtacatttacaagcatagcgataagtaaaagaggagtggttcgttttataatatccattggagctacttttgcaaatccagctaaagctatgattccgcctgctattggtgaagctgcacgacctaaacaagatgcaatttctataggtaaaactagagtaataggtgcaacgcctaattttgtagctatatcaggagctagttttccaaaagcattaaaagcggcaattccacttcccataatcactgtggcaaaataaactaaaaagcttaaaatagctatactcaaaagaattccaaaccatgcaaaatttcctgttccaagacttgaaaccgcgttggcaaggatattaactccaccaagtgctttaatgccttcagcaaatactccagcggcgatgattatgcttacgactgagataaaaatttcagccatagcttttaaaatcaccatcatatcttcgcctaattttctagcatttctatgtcttgcaaattcaacaagaaaaactaaagaaatgcttacaaaatttgctgttacaacatcgagcttgatagtaaaaaaatacgctgtaaataaaaatacaacaggtaaccaaggaaagagtatgtaaaaaagtagggcatttaggatcaatgatttgcggaatttcaacttcatcatttaaaacacctttttctttatctcttttatcaatccaagcaaaataaaaaggaatcaagatggcaataactacaacataggcaatcacactataaatttggtaatttaaaaaaagccctacgacattatcactttgtcctaccatatctgccatattgattgaatttccatcttttggatcataatcaagtgcaattaaagaaagcgcacatacagttgtaataggacggattttaagtgagattaaaacaggataaatacatgctaacaaaagcaatccagcatagctagaaatgacgatttttaaagccattccaataacaaaagttccacttaaaattaagtatttattttttgatttttcctgagggtttatttgctaaaaaagcaagttttgccgaagcattgatatgtttcatgtaagcagtaaagcctgccacactcatgataataagccctgctccagaaagctgacttttaaaagtcgctgtgataaaagataactatcaagtaaaacatttaaaagcttgtatactctctgcttggagcttttggtataggtgttcctgtgatataaaaagcaaaaataagcaagataatatttgaaagaaaaaatacaaaaataggattgtattttttaagtatataataagcaacggcaattaccgctaaaagtgtagaacatatcataaaaattggcatgatttctcctaaagttattattagcttttattttattttagctaaaatttaactaataaatatttttcatttaaaattttacttattttttacattataaaattaataatatgtatagtttggttactgaaaagtttatgtttgtttaaaaaaatgatttttgtattataattatacacaaatcataaatattaaaaaggatctagtgtggcaagaattttggcatttgatataggaataagctctattggctgggcatttagtgaaaatgatgagttaaaagattgtggagttaggatttttacaaaggctgaaaatcccaaaacaggagaatccttagccttgccaagacgccttgcaagaagtgctagaaaacgccttgctagacgcaaagcaaggctaaatcacttaaaacatttaatcgcaaatgaatttaagttaaattacgaagattatcaaagctttgatgaaagtttagccaaggcttataaaggatctttaattagcccttatgagttaagatttagagctttaaacgagcttttaagtaagcaagattttgcaagagtgattttacatattgcaaaaaggcgtggctatgatgatattaaaaatagtgatgataaagaaaaaggtgcgattttaaaagctatcaagcaaaatgaagaaaaactagcaaattatcaaagtgtgggcgagtatctttataaagagtattttcaaaaattcaaagaaaattccaaagaatttacaaatgttagaaataaaaaagaaagttatgaacgctgcatagcgcaaagttttttaaaagatgaattaaagcttatttttaaaaaacaaagagaatttggcttttctttttcaaaaaaatttgaagaagaggtgcttagtgtagcattttataaaagggctttaaaagatttttctcatttggtgggaaattgtagtttttttaccgatgaaaaaagagcgccaaaaaattcgcccttagcttttatgtttgtagcacttacaagaattatcaatcttttaaacaatcttaaaaatactgaaggaattttatatacaaaagatgatttaaacacgcttttgaatgaagttttaaaaaacggcactctaacttataaacaaacaaaaaagcttttgggcttaagcgatgattatgaatttaaaggggaaaaaggaacttattttattgagtttaaaaaatataaagaatttataaaagccctaggtgagcataatttaagccaagatgatttaaatgaaatagcaaaagatattacccttataaaagatgagattaaacttaaaaaggctttagcaaaatatgatttaaatcaaaatcaaattgatagtttaagcaaattggaatttaaagaccatttaaatataagttttaaagccttaaaacttatcactcctttaatgcttgaaggtaaaaaatacgatgaagcttgtaatgagcttaatttaaaagtagcaatcaatgaagataaaaaagattttttacccgcatttaatgaaacttattataaagatgaggtaactaatcctgtggttttaagggcgattaaagaatacagaaaggtcttaaatgctttacttaaaaaatacggcaaagtgcataaaataaacattgaattagcaagagaagtaggtaaaaattacagccaaagagctaaaatagaaaaagagcaaaatgaaaactacaaggccaaaaaagacgccgaacttgaatgtgaaaaactaggcttaaaaataaatagcaaaaatattttaaaattaagattatttaaagaacaaaaagaattttgtgcttatagtggagaaaagattaaaattagtgatttgcaagatgaaaaaatgcttgaaattgaccatatttacccttattctagaagttttgatgattcttatatgaataaggttttagtttttaccaagcaaaatcaagaaaagcttaataaaaccccatttgaagcctttggcaatgatagtacaaaatggcagaaaattgaagttttggcaaaaaatttacctgaaaaaagcaaaaaagaattttagataaaaactataaagacaaagagcaaaaagactttaaagatagaaatctaaacgatactcgctacatcgcaaggcttgttttaaactacactaaagattatttagattttttacctttaagcgatgatgaaaatacaaagttaaacgacacacaaaaaggctcaaaagtgcatgtagaagcaaaaagcggtatgcttacatcggctttaagacacacttggggctttagcgctaaggatagaaataaccatcttcatcacgccatcgatgcagtaattattgcttatgcaaacaactctatcgtaaaggctttttcagattttaaaaaagagcaagaaagcaacagtgcagaactttatgcaaaaaaaattagtgaattagattataaaaacaaaaggaagttttttgagccttttagtggttttaggcaaaaggttttagataaaattgatgaaatttttgtctcaaaacctgagagaaaaaagccaagcggagctttacatgaagaaacatttagaaaagaagaagaattctatcaatcatacggcggaaaagaaggagttttaaaagccctagagcttggtaaaatccgcaaagtaaatggtaaaatagttaaaaatggcgatatgtttagagtggatatttttaaacacaaaaagacaaataaattttatgctgtgccaatttatactatggattttgctttaaaagtattaccaaataaagctgtagcacgaagtaaaaaaggtgagataaaagactggattttaatggatgaaaattatgagttttgcttttctttatacaaagatagtttgattttaattcaaactaaagatatgcaagagccagaatttgtttattataatgcttttacaagctctactgttagtttgattgtttcaaaacacgataataaatttgaaacgctaagcaaaaatcaaaaaatattgtttaaaaatgcaaatgaaaaagaagtaatcgcaaaaagcataggaattcaaaatctaaaagtatttgaaaaatacatagtttcagcacttggggaagttacaaaggctgagtttagacaaagagaagattttaaaaaatgagttacgatgaagcttttaaaacactgcttattagctctaatgccaagctaaatttagagctaaatcatcttgtgattaagcaagatgaaaatatagccaaattgtttttaaaagatataaatatcatcgttttagaaagcttacaagtaagcattagttccgcactttttaacgcttttgcaaggcataaaatcatcttgctaacctgcgatgaaactcatagtataaatggtgtttttactccttttttagggcattttcaaagtgcaaaaatcgcaaaagagcaaatgaatgtaagtgctcaaaaaaaggctattttatggcaaaaaatcattaaaaataaaatcctaaatcaagcctttatcttaaaaaaatacaataaaatagagcaaagcaatgagcttataaatttggctaaaaaagtaagcttaaatgatagtaaaaatattgaagctgttgcggcggcgctttattttaaaactttgtttgggacttctttttcaagagatgagctttgctttgaaaattctgctttaaattatggctatgcaatcattagggcttgtattattagagcagtttgtataagtgggcttttgccttggcttggcattaagcacgataatatttataattcttttgcgctttgtgatgatttgatagaagtgtttagggctagtgttgatgattgtgttttaaagcttaagggtgaaagtgagtttttaagcaaagatgacaaaagagcgttgattggcaatttacaaagcaaaatcaattttgatgggcaaaattatcctttaaacagagcgataaatcattatgtggcaaattttaaaaatgctttattgtatgaagatgaactaaagatagtgaaatttgatgattgaagataaatttatgcgcgtgcttttgatgtttgatgtacctactaaaagtaaaaaagagcaaaaactagcaagtaaatttagaaacaatcttataaaattaggttattttatgctgcaatttagcgtttatatgcgtatttgcaagggtttaagttctgcaaaaagttctattgaaaatgtaaaaaagattttgccaccttatggaaatgtaagggctttaatcatcactgaaaagcaatttgataaaatggagcttttgcttggtggcatagtttttaatgaaaaagttaataacgaaaccaatttaacactttttgatatagatagtcatggagaatttaaatacaaaaattcaaataatgaagaaattcaaataaacaaaaaacaagaaaaatatcatcagcaaaatttatttgaattttaaaagcggttttaggggattgtaaccccgcagagtcccgcaaactctttattttagtccctttttaaatttcttatgagattatagcataatttttgctatttttcatgaaaaaaccccgaaattttcattatctggtaaatatctattttaccataaagaaatttaaaaagggactaaaataagtttataacttatatatataattataatattttaccataaagaaatttaaaaagggactaaaataataatggctaaatatttcatgagaatggaattttaccataaagaaatttaaaaagggactaaaataaaccctagtggattgaaactccgctagggctaattactccactaaaaggaggttgcgaatttgaaacttattgaaatttagggttgattaaaatcgaaataaaattatttaaataattttaaggcataaagataatatccactaaactttcattttctaaaatttcacattcttttggcgccaccataagggcagctttattgttaagattgtttataatcgcactagagccttcttttttgccttcaagattggctaaaatgcgtccattttcaaactttatgttacaagcgacaaattccaaataaggtgtttttttcttgtaacttccttgtaaaaaggctttgcaaatatagtctttaggctgaagtaaccaagagtttaaaatctctcttgcgtaaagattaaacattaccatagccgagtaaggaaaacctggtaaggcgatgatgaatttttcattagccttagctattttgatatgtctacctggttttatgtcggctttatcgatgatgatttcgtattctttgatggctttttttaaaaagtcaaaatctcccatagaaaccccgcccgttgtaaccaaaatatcacaactttgcaaagcactttcaagggtggaaaaagtggctttctcatcatcttttaaaagaggaaaaacccttgtatcgcaatttaaatttttagctaaattagctatggcgatatgatttgaagagcggatttgagcaggattttccaaggcttctcctagatctttgatctcacttccgctacttaaaacccctacaataggctttataaacacaccaatgtgaaaaaatccaagttcagccaaaagagctatctcgctataatttaactttgtgccttttttgagtaaaatttcatcttttttatagttttctcctaccgcacgcacggcaaaagcttggggaacttttttttctataaaaagagtatcattttctatgcgtatattttcaacagggactaaagtatcgcttccttcgctcatgagtgagcctgtaaaggtttttacacaagtgccattttgtacgctaaattgtggcatagtgcccgcaggtgtgaggcctaaaatttttaaaggcttgtcttgatcttcaaatttgatcgcataaccatccatagccgaggttggaaattcaggctgatttttaggggcttttatgtcttgagctaaaatgcgtcctaaacactctgtaagagctattttttcaatcttttcataggttttgatatgagagtgtaaaatttttaaactttcttcataagacattagcatctttattccttcatactgatataaatttgagtcttgtttgttgtataaaattcaaaatctgtgtcaaattttctttggagacttgaatttttaaaaaattcattgatattttgccaaagttttggggcaatgatttcaggttttccagagtcttcaaaaagcatgtatttgccaccttttatacaaattttttcgcctttttcgtgaggatttttcatacccacacaaattttatactctaacttgtgagtgtttttataatcataatacacgctataaatttcatcgggcgcaccaaagatgctatgaaattttttccacaaaggaaaaattaaagagctgtttaaatcgctctcaagttcctcatcagttttaacgcttactccataaatactaaattcttctatttcttgtatcattttaaaagtcctgcaccgcaaagtttggttgatctttctttggcataaattctttctttgtttatcacatcatacttccaaatgggtgcacttgctttaaaatcttcaacaaattcattaagaagtttaagtcctaattttctttgtttgcttaaaattcctgcaaaataagagctttcatgaaccgccacatcgcctatagagtgagcaaaaagcaagctaataccatcaaaatctactcttttttgccactcatcaaaccatttttttaaaagcggttcataaatatcaaaactaagtgcctcaatacctccttcttcacgcacaataccacaaaaagtcagtaaagcaccgcagtttttatccttggaaaattcataccattggctataaattttaggaatatctaaagaaccttgataaagtgtaaaatgtttcatttagcctccacaaactggcggtaaaagtgctattttatcaccatcttttaacttggtgttttcatcaaaaatgatttcatcatttaaagatacagcacaaagttctagccattcttttaaactctcatctttttgcaaaatttcttttaattcttttaaattttttacttcaagttctaaattttctttatttatagggcctaaaaattccacttttaccattttattcctttacttctaaatttcccatcattcctaaatcttcatgttctaaaatatggcaatgatacattctaagtcctttaaaatcttgtttcattctaagtcttaactcttcattaggacgcacatttatagtatctctgaaggctctaaattcggctttttgaactttgccattgagttttgatgagatgagttcaaattgcgtgccgtgtatgtggaaaggatgatccatgtgagatttatttatcactatccagtcttcaactactccaagcttggagcttaaatcaatgcgttttaaatcatagcttttgccattgattaaaaacatagacgcaagagcgatttttaattcattttcactttttcccatcattccatgcatttgcatatgatcttcactcatgattatttctttaaattccttaggttcttctaaaggtttgaaaatttttaaattttttggaagttctaatttttctttttttaggctaatactagctaaaaatagggtattaggttcttcttctaccatcattttatccctatcataataagcactttctagtctaaattccccatcttttggagcgtcgattaaaacttctacacgagaagcaggacttaagaaaagttcttctttataaatagctttttctataagtccaccatcagtaccaacaagtataaacttagctccttgtatgcgtaaatttaaatatcttgctgcagtagcattataaatgcgtatgcgttcgtttgtggcgagtttgattttaggtttgaattgtccattgatgagtacaaattctccttctctaccattaagccaatcatttaggttgttgtttggaatttgagcgttttcatcaagacgcaaatcgctaatcatcaaatctttttcttttaaatgacttaaagcatctttttttgctttgatcacaaaagcccctgctaaacccataaaaacttgtttagaagccgtataatgaggatgtggatgataccagtaagttcctgcgctatcttgaggaatttcaaaacgatatattctttcttctcctgctaagataggatcatgtgggcttccatcttgatcaggtggcacaggaacgccatgccaatgtatagttgtagcttctttgagtttgtttttgactaaaatttcaagtttatctccttcaaaaacttctatttttggagcaggcacgaggccattgtaagtataaaataaggtttttttacctttgataagctctatatgattttctttgatttctagggtagcacgaaaaatatttttttctttactttcatttttgagtaaaggcaaggcttttaaaatttctccttgggggaattgttttggatctaaaagctttaaattttttggagcaaagtttataaaagaagtatctaagtcatgatttatagaatgatttttatgcatggagtgcatatcgtgcataggatttgcataggctacacccatacttgctagagtaagtgcattaaattttaaaaaatttcttctattcattagtttttccttttgcttgattttttgtattatagtcattatttttttagttttagtaaatatttatgaaaatttggtttaattttgttatgattttagcaatttaatcaaggaaaaataatgttttatgaaaaaattcaaactccagcttatattttagaagaagataaattaagaaaaaactgtgagcttttagcaagtgttggtgaaaaaagtggtgctaaagtgcttttagctttaaaaggttttgctttttcaggagcgatgaaaattgttggagaatacctaaaaggttgtacttgtagcggactttgggaagcaaaatttgctaaagaatacatggataaagaaattcatacttattcacctgcttttaaagaagatgaaataggtgaaatagccagtttatctcatcatatagtgtttaattctttagctcaatttcataaatttcaaagcaaaacacaaaaaaattccttaggtcttcgttgtaatgttgaattttctctagccccaaaagaactttacaatccttgtggaagatactcaagacttggaattcgtgctaaagattttgaaaatgtggatttaaatgctatagaaggacttcattttcacgcactttgcgaagaaagtgctgatgctttagaggctgttttaaaggcttttgaggagaaatttggtaaatggatagggcaaatgaaatgggtgaattttggaggaggacatcacatcaccaaaaaaggctatgatgttgaaaaacttattgctttgtgtaaaaatttcagcgataaatatggtgtacaagtttatcttgaaccaggtgaagcagtgggttggcaaacaggaaatttggttgctagtgtagtagatatcatagaaaatgaaaaacaaattgctattttagatacttcaagcgaagcacatatgccagatactatcatcatgccttatacaagtgaagttttaaatgctagaattttagccacgagagaaaatgaaaaaatttcagacttaaaagaaaacgaattttcctatttgctaaccggaaatacttgtttagcaggtgatgtaatgggagaatatgcctttgataaaaagcttaaaatcggcgataaaattgtttttttagatcaaattcattacaccattgtgaaaaacacaacttttaatggtataagacttccaaatctcatgcttttaaatgcaaaaaatgaacttcaaatgataagagaattttcttataaggattattctttaagaaattagtattatttataatttgcataaaatgttaattttatttggaagagaatcaaagatataaattttatgcaaagtattttattttttcaaatataaaatcaactcaaatatctaattttcaatactttggtatgatttttttaagattttaaatccttgtggaattttattgaaattcagtgatttttaaatcaaatagtattaagataaatcgatttaaaaatcggctttaaaatgaatattaggtatattttgcataatattcattcaagcaaaatttaaagctatttttgaaaattttgaatgcatgggggctttaatggatttggaaaaattaagattagctagaagtctttattatcaatgtctaggagagctttttgttttttcattttctgaagaaagattgtcaaaattacaagagtatttaaagacaatgcaagaatgtttatttgatgaaaatttaaaatcaaattttgatatcttgcttaagcatttagatgatgaaaattctatacaagcattttttaaagaatatgatttgctttttttaagtcttaaaaatagcattccaacgactttttcttacatagaagaaggttttgaaaattcaaatcctttactttgcgtgcgtcaaattttagtcaaaagtaaaataagacgcaatgaaaaattttttaaagaaagtgaagatagtgttggattttgtttattgttgatgagtgaatttttaaggcaaaatgaagatgatttagccaaagagctttttgaaaaagtgatcaataaaagcattgatgagtttttaggcgatgttttcatgaataaaaatgcgaatttatataaggaaattgcaagtattgcatcggcttttatggaatttgaaagactttgctttgaagtggaaaaacctgcaaaaataaattctaaaaaagtgcaaaacgatctatcgcgttcagaatttttaagaagagaagcaaataaacaaaggaggactcgtgaaaaatcgcagggaatttcttaaaaaatctgcttttgccttaggggctgctggagtgcttggtagcacgactttagctctagctaaagatgaagaaagaaaagatttggttaaaggtaaaagtaagaaaaaagaagtgctttttcaaagaagtgctaattgggaaaaatattatataaaggctgagtaatgtcaagtgtaggtgaaaatatcaagcttacgcgtcgttcttttcttaaaatggcagcactttcaagcctagcaacaccgttgcttgctagaagtgaaactttaagagaagcgagtgctgatgagcttaaagaagcgtatgaaggtagtaaaaaagtaaaaacagtttgtacagcctgttctgtaggctgtgggattattgcagaagtgcaaaaaggtgtttgggtgcgtcaagaaattgctcaagatcatcctgtgagttcaggtggacattgctgcaagggatctgatatgatcgatatggtgcgttcacatgtgcgtttaaaatatcctatgaaaaaagaaaatggagaatggaaacgcataagttatgagcaagctttaagtgagatcggagaaaaactagctgcttatcgtaaagaaaatcctgaaagtgttatgtttttaggttctgcaaaacttaataatgaacaagcttattatataagaaaatttgcagcattttttggaacgaacaatgtagatcatcaagctagaatttgacacagcgcaacagtcgccggtgtggcgaatacatttggttatggcgctatgacaaaccatcttggagacattcaaagaagtaaatgtatcattatcattggggcaaatccagcggtaaatcatcctgtgggttttagacatttcttaaaagcaaaagaaaaaggtgcaaagcttatcgttgtagatcctagatttacaaaaagtgcggcaaaagcggatatttatgcaagaattcgtccaggaaccgacattgctttcatgtatggaatgctaaaaatcatctttgatgaaggcttagaagatacaaaatatcttgatgaaagagtttttggaatcgataaaattcgcgaagaagcagcaaaatggacagccgaagaagtagaaaatgttacagggatctctaaagaacttttggtgcaaatcactcacgaagtagctaaaaacaaaccaactacgcttatttgggctatgggtttaactcaacacactgtaggaacttcaaatacacgtttagcacctattgtgcaaatggtgcttggaaatataggtaaatttggtggtggagttaatatcttacgcggacacgataatgttcaaggtgcttcagatatggcttgtttgagcgaaaatttaccaggttattatcctttaaatgaagcgacttggagatactatgccaaaatttggggtgtggattatgagtggcttttaggaaattttgtaagcaaagattggatgcataaaactgggctttcacttgctagatggtgggcagcggctttaaatggaaaagatggaaatgatgctatcgataatgcaggaacgcctttaaaagctttagtagttatgggaaatggtattacttcgactgcacaacaagtaaaagttaaagaaggtttggaagctttagagcttttagttttagccgatccttttgtaaatgaagcagggattattgcagaaagaaaagatggaatttatcttttacctgcagcaacacagtttgaaacaagcggaagtgtaacagcaacaaatcgtagcggacaatggagatttaaagttgtagatccactttatgaaagcatggaagatcaagaaattttatttgagcttgctaaaaaattaggtttttatgaagactttaccaagactttacgcgatgaaaaaggtgagattgtttggcctgaaaatgcaacaagagaaattgcaaaagcagttagaagtatagggcttaatggttggagtcctgaaaggcttaaaaagcatactttatactgggataaatttgatgaggtaactttagaaggaaaagacgaagttgctggcgaatattacgggcttccttggccttgttggagtgataagcacccaggttctcctgtgctttataataccgacattgaagtagcaaaaggtggtatgggctttagaaacaattttggacttga

SEQ ID NO: 3788 - DNA, 22954 bp, synthetic construct
  misc_feature 1..22954: note = Synthetic
  source 1..22954: mol_type = other DNA
aaacttgtattttccctgcggcaggttatgggacgagatttttacctgcaacaaaaactttacctaaagagatgttacctatcttaaccaagcctttgatccattatggagttgatgaagctttagaagcaggaatggaaaatatgggatttgtcacagggcgtggaaaaagagctttggaggattattttgatatttcttatgaacttgaacatcaaatttcaggtacaaaaaaagaatacttacttgatgaaattcgctctttgatcaatcgttgtacctttacttttacaagacaaaatcaaatgaaaggcttaggtgatgcggttttaaaaggtagacctttggttggcgatgaagcttttggcgtaattttggctgatgatttgtgtgttaatgaagaaggcttaaatgttatggctcaaatggtaaaaatttatgaaaaatatcgctgcaccatcatagctgtgatggaagtaccaaaagagcaagtttcaaactatggagtaatttctggaaattttgtagaagaaaatcttatcatggttaattctatgatagaaaaaccaagtcctgatgaagctccaagtaatcttgctatcataggaagatatattttaactcctgatatttttggaattttagaaaatactaaagcgggaaaaaatggtgaagtccaacttactgacgcgcttttaactcaagcaaccaatggtatggttttagcttataaatttcaaggaaaacgctttgattgtggaagtgtagaaggctttgtagaagcgacaaattatttttacgagaaaagtaaatgttaaacaatacacttttttttaagcaaagtgaaattcacactataagttcttatgcaaatcgtattaatgatgaggtaaaaagtggagatatagggtattatcatcttattgatacaagtttgaatttaatcgatgagagtttggcttttatcaaagacaaagaacacataaaaaatatcgttttagtgggaatgggtggttcaagttgtggtgtaaaagccttgcgtgatatgctttttaatgaaaaaagcaaccaaagagaactttttatactcgataacacaagttcacattcttttaataagactttagaaaaaatcaagcttgaggaaagtttgtttttaatcatcagcaaaacaggtagtactatagaagttgtatcgctttttaaacttcttattgaacattttaaacttgatatgcaagaattaaaaaaatactttgtttttattaccgataaggattcaaaacttcatcaagaaggtgaaaatttaggtattaaatgcttttttatccctgcaaatgtaggaggtcgttttagcatactttcagccgtaggtatagttccgctttgtttttgtggctataatgccaaagctcttttagaaggagctaaagcttgttttgaagatttttttactcataaaaaagatgaaattttacaaaaagcctatcattattgcacacacaaaaatgccaatatcaatgtacttttttcatatagtgatgcttttaaaggctttaatgaatggtatatccagcttattgctgaaagtttaggtaaaaagcaaggctataaacgtataggtttaactcctattgcactcattggagcaagagatcagcatagttttttacaactcattatggatggacctaaaaataaaactgtaacttttttaaaaatcaaagacgctcaaaaagcacctattatccctgatattcattttaaatttttagattctttaagtaataaagtcaatcttcacgaacttttaaacgctcaatgtaatgcaactatgcacgctttaatcgctgaaaatttgagtgttgatgtgatagaacttgaaaaacttgatgcttggcatgcgggatatttgatgtattattatgaactttttacttcaacttgcggtgttatgctagggattaacacctatgatcaacctggtgtggaagttggaaagttgatcttaaaaaatatattaaattcttaatcaaaattcattaaaaaagagtataataattttaagttaaaattataataaaaatttttaattaataataattattatttaagaattttatgttataattttaaaaattaaaaaaaggagtcaatcatgtcagttacaaaacaattattacaaatgcaagcagatgctcatcatctatgggttaaatttcataattatcactggaatgtaaaaggtttgcaatttttttctatacacgagtacacagaaaaagcttatgaagaaatggcagaactttttgatagttgtgctgaaagagttttacaacttggcgaaaaagctatcacttgccaaaaagttttaatggaaaatgcaaaaagtccaaaagttgcaaaagattgctttactccgcttgaagtcatagaactgatcaaacaagattatgaatatcttttagcagaatttaaaaaactcaatgaagcagcagaaaaagaaagtgataccacaacagctgcttttgcgcaagaaaatattgcaaaatatgaaaaaagtctttggatgataggtgctactttacagggtgcttgcaaaatgtaatttaaggggctttatgccccaattatacaaactaggttataatatccttttttaaaggataaaattgaaagtacttaattttttttatgaaaaccaccctaaatttgaagtaagttatgaaagaaaaaatcaaatttcaaaaccaaatattattataaaaggcccacgattttgtggtaaaaaaacacttatttttaattttttatctcaatttaaagtaagtgaaattttgtttttagatttatatgatacacgctttgaaaaacaaagtttagaaagacttgctgattttctgaatgaaaatttacaaattaaaattctttgcctttataatttggattttatccctaatttagaaaaaattaaaattcccatcatcttaagtacaaatataaaagatttaaatataaatgggtttgaagaacttgaacttgattattttgattttgaagaatttattagtgtaagtaagaaaaatttacctataaataatttagtaggtctttttttgcaaagtggacgcagtaaatttggagaaaaaaacatacttctaagacaaagctttactcttttagaattagaaattttaaagtatttagctttaaatttgggtcagcaaatcagtatttctaagatatttatagaacttaaaaaaatattaaaaacttcaaaagatagtgtttatcaagctataaaaaaattagaaaatacttatgtgatctatactttaaaacatgatgaaaaaaaacttcaaaagatttattttaaagattttggcctaagaaataatctttgtatttcaaaggatttttcgcatttatttgaaaatttagttttaagcgagttgtttaaatttaaagaagattttttttataacaaatactttaacttttatagccaaatatctaaaattgcttatatttcaagtccaactttagatattgatttgattaaattacgtgctaagaaaattttaccaaaggctttagaacttggaatttttcatgtgatttttatcactctttcaagcgaggatagtttttttgagcaaggggttaaatttgaagtcatatcttttgataaattttcacttggattttaggtgttgtttgagtttgtatcgtatttttcaaggttgtatcgtttgatgatttttgtaataagattgatataatatcccttgcgttcagaataagaatctaaagttttaatagcctctagtcctgttatctctttgccttcgcttgcaaatttagctcttgcatcgcgaaacttttcataagcaaaatgacgatttaaatttaaaacataagagtaaacactatcttgcagactatcaaaaatcttaattttatgttttttatctggatgtcttaaatcaggaattaaacctttctcaccccaagtccattctccaaaaagattatttgcttctcttgcgaagcgacttgtacctgtagcactttcaactaaagcttgggctatacccatggattttggaattttttgaatacgttttttatattctgcaaaatcataaagattttcaatgcgatatttgttttttatcgtgataagtttttcaagatttgtttgatttgaagtcctaaagcctgttttgtaagcatctttaaaaaaggcttcgataaaagctctttcttgttcaatttttttaaagctttgatcaaacatttcattcatttttataaaaaaaatttgtcttttttgatctatatcaagtttgtaatattcctctccaaagccattttttagatcatcagcaaaaagtgggattagaaaaagactaagaaaaattataattggcttcaaaacaatactttacctttccttcaaaaaacaattcttcatttttatatgtaaacccaacctcttcaccacttttaggagttattttaactttattttgtacttttttatttaaaaatgccagataaaaacaagcccccattcctgtgccacaagctaaggtttcatcttcaactccgcgttcataggtacgaacttttaaatgattttcatctaaaatttttacaaaattaacattggcattatatttttgtctcattttttgacaaagtattgtatcaaattcatctaaattttgacaaaaatgcactagatgtggaactccagtgtcgcaaagttgccaagtttttcctaattcttcaaaagtattttgcacgctttttattttgcctaaagatacttcaactttatcttgatttacctttgcttttattattcctgcaccggttaaaaaactcatgttaggatttattttgttaatatgatgtgcaaaatgtgccgcagcccttgagccattgccacacatagcagcccttgagccatcgttattataaaattcccattcaaagtcgtatttttcatgaggcaatatcacgataaagccatccccacctatgccctcataacgattgcaaagttctttagctaaagcacttctatcttcttttctatcagcatttgttatgacaaaatcattcccacttgcacaatatttataaaatttcacatttttcctttagaaatttcttgtattactttaacacattcttgcctaaaatcgacataagaattagtatttttaatgataaaatctgcttttttaagtttttcttcaatatctatttgagaatcaagtctcacttttgcagcttctaagctgagcttatctctttgcatgattcttttaaggcttaattctttaggtgtgtaaattacaatgactttgcctaaattttcataagcaccgctttcaaaaaaaagaggaatttctacaaaaaaagctttattttctttatctagaatttgcatttgttctaaaattttagctcgaattttaggatgagtgaaattttctaaggtttttttagcttctttgttgttaaaaacaatttctccaaggatttttctatcgattttcttttcttttgtgagtaaattttttaagttaaagggagaaaaaatcttttcaagttctaaagcattttcatctaaaattttatgagcaattttatctgcgctaatgcttttaaagcctaaagaattcgctatttctataaaagtgcttttaccacaagcaattgaagcggttacaaaaaaagcatttttcatcttatgccttattaaaacttttttcgttaaaatacctttttagttcttaaaggaaaataaatgaaaatttcatatgaagatgcaggcgtaagtatagataatggaaatgcctttgtagaggctataaaacctttggttaaagaaacttttaatgataatgttgtaggcggaattggttcttttgctggtgcttttagaatgccaagtggttttaaaaagcctgtgattttaggtgcaacagatggtgttggtaccaagcttcgcttggcaattgatgctaaaaaatatgatactatagggcaagatttagtagcaatgtgtgtgaatgatttgatttgtaattttgctacgcctttgtttttcctagattattatgctacagccaagctcgaagtagaagtagcaaaggctgttgtatcaggcattgccaagggatgtaagatggcaaattgtgcattaatcggcggagaaactgctgaaatgcctggaatgtatgcaaaagatgattttgatcttgcgggttttgcagtgggtatggctgaagaagatgagatcgatagaagtaaatttgttaaaaatggtgatattttattggcacttcctagttcaggacttcattcaaatggttattctttagctagaaaagtactttttgaaagtttaaaattaaaatttgatgacaagatagagggtaaaaatttaattgatattttgttagaacctacaaggatttatgtgcgtgattttcttacactaaagccttatatcagtgctctagctcatattacagggggtggtttagtagaaaatttaccacgcgttttgcctcgtggtatgggtgcaactatacgcaaacatcatcttaaaactcctgaaattttttatactataggacaggctgtagaagaaagcgaaatgtatagaagctttaacatgggagtgggtttagtaatggttgtagatccttctaatgtaagtaaggttttagaaaattcagatgcctttattatcggcgaaatttgcattaatgaaggtattgttttagagtgaaaacaaattattatgattatttatgtgctaaaatgtatgtaattttgcccataaaagcccataaagacaaactaaaattttatctttcttatgtaaataagaaagataaaatttttagagttaatgtgtggaagtgggcggttttgataaaaattgccaaagatgataaaacgaaatatttttgttcgaatgtattaaataaagggtaaaatgcacaatttaaatgaagctttgtttcaaaaaaagataaaagaaattcgcttaaaagcaatagcgagtattatttgtgggtttttaggtatcattccttatcttggagttttatttgttcttgcgagttggattttattttttattgtgctttatgatttaaaaatctatggtggtgctaaaaatttgtttaagaatttccttattagtgtagggattggattttttggtattcttgttaatacaagtattttatttgcaatgctaaagcctagaactggcatttttggtgggctttattttaatcaagataatattttatggctattgctatatttttagtattacattttgctattttggctttaatttttccttttttgaaagctttttactatgaaattgctagaacaacaaagcaaaagtatttcacttatgcttttaataccttttatttagggcttcttactttgattatcggcataggcttggtgtttttgctagcaagtttggttttttggattttagcgtgggtcaaatttaaagaatttgatgagcaagaactttcaaatttagaagaaagattggcaaaagcacaaaaaaaggtttttgattttgatttaaaatggattaaaatcacaatggcttcatttataattttaaacttgctcgttttaacattttcgtttatattagaagttattagctttgaagattttaggttttactacacaaaaaaaactttattttacacagccataatcctagctttgcttagtgtgtttttgttttgtaaaaagataaaaaattacaaactttttatttattttttcatatggcaaggtttaagtgtttttggtagtcatcttctttttattcctgattttatggtagatcaacaaattgtatatggaagtttaaacataatattaagtctatgctatattatttttgcttttttattttttaaaattttgattcaaattacaaaggaaaaacttttttatcttatttttgcattttatgtttgcatagaaattttgataatattaattttctttatttttatgatggttgataactattatatatttacaaaaagtcctataaagatgctcatagataattataaattactttttcaagttgtttatttcgtttcatttttaattgtttggcttatgcttaaaggacaaaaaaatgtaaaaatatgttagaatgatgaaaaaatactattttatgtagatgtttattaggatatattcgtatgtcttaaagctctttatggggtgttaagtaattataatatttaaaaattaaaaaatatatagtttatccacatcttctaaaaatttgatcatctcttttttcattttttagagctagaaaacatatgagtgaaattgctttaaagttagttagagcagttgatactaaatattttgataagaaatttaaatagattgattttacttaaattaaagactttttgcctcgtgatacaaaattaagtgatgaatttttagttaaattgatattaaatatgaaaaaattataaatattaatactttttcaaattaatagtaaatatagagggtttgattttttcacaaaagatttggatagaacttgcaaaaaactttcttcaatatttatacttttaaattttgatgcaaatcctattcaatatagcattggcaaaataaactaaaaagcttaaaatagctatactcaaaagaattccaaaccatgcaaaatttcctgttccaagatttgaaaccgcgttagtaaggatattaactccaccaagtgctttaatgcctttagcacatactccagcggcgatgattatgcttacgactgagataaaaatttcagccatagccttttaaaatcaccatcatatcttcgcctaattttctagcatttctgtgtcttgcaaattcaacaagaaaaactaaagaaattcttacaaaatttgctatcacaacatcgagcttgatagtaaaaaaatacgctataaataaaaatataacaggtaaccaaggaaagagtgtgtaaaaagtagggcatttaggatcaatgatttgcggaatttcaacttcatcatttaaaacacctttttctttatctcttttatcaatccaagcaaaataaaaaggaatcaagatggcaataattacaacataggtaatcacactataaatttggtaatttaaaaaaagccctacgacattatcactttgtcctaccatatctgccatattgattgaatttccatcttttggatcataatcaagtgcaattaaagaaagcgcacatacagttgtaataggacggattttaagtgagattaaaacaggatacatacatgctaacaaaagcaaaagcaattcagcatagctagaaatgacgatttttaaagccattccaacaacaaaagttccacttaaaattaagtatttattttttgatttttcctgagggtttatttgctaaaaaagcaagttttgccgaagcattgatatgtttcatgtaagcagtaaagcctgccacactcatgataataagccctgctccagaaagctgacttttaaaagttgctgtgataaaagataactatcaagtaaaacatttaaaagcttgtatgttctctacttggagcttttggtataggtgttcctgtgatataaaaagcaaaaataagcaagataatacctgaaagaaaaaatacaaaaatgggattgtattttttgagtatatcataaaaattagcatagggtctcttgaatttacaataaattggattttatctaaatttttaaataaaaaatattttttatttaaaaattacttgttttttgtattataaaattaacatatatagtttggttactgaaaagtttatgtttgtttaaaaaaatgatttttgtattataattatacacaaatcataaatattaaaaaggatctagtgtggcaagaattttggcatttgatataggaataagctctattggctgggcatttagtgaaaatgatgagttaaaagattgtggagttaggatttttacaaaggctgaaaatcccaaaacaggagaatccttagccttgccaagacgccttgcaagaagtgctagaaaacgccttgctagacgcaaagcaaggctaaatcacttaaaacatttaatcgcaaatgaatttaagttaaattacgaagattatcaaagctttgatgaaagtttagccaaggcttataaaggatctttaattagcccttatgagttaagatttagagctttaaacgagcttttaagtaagcaagattttgcaagagtgattttacatattgcaaaaaggcgtggctatgatgatattaaaaatagtgatgataaagaaaaaggtgcgattttaaaagctatcaagcaaaatgaagaaaaactagcaaattatcaaagtgtgggcgagtatctttataaagagtattttcaaaaattcaaagaaaattccaaagaatttacaaatgttagaaataaaaaagaaagttatgaacgctgcatagcgcaaagttttttaaaagatgaattaaagcttatttttaaaaaacaaagagaatttggcttttctttttcaaaaaaatttgaagaagaggtgcttagtgtagcattttataaaagggctttaaaagatttttctcatttggtgggaaattgtagtttttttaccgatgaaaaaagagcgccaaaaaattcgcccttagcttttatgtttgtagcacttacaagaattatcaatcttttaaacaatcttaaaaatactgaaggaattttatatacaaaagatgatttaaacgcccttttaaatgaagttttaaaaaacggcactctaacttataaacaaacaaaaaagcttttgggcttaagcgatgattatgaatttaaaggagaaaaaggaacttattttattgagtttaaaaaatacaaagaatttataaaagccctaggtgagcataatttaagccaagatgatttaaatgaaatagcaaaagatattacccttataaaagatgagattaaacttaaaaaggctttagcaaaatatgatttaaatcaaaatcaaattgatagtttaagcaaattggaatttaaagaccatttaaatataagttttaaagccttaaaacttatcactcctttaatgcttgaaggtaaaaaatacgatgaagcttgcaatgagcttaatttaaaagtagcaatcaatgaagataaaaaagactttttacccgcatttaatgaaacttattataaagatgaggtaactaatcctgtggttttaagggcgattaaagaatatagaaaggtcttaaatgccttacttaaaaaatacggtaaagtgcataaaataaacattgaattagcaagagaagtaggtaaaaatcacagccaaagagctaaaatagaaaaagagcaaaacgaaaactacaaggccaaaaaagacgccgaacttgaatgtgaaaaactaggcttaaaaataaatagcaaaaatattttaaaattaagattatttaaagaacaaaaagaattttgtgcttatagtggagaaaagattaaaattagtgatttgcaagatgaaaaaatgcttgaaattgatcacatttacccttattctagaagttttgatgattcttatatgaataaagttttagtttttaccaagcaaaatcaagaaaaacttaataaaaccccctttgaagcctttggcaatgatagtgcaaaatggcagaaaattgaagttttagcaaaaaatttacctactaaaaagcaaaaaagaattttagataaaaattacaaagacaaagagcaaaaagactttaaagatagaaatctaaacgatactcgctacatcgcaaggcttgttttaactacactaaagattatttagattttttacctttaagcgatgatgaaaatacaaagttaaacgacacacaaaaaggctcaaaagtgcatgtagaagcaaaaagcggtatgcttacatcggctttaagacacacttggggctttagcactaaggatagaaataaccatcttcatcacgccatcgatgcagtaattattgcttatgcaaacaactctatcgtaaaggctttttcagattttaaaaaagagcaagaaagcaacagtgcagaactttatgcaaaaaaaattagtgaattagattataaaaacaaaaggaagttttttgagccttttagtggttttaggcaaaaggttttagataaaattgatgaaatttttgtctcaaaacctgagagaaaaaagccaagtggagctttacatgaagaaacatttagaaaagaagaagaattctatcaatcatacggcggaaaagaaggagttttaaaagccctagagcttggtaaaatccgcaaagtaaatggtaaaatagttaaaaatggcgatatgtttagagtggatatttttaaacacaaaaagacaaataaattttatgctgtgccaatttatactatggattttgctttaaaagtattaccaaataaagctgtagcacgaagtaaaaaaggtgagataaaagactggattttaatggatgaaaattatgagttttgcttttctttatacaaagatagtttgattttaattcaaactaaagatatgcaagagccagaatttgtttattataatgcttttacaagctctactgttagtttgattgtttcaaaacacgataataaatttgaaacgctaagcaaaaatcaaaaaatattgtttaaaaatgcaaatgaaaaagaagtaatcgcaaaaagcataggaattcaaaatctaaaagtatttgaaaaatacatagtttcagcacttggggaagttacaaaggctgagtttagacaaagagaagattttaaaaaatgagttacgatgaagcttttaaaacactgcttattagctctaatgccaagctaaatttagagctaaatcatcttgtgattaagcaagatgaaaatatagccaaattgtttttaaaagatataaatatcatcgttttagaaagcttacaaataagcattagttccgcactttttaatgcctttgcaaagtataaaattatcttattaacctgcgatgaaactcatagtataaatggcgtttttactccttttttagggcattttcaaagtgcaaaaatcgcaaaagagcaaatgaatgtaagtgctcaaaaaaaggctattttatggcaaaaaatcattaaaaataaaatcctaaatcaagcctttatcttaaaaaaacacaataaaatagagcaaagcaatgagcttataaatttggctaaaaaagtaagcttaaatgatagtaaaaatattgaagctgttgcggcggcgctttattttaaaactttgtttggtacttctttttcaagagatgagctttgctttgaaaattctgctttaaattatggctatgcaatcattagggcttgtattattagagcagtttgcataagtgggcttttgccttggcttggcataaagcacgataatatttataattcttttgcgctttgtgatgatttgatagaagtgtttagggctagtgttgatgattgtgttttaaagcttaagggtgaaagtgagtttttaagcaaagatgacaaaagagcgttgattggcaatttacaaagtaaaatcaattttgatgggcaaaattatcctttaaacagagcgataaatcattatgtggcaaattttaaaaatgctttattgtatgaagatgaactaaagatagtgaaatttgatgattgaagataaatttatgcgtgtgcttttgatgtttgatgtgccaactaaaagtaaaaaagagcaaaaactagcaagtaaatttagaaataatcttataaaattaggttattttatgctgcaatttagtgtttatatgcgtatttgcaagggtttaagttctgcaaaaagttctattgaaaatgtaaaaaagattttgccaccttatggaaatgtaagggctttaatcatcactgaaaagcaatttgataaaatggagcttttgcttggtggcatagtttttaacgaaaaagttaataacgaaaccaatttaacgctttttgatatagatagtcatggagaatttaaatataaaaattcaaataatgaagaaattcaaataaacaaaaaacaagaaaaatatcatcagcaaaatttatttgaattttaaaagcggttttaggggattgtaaccccgcagagtcccgcaaactctttattttagtccctttttaaatttcttatgagattatagcataatttttgctatttttcatgaaaaaaccccgaaattttcattatctggtaaatatctattttaccataaagaaatttaaaaagggactaaaataaaccctagtggattgaaactccgctagggctaattactccactaaaaggaggttgcaaatttgaaacttattgaaatttagggttgattaaaatcgaaataaaattatttaaataattttaaggcataaagataatatccactaaactttcattttctaaaatttcacattcttttggcaccaccataagggcagctttattgttaagattgtttataatcgcactagagccttcttttttgccttcaagattggctaaaatgcgtccattttcaaactttatgttacaagcgacaaattccaaataaggtgtttttttcttgtaacttccttgtaaaaaggctttgcaaatatagtctttaggctgaagtaaccaagagtttaaaatctctcttgcgtaaagattaaacattaccatagccgagtaaggaaaacctggtaaggcgatgatgaatttttcattagccttagctattttgatatgtctacctggttttatgtcggctttatcgatgatgatttcgtattctttgatggctttttttaaaaagtcaaaatctcccatagaaaccccgcccgttgtaaccaaaatatcacaactttgcaaagcactttcaagggtggaaaaagtggctttctcatcatcttttaaaagaggaaaaacccttgtatcgcaatttaaatttttagctaaattagctatggcgatatgatttgaagagcggatttgagcaggattttccaaggcttctcctagatctttgatctcacttccgctacttaaaacccctacaataggctttataaacacaccaatgtgaaaaaatccaagttcagccaaaagagctatctcgctataatttaactttgtgccttttttgagcaaaatttcatcttttttatagttttctcctaccgcacgcacggcaaaagcttggggaacttttttttctataaaaagagtatcattttctacgcgtacattttcaacagggactaaagtatcacttccctcgctcatgagtgagcccgtaaaggtttttacacaagtaccattttgcacgctaaattgtggcatagtgcctgcaggtgtgaggcctaaaatttttaaaggcttatcttgatcttcaaatttgatcgcataaccatccatagccgaagttggaaattcaggctgatttttaagggcttttatgtcttgagctaaaatgcgtcctaaacactctgtaagagctattttttcaatcttttcataggttttgatatgagagtgtaaaatttttaaactttcttcataagacattaacattttttatccttttaaaagtcctgcaccgcaaagtttggttgatctttctttggcataaattctttctttgtttatcacatcatacttccaaataggtgcacttgctttaaaatcttcaacaaattcattaagaagtttaagtcctaattttctttgtttgcttaaaattcctgcaaaataagagctttcatgaaccgccacatcgcctatagagtgagcaaaaagcaagctaataccatcaaaatctactcttttttgccactcatcaaaccatttttttaaaagcggttcataaatatcaaaactaagtgcctcaatgcctccttcttcacgcacaataccacaaaaagtcagcaaagcaccgcagtttttatccttggcaaattcataccattggctataaattttaggaatatctaaagaaccttgatagagtgtaaaatgttccatttaacccccacaaactggcggtaaaagtgctattttatcaccatcttttaacttagtgttttcatcaaaaatgatttcatcgtttaaagatacggcacaaagttctagccattcttttaaactctcatctttttgcaaaatttcttttaattcttttaaattttttacctcaagctctaaattttctttatttatggggcctaaaaattccacttttaccattttattcctttacttctaaatttcccatcattcctaaatcttcatgttctaaaatatggcaatgatacattctaagccctttaaaatcttgtttcattctaagtcttaactcttcattaggacgcacatttatagtatctcttaaggctctaaattcggctttttgaactttgccattgagttttgatgagatgagttcaaattgcgtgccatgtatatggaaaggatgatccatgtgagatttgtttatcactatccagtcttcaactactccaagtttggagcttaaatcaatgcgttttaaatcatagcttttgccattgattaaaaacatagacgcaagagcgatttttaattcaccttcactttttcccatcataccatgcatttgcatatgatcttcactcatgattatttctttaaattccttaggttcttctgaaggtttgaaaatttttaaattttttggaagttctacattttctttttttaggttaatattggctagaaatagggtattaggttcttcttttaccatcattttatccctatcataataagcactttctagcttaaaattcccatcttttggagcgtcgattaaaacttctacacgagaagcaggacttaagaaaagttcttctttataaatagctttttctataagtccaccatcagtaccaacaagtataaacttagctccttgtatgcgtaaatttaaatatcttgctgcagtagcattataaatgcgtatgcgttcgtttgtggcgagtttgattttaggtttaaattgtccattgatgagtacaaattctccttctctaccatttagccaatcatttaggttattgtttggaatttgagcgttttcatcaagacgcaaatcgctaatcatcaaatctttttcttttaaatgacttaaagcatctttttttgctttgatcacaaaagcccccgctaaacccataaaaacttgtttagaagccgtataatgaggatgtggatgataccagtaagttcctgcgctatcttgaggaatttcaaaacgatatattctttcttctcctgctaagataggatcatgtgggcttccatcttgatcaggtggcacaggaacgccatgccaatgtatagttgtagcttctttgagtttgtttttgactaaaatttcaagtttatctccttcaaaaacttctatttttggagcaggcacgaggccattgtaagtataaaataaggtttttttacctttgataagctctatatgattttctttgatttctagggtagcacgaaaaatatttttttctttactttcatttttgagtaaaggcaaggcttttaaaatttctccttgggggaattgttttggatctaaaagctttaaattttttggagcaaagtttataaaagaagtatctaagtcatgatttatagaatgatttttatgcatggagtgcatatcatgcataggatttgcataggctacacccatacttgctagagtgagtgcattaaattttaaaaaatttcttctattcattagtttttccttttgcttgattttttgtattatagtcattatttttttaactttagtaaatatttattttgaaaatttggtttaattttgttatgattttagcaatttaatcaaggaaaaataatgttttatgaaaaaattcaaaccccagcttatattttagaagaagataaattaagaaaaaattgtgagcttttagcaagtgttggcgaaaaaagtggtgctaaagtgcttttagctttaaaaggttttgctttttcaggagcgatgaaaattgttggagaatacttaaaaggttgtacttgtagcggactttgggaagcaaaatttgctaaagaatacatggataaagaaattcatacttattcgcctgcttttaaagaagatgaaataggtgaaatagccagcttatctcatcatatagtgtttaactctttagctcaatttcataaatttcaagctaaaacacaaaaaaattccttaggtcttcgttgtaatgttgaattttctctagccccaaaagaactttacaatccttgtggaagatactcaagacttggaattcgtgctaaagattttgaaaatgtggatttaagtaccatagaaggacttcattttcacgcactttgcgaagaaagtgctggtgctttagaagctgttttaaaggtttttgaagagaaatttggcaaatggatagggcaaatgaaatgggtgaattttggaggaggacatcacatcactaaaaaaggctatgatgttgaaaagcttattgctttgtgtaaaaatttcagtgataaatacggtgtgcaagtttatcttgaaccaggcgaagcggtgggttggcaaacaggaaatttggtggctagtgtagtagatatcatagaaaatgaaaaacaaattgctattttagatacttcaagcgaagcgcatatgccagatactatcatcatgccttatacaagtgaagttttaaatgctagaattttagccacaagagaaaatgaaaaaatttcagacttaaaagaaagcgaattttcctatttgcttactggaaatacttgtttagcgggtgatgtaatgggagaatacgcctttgataaaaagcttaaaatcggcgataaaattgtttttttagatcaaattcattacaccattgtgaaaaacacaacttttaatggtataagacttccaaatctcatgcttttaaatgcaaaaaatgaacttcaaatgataagagaattttcttataaggattattctttaagaaattagtattatttataatttgcataaaatgttaattttactcggaagagaatcaaagatgtaaattttatgcaaagtattttattttttcaaatataaaatcaactcaaatatctaattttcaatactttggtatgattttttaatattttaaatccttgtggaattttattgaaattcagtgatttttaaatcaaatagtattaagataaatcgatttaaaaatcggctttaaaatgaatattaggtatattttgcataatattcattcaagcaaaatttaaagctatttttgaaaattttgaatgcatgggggctttaatggatttggaaaaattaagattagctagaagtctttattatcaatgtctaggagagctttttgttttttcattttctgaagaaagattgtcaaaattacaagagtatttaaagacaatgcaagaatgtttatttgatgaaaatttaaaatcaaattttgatatcttgcttaagcatttagatgatgaaaattctatacaagcattttttaaagaatacgatttgctttttttaagtcttaaaaacagcattccaacgactttttcttacatagaagaaggttttgaaaattcaaatcctttactttgtgtgcgtcaaattttagtcaaaagtaaaataagacgcaatgaaaaattttttaaagaaagtgaagatagtgttggattttgtttattgttgatgagtgaatttttaaggcaaaatgaagatgatttagccaaagagctttttgaaaaagtgatcaataaaagcattgatgagtttttaggcgatgttttcatgaataaaaatgcgaatttatataaggaaattgcaagtattgcattggcttttatggaatttgaaagactttgctttgaagtagaaaaacctgcaaaaataaattctaaaaaagtgcaaaacgatctatcgcgttcagaatttttaagaagagaagcaaataaacaaaggaggactcgtgaaaaatcgcagggaatttcttaaaaaatccgcttttgccttaggggctgctggagtgcttggtagcacaactttagctctagctaaagatgaagaaagaaaagatttggttaaaggtaaaagtaagaaaaaagaagtgctttttcaaagaagtgctaattgggaaaattattatataaaggctgagtaatgtcaagtgtaggtgaaaatatcaagcttacgcgtcgttcttttcttaaaatggcagcactttcaagcctagcaacaccgttgcttgctagaagtgaaactttaagagaagcgagtgctgatgagcttaaagaagcgtatgaaggtagtaaaaaagtaaaaacagtttgtacagcctgttctgtaggctgtgggattattgcagaagtgcaaaatggtgtttgggtgcgtcaagaaattgctcaagatcatcctgtgagttcaggtggacattgctgcaagggatctgatatgatcgatatggtgcgttcacatgtgcgtttaaaatatcctatgaaaaaagaaaatggagaatggaaacgcataagttatgagcaagctttaagtgagatcggagaaaaactagctgcttatcgtaaagaaaatcctgaaagtgttatgtttttaggttctgcaaaacttaataatgaacaagcttattatataagaaaatttgcagcattttttggaacgaacaatgtagatcatcaagctagaatttgacacagcgcaacagtcgccggtgtggcgaatacatttggttatggcgctatgacaaaccatcttggagacattcaaagaagtaaatgtatcattatcattggagcaaatccagcggtaaatcaccctgtgggttttagacatttcttaaaagcaaaagaaaaaggtgcaaagcttatcgttgtagatcctagatttacaaaaagtgcagcaaaagcggatatttatgcaagaattcgtccaggaactgacattgctttcatgtatggaatgttaaaaatcatttttgatgaaggcttggaagatacaaaatatcttgatgaaagagtttttggaattgataaaattcgtgaagaagcagcaaaatggacagctgaagaagtggaaaatgttacagggatctctaaagaacttttggtgcaaatcactcacgaagtagctaaaaacaaaccaactacgcttatttgggctatgggtttaactcaacatactgtaggaacttcaaatacacgtttagcacctattgtgcaaatggtacttggaaatataggtaaatttggtggtggagttaatatcttacgcggacacgataatgttcaaggtgcttcagatatggcttgtttgagtgaaaatttacctggttattatcctttaaatgaagcgacttggagatactatgccaaaatttggggtgtggattatgagtggcttttaggaaattttgtaagtaaagattggatgcataaaactggactttcacttgctagatggtgggcagcggctttaaatggaaaagatggaaatgatgctatcgataatgcaggaacgcctttaaaagctttagtagttatgggaaatggtattacttcgactgcacaacaagtaaaagttaaagaaggtttggaagctttagagcttttagttttagccgatccttttgtaaatgaagcagggattatcgcagaaagaaaagatggaatttatcttttacctgcagcaacacagtttgaaacaagtggaagtgtaacagctacaaatcgtagtgggcaatggagatttaaagttgtagatccactttatgaaagtatggaagatcaagaaattttatttgagcttgctaaaaaattaggcttttatgaagactttaccaagactttacgcgatgaaaaaggtgagatcgtttggcctgaaaatgcaacaagagaaattgcaaaagcagttagaagtatagggcttaatggttggagtcctgaaaggcttaaaaaacatactttatactgggataaatttgatgaggtaactttagaaggaaaagacgaagttgcgggcgagtattatgggcttccttggccttgctggagtgataagcacccaggttctcctgtactttataataccgacattgaagtagcaaaaggtggtatgggctttagaaataattttggacttgagtatgaaggagagagtttgcttgctaaaaatgcacctttaaattcgcctattaatacaggttatccacaaattactaaagataatatagaaaaagttttaggtattactttaagtgctcaagaaaaagaaaaaatgggatcaacttggtcttatgatgatagcaatatcatagcaactaaatgtatagaaaaaggcatagttccttatggaaatgctaaagctagagctgtagtttggacttttaaagataaaattccactccaccgtgagcctttacattctccaagaaacgatttggtacaaaaatatccaagttttgaagatcaaaaagcactttatcgcgtggatactaaatttgtttctgtgcaacaagctaaggattattctaaagaattcccgcttaatcttgttaccgcaagacttgtgaatttaaatggtgcaggtatggaaaatagagcatctatgtatctaacgcgtttaacacctgaaatgttttgtgagatcaatcctgaattagcaaaagagcaagacattaaag

SEQ ID NO: 3789 - DNA, 22954 bp, synthetic construct
  source 1..22954: mol_type = other DNA
  misc_feature 1..22954: note = Synthetic
ggctgatggtgcttttcgtcgtggcaaaccttatatgttaaaacctgcagtagataaggctttaagtgaagggtgcgaaagtgtagaaaaagtacttatagttatacgcaataatgaacctatagaatatattaaaggaagggattatgtttataacgaacttgtgaaaaatgagtcttataagtgtgaacccgaaatcatggatagcgaggatttgttgtttttgctttacacttcaggatcaacaggtaagccaaaaggagttatgcatgcaagtgcaggatatatactttgggcacaaatgactatggaatgggtttttgatattaaagattatgataattattggtgtagtgctgatgtgggttggattacaggacatacttatgtagtttatgggcctttagcatgtggagcaacgactataatacatgaaggaactcctacttatccaaattctgggcgttggtggagaatgatagaagagtatcaaataagcaaattctacacttcgccaactgccataagaatgcttcatgctgatgcacctgatgagccaagaaaatatgatttaagtacgcttgaagtgcttggaacggttggagagcctatcaatcctagtgcttggaagtggttttatgatgaaatagggggaactaaaagtcctatagtcgatacttggtggcaaacagaaacaggtgggcatatgatcacgcctttaccaggcgctactcctttaaaaccaggttgtgctaccttgcctttgccaggaatttttgcagaagttattgatgaagaaggcaataaaaaagatgaaggtgaagatggattgctttgtataaccaaaccttggccttcgatgattcgtggaatttggggtaatgatgaacgctatatagaaagttatttttctcaagctagaaaagatggaaaagctgtatattttagtggcgatggtgctttttatgataaaaatggttatataactatcacaggaagaacagatgatgtggttaatgttgcaggacatcgtataggaacggctgaaattgaaagcgctattgctaaacatccaagtgtagcagaatcagctgtagtgagtattttggatgcgattaagggcgagtcactgtttgcttttgtggttttaagtcctgcatccagttgtgatcttggcggagctatagaaactttaaaagaacttaatgacattttaagagtagaaataggacctatagctaaaatagaaaaaattctttatactccaggtttgccaaaaactagaagtggtaaaataatgagaagaattttaagaactatagcaagaggcgaagaaatcaaacaagatatttcaacgctcgaagattctggagtagtagaaaccattgctaaattagctaaggcagagtttgaataacaaggcaaaaagaactttgccttgttgcatgaaaattcataaaaataagctataatgataaaaaaataaaaggaaatttttatgcttcaaacttgtattttccctgcggcaggttatgggacaagatttttacctgcaacaaaaactttacctaaagagatgttacctatcttaactaagcctttgatccattatggggttgatgaagctttggaagcaggaatggaaaatatgggctttgtcacagggcgtggaaaaagagctttggaggattattttgatatttcttatgaattagagcatcaaatttcaggtacaaaaaaagaatacttacttgatgaaattcgctctttgatcaatcgttgcacctttacttttacaagacaaaatcaaatgaaaggcttaggtgatgcggttttaaaaggtaaacctttggttggcgatgaagcttttggcgtaattttggctgatgatttgtgtgtcaatgaagaaggcttaaatgttatggctcaaatggtaaaaatttatgaaaaatatcgctgcaccatcatagctgtgatggaagtaccaaaagaacaagtttcaaactatggagtaatttctggaaattttgtagaagaaaatcttatcatggttaattctatgatagaaaaaccaagtcctgatgaagctccaagtaatcttgctatcataggaagatatattttaactcctgatatttttggaattttagaaaatactaaagcaggaaaaaatggcgaaattcaacttaccgacgcgcttttaactcaagcaaccaatggtatggttttagcttataaatttcaagggaaacgctttgattgtggaagtgtagaaggctttgtagaggcaacaaattatttttacgagaaaagtaaatgttaaacaatacacttttttttaaactaagtgaaattcacactataagctcttatgcaaatcgtattaatgatgaggtaaaaagtggagatatagggtattatcatcttattgaaacgagcttaagcctgattgatgagagtttggcttttatcaaagacaaagaacacataaaaaatattgttttagtgggaatgggtggttcaagttgcggtgtaaaagccttgcgtgatatgctttttaatgaaaaaagtaatcaaagagaactttttatactcgataacacaagttcacattcttttaataagactttagaaaaaatcaagcttgaagaaagtttgtttttaatcatcagtaaaacaggtagtactatagaagttgtatcgctttttaaacttcttattgaacattttaaacttgatatgcaagaattaaaaaaatactttgtttttattaccgataaggattcaaaacttcatcaagaaggtgaaaatttaggtattaaatgcttttttatccctgcaaatgtaggaggtcgttttagcatactttcagctgtaggtatagttccgctttgtttttgtggctataatgccaaagctcttttagaaggagctaaagcttgttttgaagatttttttactcacaaaaaagatgaaattttacaaaaagcctatcattattgtacacacaaaaatgccaatatcaatgtacttttttcatatagtgatgcttttaaaggctttaatgaatggtatatccagcttattgctgaaagtttaggtaaaaagcaaggctataaacgcataggtttaactcctattgcactcattggagcaagagatcagcatagttttttacaactcatcatggatggacctaaaaataaaactgtaacttttttaaaaatcaaagacgctcaaaaagcacctattatccctgatattcattttaaatttttagattctttaagtaataaagtcaatcttcacgaacttttaaacgctcaatgtgatgcaactatgcacgctttaatcgctgaaaatttgagtgttgatgtgatagaacttgaaaaacttgacgcttggcatgcgggatatttgatgtattattatgaacttttcacttcaacttgcggtgttatgctagggattaacacctatgaccaacctggtgtggaagttggaaagttgatcttaaaaaatatattaaattcttaatcaaaattcattaaaaaaagagtataatgattttaagttaaaattataataaaaatttttaattaataataattattatttaagaattttatgctataattttaaaaattaaaaaaaggagtcaatcatgtcagttacaaaacaattattacaaatgcaagcagatgctcatcatctatgggttaaatttcataattatcactggaatgtaaaaggtttgcaatttttttctatacacgagtacacagaaaaagcttatgaagaaatggcagaactttttgatagttgtgctgaaagagttttacaacttggcgaaaaagctatcacttgccaaaaagttttaatggaaaatgcaaaaagtccaaaagttgcaaaagattgctttactccgcttgaagtcatagaactgatcaaacaagattatgaatatcttttagcagaatttaaaaaactcaatgaagcagcagaaaaagaaagtgataccacaacagctgcttttgcgcaagaaaatatcgcaaaatatgaaaaaagtctttggatgataggcgctactttacaaggtgcttgcaaaatgtaatttaaggggctttatgccccaattatacaaactaggttataatatccttttttaaaggataaaattgaaagtacttaattttttttatgaaaaccaccctaaatttgaagtaagttatgaaagaaaaaatcaaatttcaaaaccaaatattatcataaaaggcccacgattttgtggtaaaaaaacacttatttttaattttttatctcaatttaaagcaagtgaaattttgtttttagatttatatgatacacgctttgaaaaacaaagtttagaaagacttgctgattttctgaatgaaaatttacaaattaaaattctttgcctttataatttggattttatccctaatttagaaaaaattaaaattcccatcatcttaagtacaaatataaaagatttaaatataaatgggtttgaagagcttgaactcgattattttgattttgaagaatttattagtgtaagtaagaaaaatttacctataaataatttagtgggtctttttttgcaaagtggacgcagtaaatttggagaaaaaaacatacttctaagacaaagcttcactcttttagaattagaaattttaaagtatttagctttaaatttgggtcagcaaatcagtatttctaagatatttatagaactcaaaaaaagattaaaaacttcaaaagatagtgtttatcaagctataaaaaaattagaaaatacttatgtgatctatactttaaaacatgatgaaaaaaaacttcaaaagatttattttaaagattttggcctaagaaataatctttgtatttcaaaggatttttcacatttatttgaaaatttagttttaagcgagttgtttaaatttaaagaagaatttttttataacaaatactttaacttttatagccaaatatctaaaattgcttatatttcaagtccaactttagatattgatttgatcaagctacgtgctaagaaaattttaccaaaggctttagaacttggaatttttcatgtgatttttatcactctttcaagcgaggatagtttttttgagcaaggggttaaatttgaagtcatatcttttgataaattttcactcggattttaggtgttgtttgagtttgtatcgtatttttcaaggttgtatcgtttgatgatttttgtaataagattgatataatatcccttgcgttcagaataagaatctaaagttttaatagcctctagccctgttatctctttgccttcgctttcaaatttagctcttgcatcgcgaaacttttcataagcaaaatgacgatttaaatttaaaacataagagtcaacactatcttgcagactatcaaaaatcttaattttatgttttttatctggatgtcttaaatcaggaattaaacctttctcaccccaagtccattctccaaaaagattgtttgcttctcttgcgaagcgactggtacctgtagcactttcaactaaagcttgggctatacccatggattttggaattttttgaatacgttttttatattctgcaaaatcataaagattttcaatgcgatatttgttttttatcgtgataagtttttcaagatttatttggtttgaagtcctaaagcctgttttgtaagcatctttaaaaaaggcttcgataaaggctctttcttgttcaatttttttaaagctttgatcaaacatttcattcatttttataaaaaaaatttgtcttttttgatctatatcaagtttgtaatattcctctccaaatccactctttagatcatcagcaaaaagtgggattagaaaaagactaagaaaaattataattggcttcaaaacaatactttacctttccctcaaaaaacaattcttcatttttatatgtaaaccccacctcttcaccacttttaggagttattttaactttattttgtacttttttatttaaaaatgccagataaaaacaagcccccattcctgtgccacaagctaaggtttcatcttcaactccgcgttcataggtgcgaacttttaaatgattttcatctaaaatttttacaaaattaacattggcattatatttttgtctcattttttgacaaagcattgtatcaaattcatctaaattttgacaaaaatgtactagatgtggaactccagtgttgcaaagttgccaagtttttcctaattcttcaaaagtattttgcacgctttttattttgcctaaagatacttcaactttatcttgatttacctttgcttttattactcctgcaccggttaaaaaactcatgttaggatttattttgttaatatgatgtgcaaaatgtgccgcagcccttgagccattgccacacatagcagcccttgagccatcgttattataaaattcccattcaaagtcgtatttttcatgaggcaatatcacgataaggccatccgcacctataccctcataacgattacaaagttctttagctaaagcacttctatcttcttttctatcagcatttgttatgacaaaatcattcccacttgcacaatatttataaaatttcacatttttcctttagaaatttcttgtattactttaacacattcttgcctaaaatcggcataagaattagtatttttaatgataaaatctgcttttttaagtttttcttcaatatctatttgagaatcaagtcttgcttttgcagcttctaagctgagcttatctctttgcatgattcttttaaggcttaattctttaggtgtgtaaattactatgactttgcctaaattttcataagcaccgctttcaaaaaaaagaggaatttctacaaaaaaagatttattttctttatctagaatttgcatttgttctaaaattttagctcgaattttaggatgagtgaaattttctaaggtttttttagcttctttgttgttaaaaacaatttctccaagggtttttctatcgattttcttttcttttgtgagtaaattttttaagctaaagggagaaaaaatcttttcaagttctaaagtattttcatctaaaatttcatgagcgattttgtctgcgctaatgcttttaaagcctaaagaattcgctatttctataaaagtgcttttaccacaagcaattgaagcggttacaaaaaaagcatttttcatcttatgccttattaaaacttttttcgttaaaatacctttttagttcttaaaggaaaataaatgaaaatttcatatgaagatgcaggcgtaagtatagataatggaaatgcctttgtagaggctataaaacctttggttaaagaaacttttaatgataatgttgtaggtggaattggttcttttgctggtgcttttagaatgccaagtggttttaaaaagcctgtgattttaggtgcaacagatggggttggtaccaagcttcgcttggcaattgatgctaaaaaatatgatactatagggcaagatttagtagcaatgtgtgtgaatgatttgatttgtaattttgctacgcctttgtttttcctagattattatgctacagccaagctcgaagtagaagtagcaaaggctgttgtatcaggcattgccaagggatgtaagatggcaaattgtgcattaattggcggagaaactgctgaaatgcctggaatgtatgcaaaagatgattttgatcttgcgggttttgcagtgggtatggctgaagaagatgagattgatagaagtaaatttgttaaaaatggtgatattttattggcacttcctagttcaggacttcattcaaatggttattctttagctagaaaagtactttttgaaagtttaaaattaaaatttgatgacaagatagagggtaaaaatttaattgatattttgttagaacctacaaggatttatgtgcgtgattttcttacactaaagccttatatcagtgctctagctcatattacagggggtggtttagtagaaaatttaccacgcgttttaccttgtggtatgggtgcaactatacgcaaacatcatcttaaaactcctgaaattttttatactataggacaggctgtagaagaaagcgaaatgtatagaagctttaacatgggagtaggtttagtaatggttgtagattcttctaatgtaagtaagattttagaaaattcagatgcctttattatcggcgaaatttgcattaatgaaggtgttgttttagaatgaaaataaagcgtcaatacgctttatttttgtattttaagttctatttttgtagtgctttgttcttttggcaaaggattggtttgtgctagataaaaggctacaagtatatttacaagcatagcaataagtaaaagaggagtggttcgttttataatatccattggagctacttttgcaaatccagctaaagctatattccgcctgctattggtgaagctgcacgacctaaacaagatgcaatttctataggtaaaactagagtaataggcgcaacgcctaattttgtagctatatcaggagctagtttgccaaaagcattaaaagcagcaattccacttcccataatcactgtggcaaaataaactaaaaagcttaaaatagctatactcaaaagaattccaaaccatgcaaaatttcctgttccaagatttgaaaccgcgttagcaaggatattaactccaccaagtgctttaataccttcagcaaatactccagcggcgatgattatgcttacgactgagataaaaatttcagccatagcttttaaaatcaccatcatatcttcgcctaattttctagcatttctgtgtcttgcaaattcaacaagaaaaactaaagaaatgcttacaaaatttgctgtcacaacatcgagcttgatagtaaaaaaatatgctgtaaataaaaatacaacaggtaaccaaggaaagagtatgtaaaaagtagggcatttaggatcaatgatttgcggaatttcaacttcatcatttaaaacacctttttctttatctcttttatcaatccaagcaaaataaaaaggaatcaagatggcaataactacaacataggcaatcacactataaatttggtaatttaaaaaaagccctacgacattatcactttgtcctaccatatctgccatattgattgaatttccatcttttggaccataatcaagtgtaattaaagaaagcacacatacagctgtaataggacggattttaagtgagattaaaacgggataaatacatgctaacaaaagcaaaagcaatccagcatagctagaaatgacgatttttaaagccattccaacaacaaaagttccacttaaaatcaagtatttatttttgatttttcctaagggtttatttgctaaaaaagcaagttttgccgaagcattgatatgtttcatataggcagcaaagcctgccacactcatgataataagtcctactccagaaagctgacttttaaaagtcgttgtgataaaagcatagctatcaagtaaaacattcaaaaagcttgtatgttctctacttggagcttttggtataggtgttcctgtgatataaaaagcaaaaataagcaagataatacctgaaagaaaaaatacaaaaatgggattgtattttttgagtatataataagcaacaacaattaccgctaaaagtgtagaacatatcataaaaattggcatgatttctcctaaggttattattagcttttattttattttagataaaatttaactaataaatatttttcatttaaaattttacttattttttgcattataaaattaataatatgtatagtttggttactgaaaggtttatgtttgtataaaaaatgatttttatattataattataaacaaatcataaatattaaaaaggatctagtgtggcaagaattttggcatttgatataggaataagctctattggctgggcatttagcgaaaatgatgagttaaaagattgcggagttaggatttttacaaaggctgaaaatcctaaaacaggagaatccttagccttgccaagacgccttgcaagaagtgctagaaaacgccttgctagacgcaaagcaaggttaaatcacttaaaacatttaatcgcaaatgaatttaagttaaattacaaagattatcaaagctttgatgaaagtttagccaaggcctataaaggctctttaattagcccttatgagttaagatttagagctttaaacgagcttttaaataagcaagattttgcaagagtgattttacatattgcaaaaaggcgtggttatgataatataaaaaatagcgataatgaagaaaagagtgagattttaaaagctatcaagcaaaatgaagaaaaactagcaaattatcaaagtgtgggcgagtatctttataaagagtattttcaaaaattcaaagaaaattccaaagaatttataaatgttagaaataaaaaagaaagttatgaacgctgcatagcgcaaagttttttaaaagatgaattaaagcttatttttaaaaaacaaagagaatttggcttttctttttcaaaaaaatttgaagaagaggtgcttagtgtagcattttataaaagggctttaaaagatttttctcatttggtgggaaattgtagtttttttaccgatgaaaaaagagcgccaaaaaattcgcccttagcctttatgtttgtagcacttacaagaattatcaatcttttaaacaatcttaaaaatactgaaggaattttatatacaaaagatgatttaaacacgcttttgaatgaagttctaaaaaacggcactctaacttataaacaaacaaaaaagcttttgggtttaagtgatgattatgaatttaaaggagaaaaaggaacttattttattgagtttaaaaaatataaagaatttataaaagccctaggtgatcatagtttaagccaagatgatttaaatgaaatagcaaaagatattacccttataaaagatgagattaagcttaaaaaggctttagcaaaatacgatttaaatcaaaatcaaattgatagtttaagcaaattggaatttaaagaccatttaaatataagttttaaagccttaaaacttatcactcctttaatgcttgaaggtaaaaaatacgatgaagcttgtaatgagcttaatttaaaagtagcaatcaatgaagataaaaaagactttttacccgcatttaatgaaacttattataaagatgaggtaactaatcctgtggttttaagggcgattaaagaatacagaaaggtcttaaatgctttacttaaaaaatacggcaaagtgcataaaataaacattgaattagcaagagaagtaggtaaaaatcacagccaaagagctaaaatagaaaaagagcaaaatgaaaactacaaggccaaaaaagacgccgaacttgaatgtgaaaaactaggcttaaaaataaatagtaaaaatattttaaaattaagattatttaaagaacaaaaagaattttgtgcttatagtggggaaaagattaaaattagcgatttgcaagatgaaaaaatgcttgaaattgaccatatttacccttattctagaagttttgatgattcttatatgaataaggttttagtttttaccaagcaaaaccaagaaaaacttaaaaaaccccctttgaagcctttggcaatgatagtacaaaatggcagaaaattgaagttttggcaaaaaatttacctgaaaaaaagcaaaaaagaattttagataaaaactataaagacaaagagcaaaaagactttaaagatagaaatctaaacgatactcgctacatcgcaaggcttgttttaaactatactaaagattatttagattttttacctttaagagatgatgaaaatacaaagttaaacgacacacaaaaaggctcaaaagtgcatgtagaagcaaaaagcggtatgctaacatcggctttaagacacacttggggctttagcactaaggatagaaataatcatcttcatcacgccatcgatgcagtaattattgcttatgcaaataactctatcgtaaaggctttttcagattttaaaaaagagcaagaaagcaacagtgcagaactttatgcaaaaaaaattagtgaattagattataaaaacaaaaggaagttttttgagccttttagtggttttaggcaaaaggttttagataaaattgatgaaatttttgtctcaaaacctgagagaaaaaagccaagcggagccttacacgaagaaacatttagaaaagaagaagaattctatcaatcatacggcggaaaagaaggagttttaaaagccctagagcttggtaaaatccgcaaagtaaatggtaaaattgttaaaaatggcgatatgtttagagtggatatttttaaacacagaaagacaaataaattttatgctgtgccaatttatactatggattttgccttaaaagtattgccaaataaagctgtagcaagaagtaaaaaaggtgagataaaagactggattttaatggatgaaaattatgagttttgcttttctttatacaaagatagtttgattttaattcaaactaaagatatgcaagagccagaacttgtttattttaatgcttttacaagctctactgttagtttgattgtttcaaaacacgataataaatttgaaacgctaagcaaaaatcaaaaaatattgtttaaaaatgcaaatgaaaaagaagtaatcgcaaaaagcataggaattcaaaatctaaaagtatttgaaaaatacatagtttcagcacttggagaagtgacaaaggctgagtttagacaaagagaagattttaaaaaatgagttacgatgaagcttttaaaacactacttattagctctaatgccaagctaaatttagagctaaatcatcttgtgattaagcaagatgaaaatatagccaaattgtttttaaaagatataaatatcatcattttagaaagcttacaagcaagccttagttccgcactttttaacgcttttgcaaagcataaaatcatcttgctaacctgcgatgaaactcatagtataaatggtgtttttactccttttttagggcattttcaaagtgcaaaaatcgcaaaagaacaaataaatgtaagtgctcaaaaaaaggctattttatggcaaaaaatcattaaaaacaaaatcctaaatcaagcctttgttttgaaaaaacacaatagaatagagcaaagcaatgagcttataaatttggctaaaaaagtaagtctaaatgatagtaaaaatatcgaagctgttgcggcggcgctttattttaaaactttgtttggtgtttctttttcaagagatgagctttgctttgaaaattctgctttaaattatggctatgcaatcattagggcttgtattattagagcagtttgtataagtgggcttttgccttggcttggcataaagcacgataatatttataattcttttgcgctttgcgatgatttgatagaagtgtttagggctagtgttgatgattgtgttttaaagcttaagggtgaaagtgagtttttaagcaaagatgacaaaagagcgttgattggcaatttacaaagcaaaatcaattttgatgagcaaaattatcctttaaatagagcgataaatcattatgtggcaaattttaaaaatgctttattgtatgaagatgaactaaagatagtgaaatttgatgattgaagataaatttatgcgtgtgcttttgatgtttgatgtgccaactaaaagtaaaaaagagcaaaaactagcaagtaaatttagaaacaatcttataaaattaggttattttatgttgcaatttagtgtttatatgcgtatttgcaagggtttaagttctgcaaaaagttctattgaaaatgtaaaaaagattttgccaccttatggaaatgtaagggttttaatcatcactgaaaagcaatttgataaaatggagcttttgcttggtggcatagtttttaacgaaaaagttaataacgaaaccaatttaacgctttttgatatagatagtcatggagaatttaaatacaaaaattcaaataatgaagaaattcaaataaacaaaaaacaagaaaaatatcatcagcaaaatttatttgaattttaaaagcggttttaggggattgtaaccccgcagagtcccgtaaactctttattttagtccctttttaaatttcttatgagattatagcataatttttgctatttttcatgaaaaaaccccgaaattttcattatctggtaaatatctattttaccataaagaaatttaaaaagggactaaaacgatttcacctataaattgaagtgttaagccattttaccataaagaaatttaaaaagggactaaaacatttgcaaataacttattatactgttcactattttaccataaagaaatttaaaaagggactaaaacacaatatacttaaacctacaataagagctaattttaccataaagaaatttaaaaagggactaaaaaccctagtggattgaaactctgctagggctaattactccactaaaaggaggttgcaaatttgaaacttattgaaatttagggttgattaaaatcgaaataaaattatttaaataattttaaggcataaagataatatccactaaactttcattttctaaaatttcacattcttttggtaccaccataagggcagctttattgttaagattgtttataatcgcactagaaccttctttcttaccttcaagattggctaaaatgcgtccatttttaaattccacattacaagcgacaaattccaaataaggtgtttttttcttgtagcttccttgtaaaaaggctttgcaaatatagtctttaggttgaagtaaccaagagtttaaaatctctcttgcgtaaagattaaacattaccatagccgagtaaggaaaacctggtaaggcgatgatgaatttttcattagccttagctattttgatatgtctgcctggttttatgtcggctttatcgatgatgatttcatattctttgacggctttttttaaaaagtcaaaatctcccatagaaactccgcccgtcgtaaccaaaatatcacaactttgcaaagcactttcaagggtagaaaaagtggctttttcatcatcttttaaaagaggaaaaacccttgtatcgcaatttaaatttttagctaaattagctatggcgatatgatttgaagagcggatttgagcaggattttccaaggcttctcctagatctttgatctcacttccgctacttaaaacccctacaataggctttataaacacactaatgtgaaaaaatccaagttcagctaaaagagctatctcgctataatttaaccttgtgccttttttgagtaaaatttcatcttttttatagttttctcctaccgcacgcacggcaaaagcttgagaaacttttttttctataaaaagagtatcattttctacgcgtacattttcaatagggactaaagtatcacttccttcactcatgagtgaacctgtaaaggtttttacacaagtgccattttgcacgctaaattgtggcatagtgcccgcaggtgtgaggcctaaaatttttaaaggcttatcttgatcttcaaatttgatcgcataaccatccatagccgaagttggaaattcaggctgatttttaggtgcttttatgtcttgagctaaaatgcgtcctaaacactctgtaagagctattttttcaatcttttcataagttttaatatgagagtgtaaaatttttaaactttcttcataagacattaacattttttatccttttaaaagtcctgcaccgaaaagtttggttgatctttctttggcataaattctttctttgtttatcacatcatacttccaaatgggtgcacttgctttaaaatcttcaacaaattcattaagaagcttaagtcctaattttctttgtttgcttaaaattcctgcaaaatacgagctttcatgtaccgctacatcgcctatggagtgagcaaaaagcaaggtaataccatcaaaatctactcttttttgccactcatcaaaccatttttttaaaagcggtttataaatatcaaaactaagtgcttcaatgcctccttcctcacgcacaataccgcaaaaagtcagcaaagcaccgcagtttttatccttggcaaattcataccattggctataaattttagaaatatctaaagagccttgataaagtgtaaaatgttccatttagcccccacaaactggtggtaaaagtgctattttatcaccatcttttaacttagtgttttcatcaaaaatgatttcatcatttaaagatagggcacaaagttctagccattcttttaaactctcatctttttgcaaaatttcttttaattcttttaaattttttacttcaagctctaaattttctttatttatggggcctaaaaattccacttttaccattttattcctttacttctaaatttcccatcattcctaaatcttcatgttctaaaatatgacaatgatacattctaagccctttaaaatcttgtttcattctaagtcttaactcttcattaggacgcacatttatagtatctcttaaggctctaaattcagctttttgaactttaccattgagttttgatgaaatgagttcaaattgcgtgccgtgtatgtggaaaggatgatccatgtgagatttatttatcactatccagtcttcaattactccaagcttggagcttaaatcaatgcgttttaaatcatagcttttgccattgattaaaaacatagacgcaagagcgatttttaattcattttcactttttcccatcattccatgcatttgcatatgatcttcactcatgattatttctttaaattccttaggttcttctaaaggtttgaaaatttttaaattttttggaagttctaatttttctttttttaggctaatatcagctaaaaatagggtattaggttcttcttttaccatcattttgtccctatcataataagcactttctagcctaaattccccatcttttggagcatcgattaaaacttctacgcgagaagcaggacttaagaaaagttcttctttataaatagctttttctataagtccgccatcagtaccaacaagtataaatttagccccttgtatgcgtaaatttaaatatcttgccgcagtagcattataaatgcgtatgcgttcgtttgtggcgagtttgattttaggtttaaattgtccattgatgagtacaaattctccttctctaccattaagccaatcatttaggttattgtttggaatttgagcgttttcatcaagacgcaaatcgctaatcatcaaatctctttcttttaaatgacttaaagcatctttttttgccttgattacaaaagcccctgctaaacccataaaaacttgtttagaagcggtataatgaggatgtggatgataccagtaagttcctgcgctatcttgaggaatttcaaaacgatatattctttcttttcctgctaagataggatcatgtgggcttccatcttgatcaggtggcacaggaacgccatgccaatgtatagttgtagcttctttgagtttgtttttgactaaaatttcaagtttatctccttcaaaaacttctatttttggagcaggcatgaggccgttgtaagtataaaataaggtttttttacttttgataagctctatatgattttctttgatttctagagtagcacgaaaaatatttttttctttactttcatttttgagtaaaggcaaggcttttaaaatttctccttggggaaattgttttggatttaaaagttttaaattttttggagcaaagttgataaaagaagtatctaagtcatgatttatagaatgatttttatgcatggagtgcatatcgtgcataggatttgcataggctacacccatacttgctagagtgagtgcattaaattttaaaaaatttcttctattcattagtttttcctttttgcttgattttttgtattatagtcattatttttttagttttagtaaatatttattttgaaaatttggtttaattttgttatgattttagcaatttaatcaaggaaaaataatgttttatgaaaaaattcaaactccagcttatattttagaagaagataaattaagaaaaaattgtgagcttttagcaagtgttggtgaaaaaagtggtgctaaagtgcttttagctttaaaaggttttgctttttcaggagcgatgaaaattgtcggagaatacctaaaaggttgtacttgtagcggactttgggaagcaaaatttgccaaagaatacatggataaagaaattcatacttattcacctgcttttaaagaagatgaaatcgatgaaatagccagtttgtctcatcacatagtgtttaactctttagctcaatttcataaatttcaagttaaaacacaaaaaaattccttaggtcttcgttgtaatgttgaattttctctagccccaaaagaactttacaatccttgcggaagatattcaagacttggaattcgtgctaaagattttgaaaatgtggatttaagtaccatagaaggacttcattttcatgcactttgcgaggaaagtgctgatgctttagaagctgttttaaaggtttttgaagagaaatttggcaaatggatagggcaaatgaaatgggtgaattttggaggaggacatcacatcaccaaaaaaggttatgatgttgaaaaacttattgctttgtgtaaaaatttcagtgataaatacggtgtgcaagtttatcttgaaccaggtgaagcggtgggttggcaaacaggaaatttggtggctagtgtagtagatatcatagaaaatgaaaaacaaattgctattttagatacttcaagcgaagcacatatgccagatactatcatcatgccttatacaagtgaagttttaaatgctagaattttagccacaagagaaaatgaaaaaatttcagacttaaaagaaaacgaattttcctatttgcttactggaaatacttgtttagcgggtgatgtaatgggagaatacgcttttgataaaaagcttaaaatcggcgataaaattgtttttttagatcaaattcattacaccattgtgaaaaacacaacttttaatggtataagacttccaaatctcatgcttttaaatgcaaaaaatgaacttcaaatgataagagaattttcttataaggattattctttaagaaattagtattatttataatttgcataaaatgttaattttactcggaagagaatcaaagatataaattttatgcaaagtattttattttttcaaatataaaatcaacttaaatatctaatttttaatactttggtatgattttttaagattttaaatccttgtggaattttattgaaattcagtgatttttaaatcaaatagtattaagataaatcgatttaaaaatcggctttaaaatgaatattagttatattttgcataatattcattcaagcaaaatttaaagctatttttgaaaattttgaatgcatggaggctttaatggatttggaaaaattaagattagctagaagtctttattatcaatgtctaggagagctttttgttttttcattttctgaagaaagattgtcaaaattacaagagtatttaaagacaatgcaagaatgtttatttgatgaaaatttaaaatcaaatttcgatatcttgcttaagcatttagatgatgaaaattctatacaagtattttttaaagaatatgatttgctttttttaagtcttaaaaatagcatcccaacgactttttcttacatagaagaaggttttgaaaattcaaatcctttactttgcgtgcgtcaaattttagtcaaaagtaaaataagacgcaatgaaaaattttttaaagaaagtgaagatagtgttggattttgtttattgttgatgagtgaatttttaaggcaaaatgaagatgatttagccaaagagctttttgaaaaagtgatcaataaaagcattgatgagtttttaggcgatgttttcatgaataaaaatgcgaatttatacaaggaaatttcaagtattgcattggcttttatagaatttgaaagactttgctttgaagtggaaaaacctgcaaaaataaattctaaaaaagtgcaaaatgatctatcgcgttcagaatttttaagaagagaagcaaataaacaaaggaggacttgtgaaaaatcgcagggaatttcttaaaaaatccgcttttgccttaggggctgctggagtgcttggtagcacaactttagctctagctaaagatgaagaaagaaaagatttggttaaaggtaaaagtaagaaaaaagaagtgctttttcaaagaagtgctaattgggaaaattattatataaaggctgagtaatgtcaagtgtaggtgaaaatatcaagcttacgcgtcgttcttttcttaaaatggcagcactttcaagcctagcaacaccgttgcttgctagaagtgaaactttaagagaagcgagtgctgatgagcttaaagaagcttatgaaggtagtaaaaaagtaaaaacagtttgtacagcctgttctgtaggctgtgggattattgcagaagtgcaaaatggtgtttgggtgcgtcaagaaatcgctcaagatcaccccgtgagttcaggtggacattgctgcaagggatctgatatgatcgatatggtgcgttcacatgtgcgtttaaaatatcctatgaaaaaagaaaatggagaatggaaacgcataagttatgagcaagctttaagtgagatcggagaaaaactaactgcttatcgtaaagaaaatcctgaaagtgttatgtttttaggttctgcaaaaatgagcaatgaacaagcttattatgtgcgtaaatttgcagcgttttttggaacaaacaatgtagatcatcaagctagaatttgacacagcgcaacagtcgccggtgtggcgaatacatttggttatggcgctatgacaaaccatcttggagacattcagagaagtaaatgtatcattatcattggagcaaatccagcggtaaatcaccctgtgggttttagacatttcttaaaagcaaaagaaaaaggcgcaaagcttatcgttgtagatcctagatttacaaaaagtgcagctaaagcggatatttatgcaagaattcgtccaggaactgacattgctttcatgtatggaatgttaaaaatcatttttgatgaaggcttagaagatacaaaatatcttgatgaaagagtttttggaattgataaaattcgcgaagaagcagcaaaatggacagctgaagaagtagaaaatgttacaggaatttctaaagaacttttagtgcaaattactcacgaagtagctaaaaataaaccaactacgcttatttgggctatgggtttaactcaacacaccgtaggaacttcaaatacgcgtttagcacctattgtgcaaatggtacttggaaatataggtaaatttggtggtggagttaatatcttacgcggacacgataatgttcaaggtgcttcagatatggcttgtttgagcgaaaatttaccaggttattatcctttaaatgaagcgacttggagatactatgccaaaatttggggtgtggattatgagtggcttttgggaaattttgtaagtaaagattggatgcataaaaccggactttcacttgctagatggtgggcagcagctttaaatggtaaagatggaaatgatgctatcgataatgcaggaacgcctttaaaagctttagtagttatgggaaatggtatcacttcgactgcacaacaagtaaaagttaaagaaggtttggaagctttagagcttttagttttggctgatccttttgtgaatgaagcaggcattatcgcagaaagaaaagatggaatttatcttttacctgcagcaacacagtttgaaacaagcggaagtgtaacagcaacaaatcgtagcggacaatggagatttaaagttgtagatcctttatatgaaagcaaagaagatcaagaaattttatttgagcttgctaaaaaattaggtttttatgaagactttaccaagactttacgcgatgaaaaaggtgagatcgtttggcctgaaaatgcaacaagagaaattgcaaaagcagtcagaagtataggacttaatggttggagtcctgaaaggcttaaaaagcatactttatactgggataaatttgatgaggtaactttagaaggaaaagacgaagttgctggcgagtattacgggcttccttggccttgttggagtgataaacatccaggttctcctgtgctttacaatattgatattgaagtagcaaaaggtggtatgggctttagaaataattttggacttgaatatgaaggtgaaagtttattagctaaaaatgcacctttaaattctcctattaatacaggttatccacaaataaccaaagataatatagaaaaaattttaggcatcaccttaagtgcagaggaaaaagctaaaatgggctctacttggtcttatgatgatagtaatatcatagcaactaaatgtatagaaaaaggtatagttccttatggaaatgctaaagctagatctatagtttggacttttaaagacaaaattccacttcaccgagaacctttacattctccaagaaatgatttagtgcaaaaatatcctagctttgaagatcaaaaagcactttatcgt

SEQ ID NO: 3790 - DNA, 22954 bp, synthetic construct
  source 1..22954: mol_type = other DNA
  misc_feature 1..22954: note = Synthetic
aagccttaagagatagaattatagatgcaggagctaaacttgtagtaacggctgatggtgcttttcgtcgtggcaaaccttatatgttaaaacctgcagtagataaggctttaagtgaagggtgtgaaagtgtagaaaaagtacttatagttatacgcaataatgagcctatagaatatattaaaggaagggactatgtttataacgaacttgtgaaaaatgaatcttataagtgtgaacccgaaatcatggatagtgaggatttgttgtttttgctttacacttcaggatcaacgggcaagccaaaaggagttatgcatgcaagtgcaggatatatactttgggcacaaatgactatggaatgggtttttgatattaaagattatgataattattggtgtagtgctgatgtgggttggattacaggacatacttatgtagtttatgggcctttagcatgtggagcaacgactataatgcatgaaggaactcctacttatccaaattctgggcgttggtggagaatgatagaagagtatcaaataagcaaattctacacttcgccaactgctataagaatgcttcatgctgatgcacctgatgagccaagaaaatatgatttaagtacgcttgaagtgcttggaacggttggagagcctatcaatcctagtgcttggaagtggttttatgatgaaatagggggaactaaaagtcctatagtcgatacttggtggcaaacagaaacaggtgggcatatgatcacgcctttaccaggcgctactcctttaaaaccaggttgtgctaccttgcctttgccaggaatttttgcagaagttattgatgaagaaggcaataaaaaagatgaaggtgaagatggattgctttgtataaccaaaccttggccttcgatgattcgtggaatttggggtaatgatgaacgctatatagaaagttatttttctcaagctagaaaagatggaaaagctgtatattttagtggcgatggtgctttttatgataaaaatggttatattaccatcacaggaagaacagatgatgtggttaatgttgcaggacatcgtataggaacggctgaaattgaaagcgctattgctaaacatccaagtgtagcagaatcagctgtagtgagtattttggatgtgattaagggtgagtcattgtttgcttttgtggttttaagtcctgcatccagttgtgatcttggcggagctatagaaactttaaaagaacttaatgacattttaagagtagaaataggatctatagctaaaatagaaaaaattctttatactccaggtttgccaaaaactagaagtggtaaaataatgagaagaattttaagaactatagcaagaggtgaagaaatcaaacaggatatttcaacacttgaagattctaaagtagtagaaaccattgttaaattagctaaggcagagtttgaataacaaggcaaaaagaactttgccttgttgcatgaaaattcataaaaataagctataatgataaaaaaataaaaggaaatttttatgcttcaaacttgtattttccctgcggcaggttatgggacgagatttttacctgcaacaaaaactttacctaaagagatgttacctatcttaaccaagcctttgatccattatggagttgatgaagctttagaagcaggaatggaaaatatgggatttgtcacagggcgtggaaaaagagctttggaggattattttgatatttcttatgaacttgaacatcaaatttcaggtacaaaaaaagaatacttacttgatgaaattcgttctttaatcaatcgttgtacctttacttttacaagacaaaatcaaatgaaaggcttaggtgatgcggttttaaaaggtagacctttggttggcgatgaagcttttggcgtaattttggctgatgatttgtgtgttaatgaagaaggcttaaatgttatggctcaaatggtaaaaatttatgaaaaatatcgctgcaccatcatagctgtgatggaagtaccaaaagagcaagtttcaaactatggagtaatttctggaaattttgtagaagaaaatcttatcatggttaattctatgatagaaaaaccaagtcctgatgaagctccaagtaatcttgctatcataggaagatatattttaactcctgatatttttggaattttagaaaatactaaagcgggaaaaaatggtgaagtccaacttaccgacgcgcttttaactcaagcaaccaatggtatggttttagcttataaatttcaaggaaaacgctttgattgtggaagtgtagaaggctttgtagaagcgacaaattatttttacgagaaaagtaaatgttaaacaatacacttttttttaagcaaagtgaaattcacactataagttcttatgcaaatcgtattaatgatgaggtaaaaagtggagatatagggtattatcatcttattgatacaagtttgaatttaatcgatgagagtttggcttttatcaaagacaaagaatacataaaaaatatcgttttagtgggaatgggtggttcaagttgtggtgtaaaagccttgcgtgatatgctttttaatgaaaaaagcaaccaaagagaactttttatactcgataacacaagttcacattcttttaataagactttagaaaaaatcaagcttgaggaaagtttgtttttaatcatcagcaaaacaggtagtactatagaagttgtatcgctttttaaacttcttattgagtattttaaacttgatatgcaagaattaaaaaaatactttgtttttattaccgataaggattcaaaacttcatcaagaaggtgaaaatttaggtattaaatgcttttttatccctgcaaatgtaggaggtcgttttagcatactttcagctgtaggtatagttccactttgtttttgtggctataatgccaaagctcttttagaaggagctaaagcttgttttgaagatttttttactcataaaaaagatgaaattttacaaaaagcctatcattattgcacacacaaaaatgccaatatcaatgtacttttttcatatagcgatgcttttaaaggctttaatgaatggtatatccagcttattgctgaaagtttaggtaaaaagcaaggctataaacgcataggtttaactcctattgcactcattggagcaagagatcagcatagttttttacaactcattatggatggacctaaaaataaaactgtaacttttttaaaaatcaaagacgctcaaaaagcacctattatccctgatattcattttaaatttttagattctttaagcaataaagtcaatcttcacgaacttttaaacgctcaatgtgatgcaactatgcacgctttaatcgctgaaaatttgagtgttgatgtgatagaacttgaaaaacttgacgcttggcatgcgggatatttgatgtattattatgaactttttacttcaacttgcggtgttatgttagggattaacacttatgatcaacctggtgtggaagttggaaagttgatcttaaaaaatatattaaattcttaatcaaaattcattaaaaaagagtataatgattttaaattaaaattataataaaaatttttaattaataataattattatttaagaattttatgttataattttaaaaattaaaaaaaggagtcaatcatgtcagttacaaaacaattattacaaatgcaagcagatgctcatcatctatgggttaaatttcataattatcactggaatgtaaaaggtttgcaatttttttctatacacgagtacacagaaaaagcttatgaagaaatggcagaactttttgatagttgtgctgaaagagttttacaacttggcgaaaaagctatcacttgccaaaaagttttaatggaaaatgcaaaaagtccaaaagttgcaaaagattgctttactccgcttgaagtcatagaactgatcaaacaagattatgaatatcttttagcagaatttaaaaaactcaatgaagcagcagaaaaagaaagtgataccacaacagctgcttttgcgcaagaaaatatcgcaaaatatgaaaaaagtctttggatgataagcgctactttacaaggtgcttgcaaaatgtaatttaaggggctttatgccccaattatacaaactaggttataatatccttttttaaaggataaaattgaaagtacttaattttttttatgaaaaccaccctaaatttgaagtaagttatgaaagaaaaaatcaaatttcaaaaccaaatattatcataaaaggcccacgattttgtggtaaaaaaacacttatttttaattttttatctcaatttaaagcaagtgaaattttgtttttagatttatatgatacacgctttgaaaaacaaagtttagaaagacttgctgattttttgaatgaaaatttacaaattaaaattctttgcctttataatttggattttatccctaatttagaaaaaattaaaattcccatcatcttaagtacaaatataaaagatttaaatataaatgggtttgaagaacttgaacttgattattttgattttgaagaatttattagtgtaagtaagaaaaatttacctataaataatttagtaggtctttttttgcaaagtggacgcagtaaatttggagaaaaaaacatacttctaagacaaagctttactcttttagaattagaaattttaaagtatttagctttaaatttgggtcagcaaatcagtatttctaagatatttatacaacttaaaaaaatattaaaaacttcaaaagatagtgtttatcaagctataaaaaaattagaaaatacttatgtgatctatactttaaaacatgatgaaaaaaaacttcaaaagatttattttaaagattttggcctaagaaataatctttgtatttcaaaggatttttcgcatttatttgaaaatttagttttaagcgagttgtttaaatttaaagaagattttttttataacaaatactttaacttttatagccaaatatctaaaattgcttatatttcaagtccaactttagatattgatttgattaaattacgtgctaagaaaattttaccaaaggctttagaacttggaatttttcatgtgatttttatcactctttcaagcgaggatagtttttttgagcaaggggttaaatttgaagtcatatcttttgataaattttcacttggattttaggtgttgtttgagtttgtatcgtatttttcaaggttgtatcgtttgatgatttttgtaataagattgatataatatcccttgcgttcagaataagaatctaaagttttaatagcctctagtcctgttatctctttgccttcgcttgcaaatttagctcttgcatcgcgaaacttttcataagcaaaatgacgatttaaatttaaaacataagagtaaacactatcttgcagactatcaaaaatcttaattttatgttttttatctggatgtcttaaatcaggaattaaacctttctcaccccaagtccattctccaaaaagattatttgcttctcttgcgaagcgacttgtacctgtagcactttcaactaaagcttgggctatacccatggattttggaattttttgaatacgttttttatattctgcaaaatcataaagattttcaatgcgatatttgttttttatcgtgataagtttttcaagatttgtttgatttgaagtcctaaagcctgttttgtaagcatctttaaaaaaggcttcgataaaagctctttcttgttcaatttttttaaagctttgatcaaacatttcattcatttttataaaaaaaaattgtcttttttgatctatatcaagtttgtaatattcctctccaaagccattttttagatcatcagcaaaaagtgggattagaaaaagactaagaaaaattataattggcttcaaaacaatactttacctttccttcaaaaaacaattcttcatttttatatgtaaacccaacctcttcaccacttttaggagttattttaactttattttgtacttttttatttaaaaatgccagataaaaacaagcccccattcctgtgccacaagctaaggtttcatcttcaactccgcgttcatacgtacgaacttttaaatgattttcatctaaaatttttacaaaattaacattggcattatatttttgtctcattttttgacaaagtattgtatcaaattcatctaaattttgacaaaaatgcactagatgtggaactccagtgtcgcaaagttgccaagtttttcctaattcttcaaaagtattttgcacgctttttattttgcctaaagatacttcaactttatcttgatttacctttgcttttattattcctgcaccggttaaaaaactcatgttaggatttattttgttaatatgatgtgcaaaatgtgccgcagctcttgagccattgccacacatagcagctcttgagccatcgttattataaaattcccattcaaagtcgtatttttcatgaggcaatatcacgataaagccatccccacctatgccctcataacgattgcaaagttctttagctaaagtacttctatcttcttttctatcagcatttgttatgacaaaatcattcccacttgcacaatatttataaaatttcacatttttcctttggaaatttcttgtattactttaacacattcttgcctaaaatcggcataagaattagtatttttaatgataaaatctgcttttttaagtttttcttcaatatctatttgagaatcaagtcttgcttttgcagcttctaagctgagcttatctctttgcatgattcttttaaggcttaattctttaggtgtgtaaattacaatgactttgcctaaattttcataagcaccgctttcaaaaaaaagaggaatttctacaaaaaaagctttattttctttatctagaatttgtatttgttctaaaattttagctcgaattttaggatgagtgaaattttctaagatttttttagcttctttattgttaaaaacaatttctccaaggatttttctatcgattttcttttcttttgtgagtaaattttttaaactaaagggagaaaaaatcttttcaagttctaaagcattttcatctaaaattttatgagcgattttgtctgcgctaatgcttttaaagtctaaagaattcgctatttctataaaagtgcttttaccacaagcaattgaagcggttacaaaaaaagcatttttcatcttatgccttattaaaacttttttcgttaaaatacctttttagttcttaaaggaaaataaatgaaaatttcatatgaagatgcaggcgtaagtatagataatggaaatacctttgtagaggctataaaacctttggttaaagaaacttttaatgataatgttgtaggtggaattggttcttttgctggtgcttttagaatgccaagtggttttaaaaagcctgtgattttaggtgcaacagatggggttggtaccaagcttcgcttggcaattgatgctaaaaaatatgatactatagggcaagatttagtagcaatgtgtgtgaatgatttgatttgtaattttgctacgcctttgtttttcttagattattatgctacagctaagcttgaagtagaagtagcaaaggctgttgtatcaggcattgccaagggatgtaagatggcaaattgtgcattaattggcggagaaactgctgaaatgcctggaatgtatgcaaaagatgattttgatcttgcgggttttgctgtgggtatggctgaagaagatgaaattgatagaagtaaatttgttaaaaatggtgatattttattggcacttcctagttcaggacttcattcaaatggttattctttagctagaaaagtactttttgaaagtttaaaattaaaatttgatgacaagatagagggtaaaaatttaattgatattttgttagaacctacaaggatttatgtgcgtgattttcttacactaaagccttatatcagtgctctagcacatattacagggggtggtttagtagaaaatttaccacgcgttttacctcgtggtatgggtgcaactatacgcaaacatcatcttaaaactcctgaaattttttatactataggacaggctgtagaagaaagcgaaatgtatagaagctttaacatgggagtgggtttagtaatggttgtagatccttctaatgtaagtaaggttttagaaaattcagatgcctttattatcggcgaaatttgcattaatgaaggtattgttttagaatgaaaataaagcgttaatacgctttatttttgtattttaagttctatttttgtagtgttttgttcttttggcaaaggattggtttgtgctagataaaaggctacaagtacatttacaagcatagcgataagtaaaagaggagtggtccgttttataatatccattggagctacttttgcaaatccagctaaagctatgattccgcctgctattggtgaagctgcgcgacctaaacaagatgcaatttctacaggtaaaactagagtaataggtgcaatgcctaattcgtagctatatcaggagctagttttccaaaagcattaaaagcagcaattccacttcccataatcactgtggcaaaataaactaaaaagcttaaaatagctatactcaaaagaattccaaaccatgcaaaatttcctgttccaagatttgaaaccgcgttagcaaggatattaactccaccaagtgctttaatgccttcagcaaatactccagcggcgatgattatgcttacgactgagataaaaatttcagccatagccttttaaaatcaccatcatatcttcgcctaattttctagcatttctgtgtcttgcaaattcaacaagaaaaactaaagaaattcttacaaaatttgcttcacaacatcgagcttgatagtaaaaaaatacgctataaataaaaatacaacaggtaaccaaggaaagagtatgtaaaaaagtagggcatttaggatcaatgatttgcggaatttcaacttcatcatttaaaacacctttttctttatctctttatcaatccaagcaaaataaaaaggaatcaagatggcaataattacaacataggtaatcacactataaatttggtaatttaaaaaaagccctacgacattatcactttgtcctaccatatctgccatattgattgaatttccatcttttggatcataatcaagtgcaattaaagaaagcgcacatacagttgtaataggacggattttaagtgagattaaaatagaataaatacatgctaacaaaagtaaaagcaattcagcatagctagaaatgacgatttttaaagccattccaacaacaaaagttccacttaaaatcaagtatttattttttgatttttcctgagggtttatttgctaaaaaagcaagttttgccgaagcattgatatgtttcatataagcagcaaaacctgccacactcatgataataagccctgctccagaaagctgacttttaaaagtcgctgtgataaaagataactatcaagtaaaacatttaaaagcttgtatactctctgtttggagtttttggtataggtgttcctgtgatataaaaagcaaaaataagcaagataatatttgaaagaaaaatacaaaaatgggatcgtattttttttgagtatatcataaaaattagcatagggtctcttgaatttacaataaattggattttatctaaatttttaaataaaaaatattttttatttaaaaattacttgttttttgtattataaaattaacatatatagtttggttactgaaaagtttatgtttgtttaaaaaaatgatttttgtattataattatacacaaatcataaatattaaaaaggatctagtgtggcaagaattttggcatttgatataggaataagctctattggctgggcatttagtgaaaatgatgagttaaaagattgtggagttaggatttttacaaaggctgaaaatcccaaaacaggagaatccttagccttgccaagacgccttgcaagaagtgctagaaaacgccttgctagacgcaaagcaaggctaaatcacttaaaacatttaatcgcaaatgaatttaagttaaattacgaagattatcaaagctttgataaaagtttagccaaggcttataaaggatctttaattagcccttatgagttaagatttagagctttaaacgagcttttaagtaagcaagattttgcaagagtgattttacatattgcaaaaaggcgtggctatgatgatattaaaaatagtgatgataaagaaaaaggtgcgattttaaaagctatcaagcaaaatgaagaaaaactagcaaattatcaaagtgtgggcgagtatctttataaagagtattttcaaaaattcaaagaaaattccaaagaatttacaaatgttagaaataaaaaagaaagttatgaacgctgcatagcgcaaagttttttaaaagatgaattaaagcttatttttaaaaaacaaagagaatttggcttttctttttcaaaaaaatttgaagaagaggtgcttagtgtagcattttataaaagggctttaaaagatttttctcatttggtgggaaattgtagtttttttaccgatgaaaaaagagcgccaaaaaattcgcccttagcttttatgtttgtagcacttacaagaattatcaatcttttaaacaatcttaaaaatactgaaggaattttatatacaaaagatgatttaaacgcccttttgaatgaagttttaaaaaacggcactctaacttataaacaaacaaaaaagcttttgggcttaagcgatgattatgaatttaaaggggaaaaaggaacttattttattgagtttaaaaaatataaagaatttataaaagccctaggtgatcatagtttaagccaagatgatttaaatgaaatagcaaaagatattacccttataaaagatgagattaagcttaaaaaggctttagtaaaatatgatttaaatcaaaatcaaattgatagtttaagcaaattggaatttaaagaccatttaaatataagttttaaagccttaaaacttatcactcctttaatgcttgaaggtaaaaaatacgatgaagcttgtaatgagcttaatttaaaagtagcaatcaatgaagataaaaaagattttttacccgcatttaatgaaacttattataaagatgaggtaactaatcctgtggttttaagagcgattaaagaatacagaaaggtcttaaatgctttacttaaaaaatacggcaaagtgcataaaataaacattgaattagcaagagaagtaggtaaaaattacagccaaagagctaaaatagaaaaagagcaaaatgaaaactacaaggccaaaaaagacgccgaacttgaatgtgaaaaactaggcttaaaaataaatagcaaaaatattttaaaattaagattatttaaagaacaaaaagaattttgtgcttatagtggagaaaagattaaaattagtgatttgcaagatgaaaaaatgcttgaaattgatcacatttacccttattctagaagttttgatgattcttatatgaataaagttttagtttttaccaagcaaaatcaagaaaaacttaatcaaaccccctttgaagcctttggcaatgatagtgcaaaatggcagaaaattgaagttttagcaaaaaatttacctactaaaaagcaaaaaagaattttagataaaaattacaaagacaaagagcaaaaagactttaaagatagaaatctaaacgatactcgctacatcgcaaggcttgttttaaactacactaaagattatttagattttttacctttaagcgatgatgaaaatacaaagttaaacgacacacaaaaaggctcaaaagtacatgtagaagcaaaaagcggtatgcttacatcggctttaagacacacttggggctttagcgctaaggatagaaataaccatcttcatcacgccatcgatgcagtaattattgcttatgcaaacaactctatcgtaaaggctttttcagattttaaaaaagagcaagaaagcaacagtgcagaactttatgcaaaaaaattagtgaattagattataaaaacaaaaggaagttttttgagccttttagtggttttaggcaaaaggttttagataaaattgatgaaatttttgtctcaaaacctgagagaaaaaagccaagtggagctttacatgaagaaacatttagaaaagaagaagaattctatcaatcatacggcggaaaagaaggagttttaaaagccctagagcttggtaaaatccgcaaagtaaatggtaaaatagttaaaaatggcgatatgtttagagtggatatttttaaacacaaaaagacaaataaattttatgctgtgccaatttatactatggattttgctttaaaagtattaccaaataaagctgtagcacgaagtaaaaaaggtgagataaaagactggattttaatggatgaaaattatgagttttgcttttctttatacaaagatagtttgattttaattcaaactaaagatatgcaagagccagaacttgtttattttaatgcttttacaagctctactgttagtttgattgtttcaaaacacgataataaatttgaaacgctaagcaaaaatcaaaaaatattgtttaaaaatgcaaatgaaaaagaagtaatcgcaaaaagcataggaattcaaaatctaaaagtatttgaaaaatacatagtttcagcacttggggaagttacaaaggctgagtttagacaaagagaagattttaaaaaatgagttacgatgaagcttttaaaacactgcttattagctctaatgccaagctaaatttagagctaaatcatcttgtgattaagcaagatgaaaatatagccaaattgtttttaaaagatataaatatcatcgttttagaaagcttacaaataagcattagttccgcactttttaacgcttttgcaaggcataaaatcatcttgctaacctgcgatgaaactcatagtataaatggtgtttttactccttttttagggcattttcaaagtgcaaaaatcgcaaaagagcaaatgaatgtaagtgctcaaaaaaaggctattttatggcaaaaaatcattaaaaataaaatcctaaatcaagcctttatcttaaaaaaatacaataaaatagagcaaagcaatgagcttataaatttggctaaaaaagtaagcttaaatgatagtaaaaatattgaagctgttgcggcggcgctttattttaaaactttgtttggtacttctttttcaagagatgagctttgctttgaaaattctgctttaaattatggctatgcaatcattagggcttgtattattagagcagtttgcataagtgggcttttgccttggcttggcataaagcacgataatatttataattcttttgcgctttgtgatgatttgatagaagtgtttagggctagtgttgatgattgtgttttaaagcttaagggtgaaagtgagtttttaagcaaagatgacaaaagagcgttgattggcaatttacaaagcaaaatcaattttgatgggcaaaattatcctttaaacagagcgataaatcattatgtggcaaattttaaaaatgctttattgtatgaagatgaactaaagatagtgaaatttgatgattgaagataaatttatgcgtgtgcttttgatgtttgatgtacctactaaaagtaaaaaagagcaaaaactagcaagtaaatttagaaataatcttataaaattaggttattttatgctgcaatttagtgtttatatgcgtatttgcaagggtttaagttctgcaaaaagttctattgaaaatgtaaaaaagattttgccaccttatggaaatgtaagggctttaatcatcactgaaaagcaatttgataaaatggagcttttgcttggtggcatagtttttaacgaaaaagttaataacgaaaccaatttaacgctttttgatatagatagtcatggagaatttaaatataaaaattcaaataatgaagaaattcaaataaacaaaaaacaagaaaaatatcatcagcaaaatttatttgaattttaaaagcggttttaggggattgtaaccccgcagagtcccgcaaactctttattttagtccctttttaaatttcttatgagattatagcataatttttgctatttttcatgaaaaaaccccgaaattttcattatctggtaaatatctattttaccataaagaaatttaaaaagggactaaaataaaccctagtggattgaaactccgctagggctaattactccactaaaaggaggttgcgaatttgaaacttattgaaatttagggttgattaaaatcgaaataaaattatttaaataattttaaggcataaagataatatccactaaactttcattttctaaaatttcacattcttttggcaccaccataagggcagctttattgttaagattgtttataatcgcactagagccttcttttttgccttcaagattggctaaaatgcgtccattttcaaactttatgttacaagcgacaaattccaaataaggtgtttttttcttgtaacttccttgtaaaaaggctttgcaaatatagtctttaggctgaagtaaccaagagtttaaaatctctcttgcgtaaagattaaacattaccatagccgagtaaggaaaacctggtaaggcgatgatgaatttttcattagccttagctattttgatatgtctacctggttttatgtcggctttatcgatgatgatttcgtattctttgatggctttttttaaaaagtcaaaatctcccatagaaaccccgcccgttgtaaccaaaatatcacaactttgcaaagcactttcaagggtggaaaaagtggctttctcatcatcttttaaaagaggaaaaacccttgtatcgcaatttaaatttttagctaaattagctatggcgatatgatttgaagagcggatttgagcaggattttccaaggcttctcctagatctttgatctcacttccactacttaaaacccctacaataggctttataaacacactaatgtgaaaaaatccaagttcagctaaaagagctatctcgctataatttaactttgtgccttttttgagtaaaatttcatcttttttatagttttctcctaccgcacgcacggcaaaagcttggggaacttttttttctataaaaagagtatcattttctatgcgtatattttcaacagggactaaagtatcgcttccttcgctcatgagtgagcctgtaaaggtttttacacaagtgccattttgtacgctaaattgtggcatagtgcccgcaggtgtgaggcctaaaatttttaaaggcttgtcttgatcttcaaatttgatcgcataaccatccatagccgaggttggaaattcaggctgatttttaggggcttttatgtcttgagctaaaatgcgtcctaaacactctgtaagagctattttttcaatcttttcataagttttaatatgagaatgtaaaatttttaaactttcttcataagacattaacattttttatccttttaaaagtcctgcaccgcaaagtttggttgatctttctttggcataaattctttctttgtttatcacatcatacttccaaatgggcgcacttgctttaaaatcttcaacaaattcattaagaagtttaagtcctaattttctttgtttgcttaaaattcctgcaaaatacgagctttcatgtatcgctacatcgcctatagagtgagcaaaaagcaagctaataccatcaaaatctactcttttttgccactcatcaaaccatttttttaaaagcggttcataaatatcaaaactaagtgcctcaatacctccttcttcacgcacaataccacaaaaagtcagtaaagcaccgcagtttttatccttggaaaattcataccattggctataaattttagaaatatctaaagagccttgataaagtgtaaaatgtttcatttagcctccacaaactggcggtaaaagtgctattttatcaccatcttttaacttggtgttttcatcaaaaatgatttcatcatttaaagatacagcacaaagttctagccattcttttaaactctcatctttttgcaaaatttcttttaattcttttaaattttttacttcaagttctaaattttctttatttatggggcctaaaaattccacttttaccattttattcctttacttctaaatttcccatcattcctaaatcttcatgttctaaaatatggcaatgatacattctaagtcctttaaaatcttgtttcattctaagtcttaattcttcattaggacgcacatttatagtatctctgaaggctctaaattcggctttttgaactttgccattgagttttgatgagatgagttcaaattgcgtgccgtgtatgtggaaaggatgatccatgtgagatttatttatcactatccagtcttcaactactccaagcttggagcttaaatcaatgcgttttaaatcatagcttttgccattgattaaaaacatagacgcaagagcgatttttaattcgctttcactttttcccatcataccatgcatttgcatatgatcttcactcatgattatttctttaaattccttaggttcttctgaaggtttgaaaatttttaaattttttggaagttctacattttctttttttagactaatattagctaaaaatagggtattaggttcttcttttaccatcattttatccctatcataataagcactttctagcttaaaattcccatcttttggagcgtcgattaaaacttctgcacgagaagcaggacttaagaaaagttcttctttataaatagttttttctataagtccaccatcagtaccaacaagtataaacttagctccttgtatgcgtaaatttaaatatcttgccgcagtagcattataaatgcgtatgcgttcgtttgtggcgagtttgatttgaggtttaaattgtccattaatgagtacaaattctccttctctaccatttagccaatcatttaggttgttgttcggaatttgagcgttttcatcaagacgcaaatcgctaatcatcaaatctctttcttttaaatgacttaaagcatctttttttgctttgatcacaaaagcccctgctaaacccataaaaacttgtttagaagcggtataatgagggtgtggatgataccagtaagttcctgcgctatcttgaggaattttaaaacgatatattctttcttctcctgctaaaataggatcatgtgggcttccatcttgatcaggcggcacaggaacgccatgccaatgtatagttgtagcttctttgagtttgtttttgactaaaatttcaagtttatctccttcaaaaacttctatttttggagcaggcacgaggccattgtaagtataaaataaggtttttttacctttgataagctctatatgattttctttgatttctagggtagcacgaaaaatatttttttctttactttcatttttgagtaaaggcaaggcttttaaaatttctccttgggggaattgttttggatctaaaagttttaaattttttggagcaaagttgataaaagaagtatctaagtcatgatttatagaatgatttttatgcatggagtgcatatcgtgcataggatttgcataggctacacccatacttgctagagtgagtgcattaaattttaaaaaatttcttctattcattagtttttccttttgcttgattttttatattatagtcattatttttttaactttagtaaatatttattttgaaaatttggtttaattttgttatgattttagcaatttaatcaaggaaaaataatgttttatgaaaaaattcaaactccagcttatattttagaagaagataaattaagaaaaaattgtgagcttttagcaagtgttggtgaaaaaagtggtgctaaagtgcttttagctttaaaaggttttgctttttcaggagcgatgaaaattgttggagaatacctaaaaggttgtacttgtagtggactttgggaagcaaaatttgctaaagaatacatggataaagaaattcatacttattcacctgcttttaaagaagatgaaataggtgaaatagccagtttatctcatcatatagtgtttaactctttagcccaatttcataaatttcaagctaaaacacaaaaaaattccttaggtcttcgttgtaatgttgaattttctctagccccaaaagaactttacaatccttgtggaagatactcaagacttggaattcgtgctaaagattttgaaaatgtggatttaaatgctatagaaggacttcattttcacgcactttgtgaagaaagtgctgatgctttagaagcagttttaaaggcttttgaagagaaatttggcaaatggatagggcaaatgaaatgggtgaattttggaggaggacatcacatcactaaaaaaggctatgatgttgaaaaacttattgctttgtgtaaaaatttcagtgataaatatggcgtgcaagtttatcttgaaccaggcgaagcggtgggttggcaaacaggaaatttggtggctagtgtagtagatatcatagaaaatgaaaaacaaattgctattttagatacttcaagcgaagcacatatgccagatactatcatcatgccttatacaagtgaagttttaaatgctagaattttggccacaagagaaaatgaaaaaatttcagacttaaaagaaagcgaattttcctatttgcttactggaaatacttgtttagcaggtgatgtaatgggagaatacgcctttgataaaaagcttaaaatcggcgataaaattgtttttttagatcaaattcattacaccattgtgaaaaacacaacttttaatggtataagacttccaaatctcatgcttttagaccgtaaaaatgaacttcaaatgataagagaattttcttataaggattattctttaagaaattagtattatttataatttgcataaaatgttaattttactcggaagagaatcaaagatgtaaattttatgcaaagtattttattttttcaaatataaaatcaactcaaatatctaattttcaatactttggtatgattttttaatattttaaatccttgtggaattttattgaaattcagtgatttttaaatcaaatagtattaagataaatcgatttaaaaatcggctttaaaatgaatattaggtatattttgcataatattcattcaagcaaaatttaaagctatttttgaaaattttgaatgcatgggagctttaatggatttggaaaaattaagattagctagaagtctttattatcaatatctaggagagctttttgttttttcattttctgaagaaagattgtcaaaattacaagagtatttaaagacaatgcaagaatgtttatttgatgaaaatttaaaatcaaattttgatatcttgcttaagcatttagatgatgaaaattctatacaagcattttttaaagaatatgatttgctttttttaagtcttaaaaatagcattccaacgactttttcttacatagaagaaggttttgaaaattcaaatcctttactttgcgtgcgtcaaattttagtcaaaagtaaaataagacgcaatgaaaaattttttaaagaaagtgaagatagtgttggattttgtttattgttgatgagtgaatttttaaggcaaaatgaagatgatttagccaaagagctttttgaaaaagtgatcaataaaagcattgatgagtttttaggcgatgttttcatgaataaaaatgcgaatttatataaggaaattgcaagtattgcatcggcttttatggaatttgaaagactttgctttgaagtggaaaaacctgcaaaaataaattctaaaaaagtgcaaaacgatctatcgcgttcagaatttttaagaagagaagcaaataaacaaaggaggactcgtgaaaaatcgcagggaatttcttaaaaaatccgcttttgccttaggggctgctggagtgcttggtagcacgactttagctctagctaaagatgaagaaagaaaagatttggttaaaggtaaaagtaagaaaaaagaagtgctttttcaaagaagtgctaattgggaaaaatattatataaaggctgagtaatgtcaagtgtaggtgaaaatatcaagcttacgcgtcgttcttttcttaaaatggcagcactttcaagcctagcaacaccgttgcttgctagaagtgaaactttaagagaagcgagtgctgatgagcttaaagaagcgtatgaaggtagtaaaaaagtaaaaacagtttgtacagcctgttctgtaggctgtgggattattgcagaagtgcaaaatggtgtttgggtgcgtcaagaaatcgctcaagatcatcctgtgagttcaggtggacattgctgcaagggatctgatatgatcgatatggtgcgttcacatgtgcgtttaaaatatcctatgaaaaaagaaaatggagaatggaaacgcataagttatgagcaagctttaagtgagatcggagaaaaactagctgcttatcgtaaagaaaatcctgaaagtgttatgtttttaggttctgcaaaacttaataatgaacaagcttattatataagaaaatttgcagcattttttggaacgaacaatgtagatcatcaagctagaatttgacacagcgcaacagtcgccggtgtggcgaatacatttggttatggcgctatgacaaaccatcttggagacatccaaagaagtaaatgtatcattatcattggagcaaatccagcggtaaatcaccctgtgggttttagacatttcttaaaagcaaaagaaaaaggtgcaaagcttatcgttgtagatcctagatttacaaaaagtgcagcaaaagcggatatttatgcaagaattcgtccaggaactgacattgctttcatgtatggaatgttaaaaatcatttttgatgaaggcttggaagatacaaaatatcttgatgaaagagtttttggaattgataaaattcgtgaagaagcagcaaaatggacagctgaagaagtggaaaatgttacagggatctctaaagaacttttggtgcaaatcactcacgaagtagctaaaaacaaaccaactacgcttatttgggctatgggtttaactcaacatactgtaggaacttcaaatacacgtttagcacctattgtgcaaatggtacttggaaatataggtaaatttggtggtggagttaatatcttacgcggacacgataatgttcaaggtgcttcagatatggcttgtttgagcgaaaatttaccaggttattatcctttaaatgaagcgacttggagatactatgccaaaatttggggtgtggattatgagtggcttttaggaaattttgtaagcaaagattggatgcataaaactgggctttcacttgctagatggtgggcagcggctttaaatggaaaagatggaaatgatgctatcgataatgcaggaacgcctttaaaagctttagtagttatgggaaatggtattacttcgactgcacaacaagtaaaagttaaagaaggtttggaagctttagagcttttagttttagccgatccttttgtaaatgaagcagggattattgcagaaagaaaagatggaatttatcttttacctgcagcaacacagtttgaaacaagcggaagtgtaacagcaacaaatcgtagcggacaatggagatttaaagttgtagatccactttatgaaagcatggaagatcaagaaattttatttgagcttgctaaaaaattaggtttttatgaagactttaccaagactttacgcgatgaaaaaggtgagattgtttggcctgaaaatgcaacaagagaaattgcaaaagcagttagaagtatagggcttaatggttggagtcctgaaaggcttaaaaagcatactttatactgggataaatttgatgaggtaactttagaaggaaaagacgaagttgctggcgagtattacgggcttccttggccttgttggagtgataagcacccaggttctcctgtgctttataataccgacattgaagtagcaaaaggtggtatgggctttagaaacaattttggacttgaatatgaaggagagagtttacttgctaaaaatgcacctttaaattcacctattgatacaggttatccacaaattactaaagataatatagaaaaagttttaggtattactttaagtgctcaagaaaaagaaaaaatgggatcaacttggtcttatgatgatagcaatatcatagcaactaaatgtatagaaaaaggcatagttccttatggaaatgctaaagctagagctgtagtttggacttttaaagataaaattccactccaccgtgagcctttacattctccaagaaacgatttggtgcaaaaatatccaagttttgaagatcaaaaagcgctttaccgcgtggatactaaatttgtttctgtgcaacaagctaaggattattctaaagaattcccgcttaatcttgttactgcaagacttgtgaatttaaatggtgcaggtatggaaaatagagcatctatgtatctaacgcgtttaacacctgaaatgttttgtgagatcaatcctcaattagcaaaagagcaagacattaaag

SEQ ID NO: 3791 - DNA, 22954 bp, synthetic construct
  source 1..22954: mol_type = other DNA
  misc_feature 1..22954: note = Synthetic
ttgaaagcgctattgctaaacatccaagtgtagcagaatcagctgtagtgagtattttggatgcgattaagggcgagtcactgtttgcttttgtggttttaagtcctgcatccagttgtgatcttggcggagctatagaaactttaaaagaacttaatgacattttaagagtagaaataggacctatagctaaaatagaaaaaattctttatactccaggtttgccaaaaactagaagtggtaaaataatgagaagaattttaagaactatagcaagaggtgaagaaatcaaacaggatatttcaacgctcgaagattctggagtagtagaaactattgttaaattagctaaggcagagtttgaataacaaggcaaaaagaactttgccttgttgcataaaaattcataaaaataagctataatgataaaaaaataaaaggaaatttttatgcttcaaacttgtattttccctgcggcaggttatgggacgagatttttacctgcaacaaaaactttacctaaagagatgttacctatcttaactaagcctttgatccattatggggttgatgaagctttggaagcaggaatggaaaatatgggctttgtcacagggcgtggaaaaagagctttggaggattattttgatatttcttatgaacttgagcatcaaatttcaggtacaaaaaaagaatacttacttgatgaaattcgctctttgatcaatcgttgcacctttacttttacaagacaaaatcaaatgaaaggattaggtgatgcggttttaaaaggtaaacctttggttggtgatgaagcttttggcgtaattttggctgatgatttgtgtgtcaacgaagaaggcttaaatgttatggctcaaatggtaaaaatttatgaaaaatatcgctgcaccatcatagctgtgatggaagtaccaaaagaacaagtttcaaactatggagtaatttttggaaattttgcagaagaaaatcttatcatggttaattctatgatagaaaaaccaagtcctgatgaagctccaagtaatcttgctatcataggaagatatattttaactcctgatatttttggaattttagaaaatactaaagcgggaaaaaatggcgaaattcaacttaccgacgcgcttttaactcaagcaaccaatggtatggttttagcttataaatttcaagggaaacgctttgattgtggaagtgtagaaggctttgtagaggctacaaattatttttacgagaaaagtaaatgttaaacaatacacttttttttaaacaaagtgaaattcacactataagctcttatgcaaatcgtattaatgatgaggtaaaaagtggagatatagggtattatcatcttattgacacgagcttaagcctgattgatgagagtttggcttttatcaaagacaaagaacacataaaaaatattgttttagtgggaatgggtggttcaagttgcggtgtaaaagccttgcgtgatatgctttttaatgaaaaaagtaatcaaagagaactttttatactcgataacacaagttcacattcttttaataagactttagaaaaaatcaagcttgaagaaagtttgtttttaatcatcagtaaaacaggtagcactatagaagtcgtatcgctttttaaacttcttattgaacattttaaacttgatatgcaagaattaaaaaaatactttgtttttattaccgataaggattcaaaacttcatcaagaaggtgaaaatttaggtattaaatgcttttttatccctgcaaatgtaggaggtcgttttagcatactttcagccgtaggtatagttccgctttgtttttgtggctataatgccaaagctcttttggaaggagctaaagcttgttttgaagatttttttactcacaaaaaagatgaaattttacaaaaagcctaccattattgcacgcataaaaatgccaatatcaatgtacttttttcatatagtgatgcttttaaaggctttaatgaatggtatattcagcttattgctgaaagtttaggtaaaaagcaaggctataaacgcataggtttgactcctattgcacttattggcgcaagagatcagcatagttttttacaactcatcatggatggacctaaaaataaaactgtaacttttttaaaaatcaaagacgctcaaaaagcacctattatccctgatattcattttaaatttttagattctttaagcaataaagtcaatcttcacgaacttttaaacgctcaatgtgatgcaactatgcacgctttaatcgctgaaaatttgagtgttgatgtgatagaacttgaaaaacttgacgcttggcatgcgggatatttgatgtattattatgaactttttacttcaacttgcggtgttatgctagggattaacacttatgatcaacctggtgtggaagttggaaagttgatcttaaaaaatatattaaattcttaatcaaaattcattaaaaaagagtataatgattttaagttaaaattataataaaaatttttaattaataataattattatttaagaattttatgttataattttaaaaattaaaaaaaggagtcaatcatgtcagttacaaaacaattattacaaatgcaagcagatgctcatcatctatgggttaaatttcataattatcactggaatataaaaggtttgcaatttttttctatacacgagtacacagaaaaagcttatgaagaaatggcagaactttttgatagttgtgctgaaagagttttacaacttggcgaaaaagctatcacttgccaaaaagttttaatggaaaatgcaaaaagtccaaaagttgcaaaagattgctttactccgcttgaagtcatagaactgatcaaacaagattatgaatatcttttagcagaatttaaaaaactcaatgaagaagcagaaaaagaaagcgatactacaacagctgcttttgcgcaagaaaatatcgcaaaatatgaaaaaagtctttggatgataggcgctactttacaaggtgcttgcaaaatgtaatttaaggggctttatgccccaattatacaaactaggttataatatccttttttaaaggataaaattttgaaagtacttaattttttttatgaaaaccaccctaaatttgaagtaagttatgaaagaaaaaatcaaatttcaaaaccaaatattatcataaaaggcccacgattttgtggtaaaaaaacacttatttttaattttttatctcaatttaaagcaagtgaaattttgtttttagatttatatgatacacgctttgaaaaacaaagtttagaaagacttgctgattttctgaatgaaaatttacaaattaaaattctttgcctttataatttggattttatccctaatttagaaaaaattaaaattcccatcatcttaagtacaaatataaaagatttaaatataaatgggtttgaagagcttgaactcgattattttgattttgaagaatttattagtgtaagtaagaaaaatttacctataaataatttagtaggtctttttttacaaagtggacgcagtaaatttggagaaaaaaacatacttctaagacaaagcttcactcttttagaattagaaattttaaagtatttagctttaaatttgggtcagcaaatcagtatttctaagatatttatagaactcaaaaaaagattaaaaacttcaaaagatagtgtttatcaagctataaaaaaattagaaaatacttatgtgatctatactttaaaacatgatgaaaaaaaacttcaaaagatttattttaaagattttggcctaagaaataatctttgtatttcaaaggatttttcacatttatttgaaaatttagttttaagcgagttgtttaaatttaaagaagaatttttttataacaaatactttaacttttatagccaaatatctaaaattgcttatatttcaagtccaactttagatattgatttgatcaagctacgtgctaagaaaattttaccaaaggctttagaacttggaatttttcatgtgatttttatcactctttcaagcgaggataatttttttgagcaaggggttaaatttgaagtcatatcttttgataaattttcacttggattttaggtgttgtttgagtttgtatcgtatttttcaaggttgtatcgtttgatgatttttgtaataagattgatataatatcccttgcgttcagaataagaatctaaagttttaatagcctctagccctgttatctctttgccttcgctttcaaatttagctcttgcatcgcgaaacttttcataagcaaaatgacgatttaaatttaaaacataagagtcaacactatcttgcagactatcaaaaattttaattttgtgttttttatctggatgtcttaaatcaggaattaaacctttctcaccccaagtccattctccaaaaagattgtttgcttctcttgcgaagcgactggtacctgtagcactttcaactaaagcttgggctatacccatggattttggaattttttgaatacgttttttatattctgcaaaatcataaagattttcaatgcgatatttgttttttatcgtgataagtttttcaagatttatttggtttgaagtcctaaagcctgttttgtaagcatctttaaaaaaggcttcgataaaggctctttcttgttcaatttttttaaagctttgatcaaacatttcattcatttttgtaaaaaaaatttgccttttttgatctatatcaagtttgtaatattcctctccaaatccactctttagatcatcagcggcaaaaagtgggattagaaaaagactaagaaaaattataattggcttcaaaacaatactttacctttccttcaaaaaacaattcttcatttttatatgcaaaccctacctcttcaccacttttaggagttattttaactttattttgtacttttttatttaaaaatgccagataaaaacaagcccccattcctgtgccacaagctaaggtttcatcttcaactccgcgttcataggtgcgaacttttaaatgattttcatctaaaatttttacaaaattaacattggcattatatttttgtctcattttttgacaaagcattgtatcaaattcatctaaattttgacaaaaatgtactagatgtggaactccagtgttgcaaagttgccaagtttttcctaattcttcaaaagtattttgcacgctttttattttgcctaaagatacttcaactttatcttgatttacctttgcttttattactcctgcaccagttaaaaaactcatgttaggatttattttgttaatatgatgtacaaaatgtgccgcagcccttgagccattgccacacatagcagcccttgagccatcgttattataaaattcccattcaaagtcgtatttttcatgaggtaatatcacgataaagccatccgcgcctataccctcataacgattacaaagttctttagctaaagcacttctatcttcttttctatcagcatttgttatgacaaaatcattcccacttgcacaatatttataaaatttcacatttttcctttagaaatttcttgtattactttaacacattcttgcctaaaatcggcataagaattagtatttttaatgataaaatctgcttttttaagtttttcttcaatatctatttgagaatcaagtcttgcttttgcagcttctaagctaagcttatctctttgcatgattcttttaaggcttaattctttaggtgtgtaaattacaatgactttgcctaaattttcataagcaccgctttcaaaaaaaagaggaatttctacaaaaaaagctttattttccttatctagaatttgcatttgttctaaaattttagctcgaattttaggatgagtgaaattttctaagatttttttagcttctttgttgttaaaaacaatttctccaaggatttttctatcgattttcttttcttttgtgagtaaattttttaaactaaagggagaaaaaatcttttcaagctctaaagcattttcatctaaaatttcatgagcgattttatctgcactaatgcttttaaagcctaaagaattcgctatttctataaaggtgcttttaccacaagcaattgaagcggttacaaaaaaagcatttttcatcttatgccttattaaaacttttttcgttaaaatacctttttagttcttaaaggaaaataaatgaaaatttcatatgaagatgcaggcgtaagtatagataatggaaatgcctttgtagaagctataaaacctttggttaaagaaacttttaatgataatgttgtaggcggaattggttcttttgctggtgcttttagaatgccaagtggttttaaaaagcctgtgattttaggtgcaacagatggggttggtaccaagcttcgcttggcaattgatgctaaaaaatatgatactatagggcaagatttagtagcaatgtgtgtgaatgatttgatttgtaattttgctacacctttgtttttcctagattattatgctacagccaagctcgaagtagaagtagcaaaggctgttgtatcaggcattgccaagggatgtaagatggcaaattgtgcattaatcggcggagaaactgctgaaatgcctggaatgtatgcaaaagatgattttgatcttgcgggttttgcagtgggtatggctgaagaagatgagattgatagaagtaaatttgttaaaaatggtgatattttgttggcacttcctagttcaggacttcattcaaatggctattctttagccagaaaagtactttttgaaagtttaaaattaaaatttgatgacaagatagagggtaaaaatttaatcgatattttattagaacctacaaggatttatgtgcgtgattttcttacactaaagccttatatcagtgctctagctcatattacagggggtggtttagtagaaaatttaccacgcgttttacctagtggtatgggtgcaactatacgcaaacatcatcttaaaactcctgaaattttttatactataggacaggctgtagaagaaagtgaaatgtatagaagctttaacatgggagtgggtttagtaatggttgtagatccttctaatgtaagtaaggttttagaaaattcagatgcctttattatcggcgaaatttgcattaatgaaggtattgttttagagtgaaaagaatttattttttaagatattttaagagtaaattaaaaaaataataaggaaaagtgatgaaaaatattgtctttcattcggatggttttggagatttattagtttgttttaaagctttgtatgctataaagcaactctatccagagtataaattatttttattaacaaatggattaatggaaagtgattttttagaaaaaattccatttattgatgaagttttgatttataaggatgattttttagaaaaaattcaaagcaaaaatccagtaatttttattaccacacgaagacaaggtttatattttaaaaaattaaaatttttaaatgttcaaaaatgtatagtattccctcatcttattagtataatttctaaaaatttaaccacacctttaccattttttagagctaaaaaacatatgagtgaaattgttttaaaattggttaggatgattaatactaggcattttgataaaaattttaatcaaattgatttttctaaaattaaaaatttattaccttatgatgcaagattaagtgataatttttttaaacaaattgatacaaaatatgaaaaaattataggtattaatgctttttcaaataatagcgaatatagaggatttaatttttttataaaagattggatagggcttgcaaggcaactttctttaaaatatcctaaatttttatttatacttttaaattttagtacgaattctattcagtataatattgatcagaatgcaaatttgaaagttttctgtaataataaaaatattgcttctttggtaagtatttctcaaaagctagattttttaattactgttgatactggaaatttacatctttgtgatattttacaaattcctactttggcttttacaagtagtcttgcagcttatagatttggaggtggaagttatggaggtagatttgataaattgatagtaaaaccagcttggcaaaaagaatatagaaaaatttatgaaatttttactaaaaaagcagaaaataatttagaaaatttatagtttttataaaataataaatatttattatttattatttaaagatactgctatttttgtagtgttttgttcttttggcaaaggattggtttgtgctagataaaaggctacgagtacatttacaagcatagcgataagcaaaagaggagtggttcgttttataatatccattggagctacttttgcaaatccagctaaagctatgattccgcctgctattggtgaagctgcacgacctaaacaagatgcaatttctataggtaaaactagagtaataggtgcaacgcctaattttgtagctatatcaggagctagttttccaaaagcattaaaagcagcaattccacttcccataatcactgtggcaaaataaactaaaaagcttaaaatagctatacttaaaagaattccaaaccatgcaaaatttcctgttccaagatttgaaaccgcgttagcaaggatattaactccaccaagtgctttaatgccttcagcaaatactccagcagcgatgattatgcttacgactgagataaaaatttcagccatagcttttaaaatcaccatcatatcttcgcctaattttctagcatttctgtgtcttgcaaattcaacaagaaaaactaaagaaatgcttacaaaatttgctgttacaacatcgagcttgatagtaaaaaaatacgctgtaaataaaaatacaacaggtaaccaaggaaagagtatgtaaaaagtagggcatctaggatcaatgatttgcggaatttcaacttcatcatttaaaacacctttttctttatctcttttatcaatccaagcaaaataaaaaggaatcaagatggcaataactacaacataggcaatcacactataaatttggtaatttaaaaaaagccctacgacattatcactttgtcctaccatatctgccatattgattgaatttccatcttttggaccataatcaagcgcaattaaagaaagcacacatacagctgtaataggacggattttaagtgagattaaaacaggataaatacatgctaacaaaagcaaaagcaatccagcatagctagaaatgacgatttttaaagccattccaacaacaaaagttccacttaaaatcaagtatttatttttgatttttcctaagggtttatttgccaaaaaagcaagttttgccgaagcattgatatgtttcatataagcagcaaaacctgccacactcatgataataagtcctactccagaaagctgacttttaaaagtcgctgtgataaaagcataactatcaagtaaaacattcaaaaagcttgcatgttctctgctcggggcttttggtataggtgttcctgtgatgtaaaaagcaaaaataagcaagataatacctgaaagaaaaaatacaaaaataggattgtattttttaagtatataataagcaacgacaattaccgctaaaagtgtagaacatatcataaaaattggcatgatttctcctaaagttattattagcttttattttattttagctaaaatttaactaataaatatttttcatttaaaattttacttattttttgcattataaaattaataatatgtatagtttggttactgaaaagtttatgtttgtataaaaaatgatttttatattataattataaacaaattataaatatcaaaaaggatctagtgtggcaagaattttggcatttgatataggaataagctctattggctgggcatttagcgaaaatgatgagttaaaagattgcggagttaggatttttacaaaggctgaaaatcctaaaacaggagaatccctagccttaccaagacgccttgcaagaagtgccagaaaacgccttgctagacgcaaagcaaggctaaatcacttaaaacatttaatcgcaaatgagtttaagttaaattacgaagattatcaaagctttgatgaaagtttagctaaggcttataaaggctctttaattagcccttatgagttaagatttagagctttaaacgagcttttaagtaagcaagattttgcaagagtgattttacatattgcaaaaaggcgtggctatgatgatattaaaaataatggtgatgaagaaaagagcgagattttaaaagctatcaagcaaaatgaagaaaaactagtaaattatcaaagtgtgggagagtatctttataaagagtattttcaaaaattcaaagaaaattccaaagaatttataaatgttagaaataaaaaagaaagttatgaacgctgcataacgcaaagttttttaaaagatgaattaaagcttatttttcaaaaacaaagagaatttggcttttctttttcaaagaaatttgaagaagaagtgcttagtgtagcattttataaaagggctttaaaagatttttctcatttagtgggaaattgtagtttttttactgatgaaaaaagagcgccaaaaaattcgcctttagcttttatgtttgtagcactcacaagaattatcaatattttaaacaatcttaaaaatactgaaggaattttatatacaaaagatgatttaaacgcccttttaaatgaagttttaaaaaacggcactctaacttataaacaaacaaaaaagcttttgggcttaagcgatgattatgaatttaaaggagaaaaaggaacttattttattgagtttaaaaaatacaaagaatttataaaagccctaggtgagcataatttaagccaagatgatttaaatgaaatagcaaaagatatcactcttataaaagatgagattaaacttaaaaaggctttagcaaaatacgatttaaatcaaaatcaaattgatagcttaagcaaattggaatttaaagaccatttaaatataagttttaaagccttaaaacttatcactcctttaatgcttgaaggtaaaaaatacgatgaagcttgcaatgagcttaatttaaaagtagcaatcaatgaagataaaaaagactttttacccgcatttaatgaaacttattacaaagatgaagtaactaatcctgtggttttaagggcgattaaagaatatagaaaaatcttaaatgccttacttaaaaaatacggtaaagtgcataaaataaacattgaattagcaagagaagtaggtaaaaatcacagccaaagagctaaaatagaaaaagagcaaaacgaaaactacaaggccaaaaaagacgccgaaattgaatgtgaaaaactaggcttaaaaataaatagcaaaaatattttaaaattaagattatttaaagaacaaaaagaattttgtgcttatagtggagaaaagattaaacttagtgatttgcaagatgaaaaaatgcttgaaattgaccatatttacccttattctagaagttttgatgattcttatatgaataaagttttagtttttaccaagcaaaatcaagaaaagcttaataaaaccccctttgaagcctttggcaatgatagtacaaaatggcagaaaattgaagttttggcaaaaaatttacctgaaaaaagcaaaaaagaattttagataaaaattacaaagacaaagagcaaaaagactttaaagatagaaatctaaacgatactcgctacatcgcaaggcttgttttaaactacactaaagattatttagattttttacctttaagcgatgatgaaaatacaaaattaaacgatacgcaaaaaggctcaaaagtgcatgtagaagcaaaaagcggtatgctaacatcggctttaaggcacacttggggctttagcgctaaggatagaaacaaccatcttcatcacgccatcgatgcagcaattattgcttatgcaaacaattctatcgtaaaggctttttcagattttaaaaaagagcaagaaagcaacagtgtagaactttatgcaaaaaaaattagtgaattagattataaaaacaaaaggaagttttttgagccttttagtggttttaggcaaaaggttttagataaaattgatgaaatttttgtctcaaaacctgagagaaaaaagccaagtggagctttacatgaagaaacatttagaaaagaagaagaattctatcaatcatacggcggaaaagaaggagttttaaaagccctagagcttggtaaaatccgcaaagtaaatggtaaaattgttaaaaatggcgatatgtttagagtggatatttttaaacacaaaaagacaaataaattttatgctgtgccaatttatactatggattttgctttaaaagtattaccaaataaagctgtagcgcgaagtaaaaaaggtgagataaaagactggattttaatggatgaaaattatgagttttgcttttctttatacaaagatagtttgattttaattcaaactaaagatatgcaagagccagaacttgtttattttaatgcttttacaagctctactgttagtttgattgtttcaaaacacgataataaatttgaaacgctaagcaaaaatcaaaaaatattgtttaaaaatgcaaatgaaaaagaagtaatcgcaaaaagcataggaattcaaaatctaaaagtatttgaaaaatacatagtttcagcacttggagaagtgacaaaggctgagtttagacaaagagaagattttaaaaaatgagttacgatgaagcttttaaaacactgcttattagctctaatgccaagctaaatttagagctaaatcatcttgtgattaagcaagatgaaaatatagccaaattgtttttaaaggatataaacatcatcgttttagaaagcttacaagtaagccttagttccgcactttttaacgcttttgcaaggcataaaattatcttattaacctgcgatgaaactcatagtataaatggtgtttttactccttttttagggcattttcaaagtgcaaaaatcgcaaaagagcaaatgaatgtaagtgctcaaaaaaaggctattttatggcaaaaaatcattaaaaacaaaatcctaaatcaagcctttgttttgaaaaaacacaataaaatagggcaaagcaatgagcttataaatttggctaaaaaagtaagcttaaatgatagtaaaaatatcgaagctgttgcagcggcgctttattttaaaactttgtttggcgtttctttttcaagagatgagctttgctttgaaaattctgctttaaattatggctatgcaatcattagggcttgtattattagagcagtttgtataagtgggcttttgccttggcttggcataaagcacgataatatttataattcttttgcactttgtgatgatttgatagaagtgtttagggctagtgttgatgattgtgttttaaagcttaagggtgaaagtgagtttttaagcaaagatgacaaaagagcgttgattggcaatttacaaagcaaaatcaattttgatgggcaaaattatcctttaaacagagcgataaatcattatgtggcgaattttaaaaatgctttattgtatgaagatgagctaaagatagtgaaatttgatgattgaagataaatttatgcgcgtgcttttgatgtttgatgtacctactaaaagtaaaaaagagcaaaaactagcaagtaaatttagaaacaatcttataaaattaggttattttatgctgcaatttagcgtttatatgcgtatttgcaagggtttaagttctgcaaaaagttctattgaaaatgtaaaaaagattttgccaccttatggaaatgtaagggctttaatcatcactgaaaagcaatttgataaaatggagcttttgcttggtggcatagtttttaatgaaaaagttaataacgaaactaatttaacgctttttgatatagatagtcatggagaatttaaatacaaaaattcaaataatgaagaaatacaactaaacaaaaaacaagaaaaatatcatcagcaaaatttatttgaattttaaaagcggttttaggggattgtaaccccgcagagtcccgcaaactctttattttagtccctttttaaatttcttattgagattatagcataatttttgctatttttcatgaaaaaaccccgaaattttcattatctggtaaatatctattttaccataaagaaatttaaaaagggactaaaacaattagattaataacttcgatatcattattattttaccataaagaaatttaaaaagggactaaaaaccctagtggattgaaactctgctagggctaattacttcactaaaaggaggtgcaaatttgaaacttattgaaatttagggttgattaaaatcgaaataaaattatttaaataattttaaggcataaagataatatctactaaactttcattttctaaaatttcacattcttttggtactaccataagggcagctttattgttaagattgtttataatcgcactagagccttctttcttaccttcaagattggctaaaatgcgtccatttttaaattccacattacaagcgacaaattccaaataaggtgtttttttcttgtagcttccttgtaaaaaggctttgcaaatatagtctttaggctgaagtaaccaagagtttaaaatctctcttgcgtaaagattaaacattaccatagccgagtaaggaaaacctggtaaggcgatgatgaatttttcattagccttggctattttgatatgtctacctggttttatgtcggctttatcgatgatgatttcgtattcttttacagctttttttaaaaagtcaaaatctcccatagaaactccgcctgttgtaatcaaaatatcacaactttgcaaagcactttcaagggtagaaaaagtggctttttcatcatcttttaaaagtggaaaaacccttgtatcgcaatttaaatttttagctaaattagctatggcgatatgatttgaagagcggatttgagcaggattttccaaggcttctcctagatctttgatctcacttccactacttaaaacccctacaataggctttataaacacactaatgtgaaaaaatccaagttcagccaaaagagctatttcgctataatttaactttgtgccttttttgagtaaaatttcatcttttttatagttttctcctactgcacgcacggcaaaagcttggggaacttttttttctataaaaagagtatcattttctacgcgtacattttcaacagggactaaagtatcacttccttcactcataagtgaacctgtaaaggtttttacacaagtaccattttgcacgctaaattgtggcatagtgcctgcaggtgtgaggcctaaaatttttaaaggcttatcttgatcttcaaatttgatcgcataaccatccatagccgaagttggaaattcaggctgatttttaggggcttttatgtcttgagctaaaatgcgtcctaaacactctgtaagagctattttttcaatcttttcataagttttgatatgagagtgtaaaatttttaaactttcttcataagacattaacattttttatccttttaaaagtcctgcaccgcaaagtttggttgatctttctttggcataaattctttctttgtttatcacatcatacttccaaataggtgcacttgctttaaaatcttcaacaaattcattaagaagtttaagtcctaattttctttgtttgcttaaaattcctgcaaaataagagctttcatgaaccgccacatcgcctatagagtgagcaaaaagcaagctaatatcatcaaaatctactcttttttgccactcatcaaaccatttttttaaaagcggttcataaatatcaaaactaagtgcctcaatgcctccttcttcacgcacaataccacaaaaagtcagcaaagcaccgcagtttttatccttggcaaattcataccattggctataaattttaggaatatctaaagaaccttgatagagtgtaaaatgtttcatttaacccccacaaactggcggtaaaagtgctattttatcaccatcttttaacttagtgttttcatcaaaaatgatttcatcgtttaaagatacggcacaaagttctagccattcttttaaactctcatctttttgcaaaatttcttttaattcttttaaattttttacctcaagctctaaattttctttatttatggggcctaaaaattccacttttatcattttattcctttacttctaaatttcccatcattcctaaatcttcatgttctaaaatatgacaatgatacattctaagtcctttaaaatcttgtttcattctaagtcttaactcttcattaggacgcacatttatagtatctcttaaggctctaaattcggctttttgaactttgccattgagttttgatgagatgagttcaaattgcgtgccgtgtatgtggaaaggatgatccatgtgagatttgtttatcactatccagtcttcaactactccaagtttggagcttaaatcaatgcgttttaaatcatagcttttgccattgattaaaaacatagacgcaagagcgatttttaattcgctttcactttttcccatcataccatgcatttgcatatgatcttcactcatgattatttctttaaattccttaggttcttctgaaggtttgaaaatttttaaattttttggaagttctacattttctttttttagactaatattagctaaaaatagggtattaggttcttcttttaccatcattttatccctatcataataagcactttctagcttaaaattcccatcttttggagcgtcgattaaaacttctacgcgagaagcaggacttaagaaaagttcttctttataaatagctttttctataagtccaccatcagtaccaacaagtataaacttagctccttgtatgcgtaaatttaaatatcttgctgcagtagcattataaatgcgtatgcgttcgtttgtggcgagtttgattttaggtttaaattgtccattaatgagtacaaattctccttctctaccatttagccaatcatttaggttgttgttcggaatttgagcgttttcatcaagacgcaaatcgctaatcatcaaatctttttcttttaaatgacttaaagcatctttttttgctttgatcacaaaagcccctgctaagcccataaaaacttgtttagaagtggtataatgagggtgtggatgataccagtaagttcctgcgctatcttgaggaatttcaaaacgatatattctttcttttcctgctaagataggatcatgtgggcttccatcttgatcaggtggcacaggaacgccatgccaatgtatagttgtagcttccttgagtttgtttttgactaaaatttcaagtttatctccttcaaaaacttctatttttggagcaggtactagaccattgtaagtataaaataaggtttttttacctttgataagctctatatgattttctttgatttctagggtagcacgaaaaatatttttttctttactttcatttttgagcaaaggcaaggcttttaaaatttctccttgggggaattgttttggatctaaaagttttaaattttttggagcaaagttgataaaagaagtatctaagtcatgatttatagaatgatttttatgcatagagtgcatatcgtgcataggatttgcataggctacacccatacttgctagagtaagtgcattaaattttaaaaaatttcttctattcattagtttttccttttgcttgattttttgtattatagtcattatttttttagttttagtaaatatttattttgaaaatttgatttaattttgttatgattttagcaatttaatcaaggaaaaataatgttttatgaaaaaattcaaactccagcttatattttagaagaagataaattaagaaaaaactgtgagcttttagcaagtgttggtgaaaaaagtggtgctaaagtgcttttagctttaaaaggttttgctttttcaggagcgatgaaaattgttggagaatacctaaaaggttgtacttgtagcggactttgggaagcaaaatttgctaaagaatacatggataaagaaattcatacttattcacctgcttttaaagaagatgaaataggtgaaatagccagtttatctcatcatatagtgtttaattctttagctcaatttcataaatttcaaagcaaaacacaaaaaaattccttaggtcttcgttgcaatgttgaattttctctagccccaaaagaactttacaatccttgtggaagatactcaagacttggaattcgtgctaaagattttgaaaatgtggatttaaatgctatagaaggacttcattttcacgcactttgtgaagaaagtgctgacgctttagaagctgttttaaaggtctttaaagagaaatttggtaaatggatagggcaaatgaaatgggtgaattttggaggaggacatcacatcaccaaaaaaggctatgatgttgaaaaacttattgctttgtgtaaaaatttcagcgataaatatggtgtacaagtttatcttgaaccaggtgaagcggtaggttggcaaacaggaaatttggttgctagtgtagtagatatcatagaaaatgaaaaacaaattgccattttagatacttcaagcgaagcacatatgccagatactatcatcatgccttatacaagtgaagttttaaatgctagaattttagccacaagagaaaatgaaaaaatttcagacttaaaagaaaacgaatttgcctatttacttactggaaatacttgtttagcgggtgatgtaatgggagagtacgcttttgataaaaagcttaaaatcggcgataaaattgtttttttagatcaaattcattacaccattgtgaaaaacacaacttttaatggtataagacttccaaatctcatgcttttagaccataaaaatgaacttcaaatgataagagaattttcttataaggattattctttaagaaattagtattatttataatttgcataaaatattaattttactcggaagagaatcaaagatataaattttatgcaaagtattttattttttcaaatataaaatcaactcaaatatctaattttcaatactttgatatgattttttaagattttaaatccttgtggaattttattgaaattcagtgatttttaaatcaaatagtattaagataaatcgatttaaaaatcggctttaaaatgaatattaggtatattttgcataatattcattcaagcaaaatttaaagctatttttgaaaattttgaatgcatggaggctttaatggatttggaaaaattaagattagctagaagtctttattatcaatgtctaggagagctttttgttttttcattttctgaagaaagattgtcaaaattacaagagtatttaaagacaatgcaagaatgtttatttgatgaaaatttaaaatcaaattttgatatcttgcttaagcatttagatgatgaaaattctatacaagcattttttaaagaatacgatttgctttttttaagtcttaaaaacagcattccaacgactttttcttacatagaagaaggttttgaaaattcaaatcctttactttgcgtgcgtcaaattttagtcaaaagtaaaataagacgcaatgaaaaattttttaaagaaagtgaagatagtgttggattttgtttattgttgatgagtgaatttttaaggcaaaatgaagatgatttagctaaagagctttttgaaaaagtgatcaataaaagcattgatgagtttttaggcgatgttttcatgaataaaaatgcgaatttatataaggaaattgcaagtattgcgatggcttttatggaatttgaaagactttgctttgaagtggaaaaacctgcaaaaataaattctaaaaaagtgcaaaatgatctatcgcgttcggaatttttaagaagagaagcaaataaacaaaggaggactcgtgaaaaatcgcagggaatttcttaaaaaatccgcttttgccttaggggctgctggagtgcttggtagcacaactttagctctagctaaagatgaagaaagaaaagatttggttaaaggtaaaagcaagaaaaaagaagtgctttttcaaagaagtgctaattgggaaaattattatataaaggctgagtaatgtcaagtgtaggtgaaaatatcaagcttacgcgtcgttcttttcttaaaatggcagcactttcaagtctagcaacaccgttgcttgctagaagtgaaactttaagagaagcgagtgctgatgagcttaaagaagcttatgaaggtagtaaaaaagtaaaaacagtttgtacagcctgttctgtaggctgtgggattattgcagaagtgcaaaatggtgtttgggtgcgtcaagaaatcgctcaagatcatcctgtgagttcaggtggacattgctgcaagggatctgatatgatcgatatggtgcgttcacatgtgcgtttaaaatatcctatgaaaaaagaaaatggagaatggaaacgcataagttatgagcaagctttaagtgagatcggagaaaaactagctgcttatcgtaaagaaaatcctgaaagtgttatgtttttaggttctgcaaaaatgagcaatgaacaagcttattatgtacgtaaatttgcagcgttttttggaacaaacaatgtagatcatcaagctagaatttgacacagcgcaacagtcgccggtgtggcgaatacatttggttatggcgctatgacaaaccatcttggagacattcaaagaagtaaatgtatcattatcattggggcaaatccagcggtaaatcatcctgtgggttttagacatttcttaaaagcaaaagaaaaaggtgcaaagcttatcgttgtagatcctagatttacaaaaagtgcagcaaaagcggatatttatgcaagaattcgtccaggaactgacattgctttcatgtatggaatgctaaaaatcatctttgatgaaggtttagaagatacaaaatatcttgatgaaagagtttttggaatcgataaaattcgtgaagaagcggcaaaatggacagctgaagaggtggaaaatgttacaggaatttctaaagaacttttggtgcaaatcactcacgaagtagctaaaaacaaaccaactacgcttatttgggctatgggtttaactcaacacactgtaggaacttcaaatacacgtttagcacctattgtgcaaatggtacttggaaatataggtaaatttggtggtggagttaatatcttacgcggacatgataatgttcaaggtgcttcagatatggcttgtttgagcgaaaatttaccaggttattatcctttaaatgaagcgacttggagatactatgccaaaatttggggtgtggattatgagtggcttttaggaaattttgtaagcaaagattggatgcataaaaccggactttcacttgctagatggtgggcagcggctttaaatggaaaagatggaaatgatgctatcgataacgcaggaacgcctttaaaagctttagtagttatgggaaatggtatcacttcgactgcacaacaagtaaaagttaaagaaggtttggaagctttagagcttttagttttagccgatccttttgtaaatgaagcaggcattattgcagaaagaaaagatggaatttatcttttacctgcagcaacacagtttgaaacaagcggaagtgtaacagcaacaaatcgtagcggacaatggagatttaaagttgtagatccactttatgaaagcatggaagatcaagaaattttatttgagcttgctaaaaaattaggtttttatgaagactttaccaagactttacgcgatgaaaaaggtgagattgtttggcctgaaaatgcaacaagagaaattgcaaaagcagttagaagtatagggcttaatggttggagtcctgaaaggcttaaaaagcatactttatactgggataaatttgatgaggtaactttagaaggaaaagatgaagttgctggtgagtattacgggcttccttggccttgttggagtgataagcacccaggttctcctgtactttataataccgacattgaagtcgcaaaaggtggtatgggctttagaaataattttggacttgagtatgaaggagagagtttacttgctaaaaatgcgcctttaaattcacctattgatacaggttatccacaaattactaaagataatatagaaaaagttttaggtattactttaagtgcccaagaaaaagaaaaaatgggatcaacttggtcttatgatgatagcaatatcatagcaactaaatgtatagaaaaaggcatagttccttatggaaatgctaaagctagagctgtagtttggacttttaaagataaaattccactccaccgtgagcctttacattctccaagaaacgatttggtgcaaaaatatccaagttttgaagatcaaaaagcgctttaccgcgtggatactaaatttgtgtctgtgcaacaagctaaggattattctaaagaattcccgcttaatcttgttactgcaagacttgtgaatttaaatggtgcaggtatggaaaatagagcatctatgtatctaacgc

SEQ ID NO: 3792 - DNA, 22954 bp, synthetic construct
  source 1..22954: mol_type = other DNA
  misc_feature 1..22954: note = Synthetic
caggcgatgaggcttttggtgtgattttggctgatgatttgtgtatcaatgaagagggtgttaatgtgatggcacaaatggttaaaatttatgaaaaatatcgttgcaccatcatagctgttatggaagttccaaaagagcaagtatcaagttatggagtgattgcaggaaatttcgtagaagaggatttgatcatggtaaattcaatgatagaaaaaccatctcctcaagaagctccaagcaatcttgctatcataggaagatatattttaactcctgatatttttggaattttagaaaatactaaagcaggaaaaaatggagaaattcaactcacagatgcacttttaacccaagcgactaatggtatggttttagcttacaaatttaagggaaaacgctttgattgcggaagtgtagagggctttgtagaggctacaaattatttttatgagaaaagtaaatgctaaataatactcttttttttaaagaaagtgaaattcgcactataagttcttatgcaaatcgtatcaatgatgaagtagaaagtggggatatagggtattatcatcttatcgatacaagtttaaccttaatagacgaaagcttaaatttcattcaagataaagagcatgtaaaaaatatcgttttagtgggtatgggtggttcaagttgcggtgttaaagctttgcgtgatatgctttttgatgaaaaaagtaatcaaagagaactttttatacttgataataccagttcgcactcctttagcaggactttagagaaaatcaagcttgaagaaagtttgtttttaatcatcagtaaaacaggtagcactatagaagtagtatcgctttttaagcttcttatagaacattttaaactcgatatacaagaattaaaaaaatactttatttttatcacagataaagattctaaactgcataaagagggtgagaatttaggcatcaaatgcttttttatccctgcaaatgtaggagggcgttttagcatactttcagctgtgggtatagtgccactttgtttttgtggttataatgctaaagctcttttagaaggagctaaggcatgctttgaagatttttttatacataaaaaagatgaaattttgcaaaaagcttatcattattgtactcacaaaagtgcaaatatcaatgtacttttttcttacagcgatgcttttaagggttttaatgaatggtatatccagcttattgctgaaagtttgggtaaaaaacaaggctacaaacgcataggtttaactcctatcgctcttataggagcaagggatcagcacagctttttacaactcattatggatgggccaaaaaacaaaactattacttttttaaaaatcaaagatagtcaaaaggctccggttatacccgatatccattttaaatttttagatgatttgagcaataaagtcaatttacacgatcttttaaatgctcaatgtgacgcgacaatgcatgctttaattgctgaaaatttaagtgtcgatataatagagcttgaaaaattagatgcatggcatgcgggatatttgatgtattattatgagctttttacttcggcttgtggggtaatgctaggaattaatacttatgatcagcctggggttgaggttgggaagttgattttaaaaaatattttaaaatcatagtaaattttaaataaaaagagtataatagaaataagtaaaattaataataaaaatttttaactaataataattattatttaaggattttatgttataattttaaaaattaaaaaaaggagttaacatgtcagtaacaaaacaattattacaaatgcaagcagatgctcatcatttatgggttaaatttcacaattatcattggaatgttaagggtttacagttttattcaatccacgaatatacagaaaaagcttatgaagaaatggcagagctttttgataattgcgcagaaagagctttgcaacttggtgaaaaagctatcacttgccaaaaaactttaatggaaaatgcaaaaagtccaaaagtagaaaaagattgtttcactccagttgaagtgatggagttgatcaaaaaagattacgaatatcttttggcagaatttaaaaaattaaacgaagaagctgaaaaagctagcgatactactacagctgcttttgctcaagaaaatatagcaaaatacgaaaaaagcctttggatgcttgcttcagttttacaaaatacttgcaaaatgtaatttcaaggggctttttgcccctttatgatttaaatcaatttttagaactttctcataaaaaaacttaaattctcaagagtcaaatttaaagaaaaatttatattttgattttaagcaaaataaaaatactctaatacatttatatcattacaccttactttctcgtgctgcttatcttaatttaaatacaacagatatttttttaaatatagatagaaaaacattgtttaaggttttaactcataatatttttcaaaaagaatgcgttataataggaaaatttgagcctttgatggcattttattttattaagcgatttgatttacttgctcatattaatgaagattatcttgattcaagaggtgggtttagagcaagtttatttcaaaacaaggaaaataaagaatttattttagctatcgcaggaagtgatttaagacctttaaaatttgatattggagatttgattagtgattttatacttctaaatggaaaaattcctaaaaaacaatttgattctttgttaaaattttatacactaataaaaaaagaattttgctttggtaaaattactttagtaggacattctttaggtgggcatttagcacagctttttgttttagattttgccttagaagttcaaaatatttacacttttcaagccccaggtattgctaaaaaaatactaaaggacatcaaaaatgaagcttatatccaaaaaatttcttatcattttcatacttgtggtgattttaaaaaaatgcatggtataaatttaattttgttcaaaatttgcattctaaaataggatatccaatttggctaaatataggaaataaattccatcatcctaagatttgtcccaagatattgcataaggttttaaatatgttataattttcctttttaaaaggataatatttgaaagtattaaattttttttacgaaaatcatcccaaatttgaaataagctatgaaagaaaggtacaaattcctctttgtaatatcatcatcaaagggccaaaatttagcggtaaaaaaaccttgatttttaactatttatcccaatttaagcccaatgaaattttatttttaaatttgtatgatactcgttttgaaaaccaaagcttagggcatctttcaaattttttagaaaaaaatgtccaaataaaattcctttgcatatataatgtcgaatttgccttaaatttgcaagatattaaaattcctatcatcataagtacagataaaaaagatttgcatatcgaaggatttcaagagcttgagcttgattattttgactttgaagagtttgtaagtatcagtagaaaaaatttaccgataaacaatctagtcggactttttttgcaaagtgggcgtagtaaattaggcgaaaaaaatacacttttaagacaaaattttaacactctagaacttgaaattttaaaatacttagctttaaatttaggacagcagatcagtatttccaagctttttttagagcttaaaaaaaagctaaaaacatctaaagatagcgtttatcacaccataaaagagcttgaaaatacctatatcatccatcctataagccacgatgaaaaaaagcttcaaaaaatttattttagggattttggcttaagaaacaatctatgcatacaaaaagattttgctcatttgtttgaaaatcttattttaaatgagctttttaaatttaaacaagaatttttttacaataaattttttacattttatagtaaggtttcaaaaatcgcatatatttccagtccgacgctagatatagacttgatcaaattgcgcgctaagaaaatcctttctaagagtttggagcttgggatttttcatgtggttttcatcactctttcgagcgaagatagcttttttgagcaaggggtgaaatttgaagttttgccttttgataaattttcacttggcttttagctaagactagaaagattttggagtatcgtatcgctcaagatcgtatcgttggatgattttagtaacgatattgatataataacccttgcgctcggagtaagaatctaaagttttaatagcctctagtcctgttatttctttgccttcactttcaaatttagctctttcgttgcgaaattcctcataagcaaagtgccgatttaaattcagcacataagaatccacactatcttgcaagctatcaaaaattctaattttatgttttttatcaggatatcttagatcagggattaagcccttttctccccaggtccattctccaaaaagattatttgcctctcttgcaaaacggcttgttcccatagcactttcgaccaaagcttgggctatacccatggattttggaattttttgaatgcgttttttgtattctgtaaaatcataaagattttcaacgcggtatttgtttttaagattgattaatttttctagattgttttggtttgaatttctaagtccatttttatacgcatcgtaaaaaaaagcttctacaaaagccctttctttggctatttcttcaaagcttttatcaaacattgcattcattttggtgaaaaatatttgtcttttttgctctacattgagtttataatactcctctccaaagccatttttaagctcgctattgccaaaaagagggagtaaataaaaactaagaaaaattataattcgcttcaaaacaatactttacctttccttcaaaaaacaattcttcatttttatatgtaaacccaacctcttcaccacttttaggagttattttaactttattttgtacttttttatttaaaaatgccagataaaaacaagcccccattcctgtgccacaagctaaggtttcatcttcaactccgcgttcatacgtacgaacttttaaatgattttcatctaaaatttttacaaaattaacattggcattatatttttgtctcattttttgacaaagtattgtatcaaattcatctaaattttgacaaaaatgtactagatgtggaactccagtgttgcaaagttgccaagtttttcctaattcttcaaaagtattttgcacgctttttattttgcctaaagatacttcaactttatcttgatttacctttgcttttattattcctgcaccggttaaaaaactcatgttaggatttattttgttaatatgatgtgcaaaatgtgccgcagcccttgagccattgccacacatagcagcccttgagccatcgttattataaaattcccattcaaagtcgtatttttcatgaggcaatatcacgataaagccatccgcacctataccctcataacgattacaaagttctttagctaaagcacttctatcttcttttctatcagcatttgttatgacaaaatcattcccacttgcacaatatttataaaatttcacatttttcctttagaaatttcttgtattactttaacacattcttgcctaaaatcggcataagaattagtatttttaatgataaaatctgcttttttaagtttttcttcaatatctatttgagaatcaagtcttgcttttgcagcttctaagctgagtttatctctttgcatgattcttttaaggcttaattctttaggtgtgtaaattacaatgactttgcctaaattttcataagcaccgctttcaaaaaaaagaggaatttctacaaaaaaagctttattttctttatctagaatttgcatttgttctaaaattttagctcgaattttaggatgggtgaaattttctaaggtttttttagcttctttattattaaaaacaatttctccaagaatttttctatctatcttaccttctgctttcaataaattttttttgtgaaatttagaaaaaatttcagctagttccaaagcatatttatctaaaatttcatgagcgatgctgtctgcgctaatgcttttaaagcctaaagaatttgctatttctataaaagtgctttttccacaggctatagaggcggttacaaaaaaagcgtttttcatcttatgccttattaaaacttttttcgttaaaatatctttttagttcttaaaggaaaataaatgaaaatttcatacgaagatgctggagtaagtatagataatggcaatgcctttgtagaggcgatcaaacctttggtaaaagaaacctttaacgataaagttgtaggaggtattggttcttttgctggtgcttttaaaatgccaagtggttttaaaaagcctgtgattttaggtgcaacagatggggttggtaccaagcttcgcttggcaattgatgctaaaaaatatgatactataggacaagatttagtagcaatgtgcgtgaatgatttgatttgtaattttgctatgcctttgtttttcctagattattatgctacagccaagctcgaagtagaagtagcaaaggctgttgtatcaggcattgccaagggatgtaagatggcaaattgtgcattaattggcggagaaactgctgaaatgcctggaatgtatgcaaaagatgattttgatcttgcgggttttgctgtgggtatggctgaagaagatgagatcgatagaagtaaatttgttaaaaatggtgatattttattggcacttcctagttcaggacttcattcaaatggttattctttagctagaaaagtactttttgaaagtttaaaattaaaatttgatgacaagatagagggtaaaaatttaattgatattttgttagaacctacaaggatttatgtgcgtgattttcttacattaaagccttatatcagtgctctagctcatattacagggggtggtttagtagaaaatttaccacgcgttttacctcgtggtatgggtgcaactatacgcaaacatcatcttaaaactcctgaaattttttatactataggacaggctgtagaagaaagcgaaatgtatagaagctttaatatgggagtgggtttagtaatggttgtagatccttctaatgtaagtagggttttagaaaattcagatgcctttattatcggcgaaatttgcattaatgaaggtattgttttagagtgaaaagaatttattttttaagatattttaagagtaaattaaaaaaataataaggaaaagtgatgaaaaatattgtctttcattcggatggttttggagatttattagtttgttttaaagctttgtatgctataaagcaactctatccagagtataaattatttttattaacaaatggattaatggaaagtgattttttagaaaaaattccatttattgatgaagttttgatttataaggatgattttttagaaaaaattcaaagcaaaaatccagtaatttttattaccacacgaagacaaggtttatattttaaaaaattaaaatttttaaatgttcaaaaatgtatagtattccctcatcttattagtataatttctaaaaatttaaccacacctttaccattttttagagctaaaaaacatatgagtgaaattgttttaaaattggttaggatgattaatactaggcattttgataaaaattttaatcaaattgatttttctaaaattaaaaatttattaccttatgatgcaagattaagtgataatttttttaaacaaattgatacaaaatatgaaaaaattataggtattaatgctttttcaaataatagcgaatatagaggatttaatttttttataaaagattggatagggcttgcaaggcaactttctttaaaatatcctaaatttttatttatacttttaaattttagtacgaattctattcagtataatattgatcagaatgcaaatttgaaagttttctgtaataataaaaatattgcttctttggtaagtatttctcaaaagctagattttttaattactgttgatactggaaatttacatctttgtgatattttacaaattcctactttggcttttacaagtagtcttgcagcttatagatttggaggtggaagttatggaggtagatttgataaattgatagtaaaaccagcttggcaaaaagaatatagaaaaatttatgaaatttttactaaaaaagcagaaaataatttagaaaatttatagtttttataaaataataaatatttattatttaaagatactgctatttttgtagtgttttgttcttttggcaaaggattggtttgtgctagataaaaggctacaagcacatttacaagcatagcgataagtaaaagaggagtggttcgttttataatatccattggagctacttttgcaaatccagctaaagctatgattccgcctgctattggtgaagctgcacgacctaaacaagatgcaatttctataggtaaaactagagtaataggtgcaacgcctaattttgtagctatatcaggagctagttttccaaaagcattaaaagcagcaattccacttcccataatcactgtggcaaaataaactaaaaagcttaaaatagctatactcaaaagaattccaaaccatgcaaaatttcctgttccaagatttgaaaccgcgttagcaaggatattaactccaccaagtgctttaatgccttcagcaaatactccagcggcgatgattatgcttgcgactgagataaaaatttcagccatagcttttaaaatcactatcatatcttcgcctaattttctagcatttctgtgtcttgcaaattcaacaagaaaaactaaagaaatgcttacaaaatttgctgttacaacatcgagcttgatagtaaaaaaatacgctgtaaataaaaatacaacaggtaaccaaggaaagagtatgtaaaaagtagggcatttaggatcaatgatttgcggaatttcaacttcatcatttaaaacacctttttctttatctcttttatcaatccaagcaaaataaaaaggaatcaagatggcaataactacaacataggcaatcacactataaatttggtaatttaaaaaaagccctacgacattatcactttgtcctaccatatctgccatattgattgaatttccatcttttggaccataatcaagcgcaattaaagaaagcacacatacagctgtaataggacggattttaagtgagattaaaacaggataaatacatgctaacaaaagcaaaagcaatccagcatagctagaaatgacgatttttaaagccattccaacaacaaaagttccacttaaaattaagtatttattttttgatttttcctgagggtttatttgctaaaaaagcaagttttgccgaagcattgatatgtttcatgtaagcagtaaagcctgccacactcatgataataagccctgctccagaaagctgacttttaaaagtcgctgtgataaaagataactatcaggtaaaacatttaaaagcttgtatactctctgcttggagtttttggtataggtgttcctgtgatataaaaagcaaaaataagcaagataatatttgaaagaaaaatacaaaaatgggatcgtatttttttgagtatatcataaaaattagcatagggtctcttgaatttacaataaattggattttatctaaatttttaaataaaaaatattttttatttaaaaattacttgttttttgtattataaaattaacatatatagtttggttactgaaaagtttatgtttgtttaaaaaaatgatttttgtattataattatacacaaatcataaatattaaaaaggatctagtgtggcaagaattttggcatttgatataggaataagctctattggctgggcatttagtgaaaatgatgagttaaaagattgtggagttaggatttttacaaaggctgaaaatcccaaaacaggagaatccttagccttgccaagacgccttgcaagaagtgctagaaaacgccttgctagacgcaaagcaaggctaaatcacttaaaacatttaatcgcaaatgaatttaagttaaattacgaagattatcaaagctttgatgaaagtttagccaaggcttataaaggatctttaattagcccttatgagttaagatttagagctttaaacgagcttttaagtaagcaagattttgcaagagtgattttacatattgcaaaaaggcgtggctatgatgatattaaaaatagtgatgataaagaaaaaggtgcgattttaaaagctatcaagcaaaatgaagaaaaactagcaaattatcaaagtgtgggcgagtatctttataaagagtattttcaaaaattcaaagaaaattccaaagaatttacaaatgttagaaataaaaaagaaagttatgaacgctgcatagcgcaaagttttttaaaagatgaattaaagcttatttttaaaaaacaaagagaatttggcttttctttttcaaaaaaatttgaagaagaggtgcttagtgtagcattttataaaagggctttaaaagatttttctcatttggtgggaaattgtagtttttttaccgatgaaaaaagagcgccaaaaaattcgcccttagcttttatgtttgtagcacttacaagaattatcaatcttttaaacaatcttaaaaatactgaaggaattttatatacaaaagatgatttaaacgcccttttgaatgaagttttaaaaaacggcactctaacttataaacaaacaaaaaagcttttgggcttaagcgatgattatgaatttaaaggggaaaaaggaacttattttattgagtttaaaaaatataaagaatttataaaagccttaggtgatcatagtttaagccaagatgatttaaatgaaatagcaaaagatattacccttataaaagatgagattaagcttaaaaaggctttagcaaaatatgatttaaatcaaaatcaaattgatagtttaagcaaattggaatttaaagaccatttaaatataagttttaaagccttaaaacttatcactcctttaatgcttgaaggtaaaaaatacgatgaagcttgtaatgagcttaatttaaaagtagcaatcaatgaagataaaaaagattttttacccgcatttaatgaaacttattataaagatgaggtaactaatcctgtggttttaagggcgattaaagaatacagaaaggtcttaaatgctttacttaaaaaatacggcaaagtgcataaaataaacattgaattagcaagagaagtaggtaaaaatcacagccaaagagctaaaatagaaaaagagcaaaacgaaaactacaaggccaaaaaagacgccgaacttgaatgtgaaaaactaggcttaaaaataaatagcaaaaatattttaaaattaagattatttaaagaacaaaaagaattttgtgcttatagtggagaaaagattaaaattagtgatttgcaagatgaaaaaatgcttgaaattgatcacatttacccttattctagaagttttgatgattcttatatgaataaagttttagtttttaccaagcaaaatcaagaaaaacttaatcaaaccccctttgaagcctttggcaatgatagtgcaaaatggcagaaaattgaagttttagcaaaaaatttacctactaaaaagcaaaaaagaattttagataaaaattacaaagacaaagagcaaaaagactttaaagatagaaatctaaacgatactcgctacatcgcaaggcttgtttaaactacactaaagattatttagattttttacctttaagcgatgatgaaaatacaaagttaaacgacacacaaaaaggctcaaaagtgcatgtagaagcaaaaagcggtatgcttacatcggctttaagacacacttggggctttagcgctaaggatagaaataaccatcttcatcacgccatcgatgcagtaattattgcttatgcaaacaactctatcgtaaaggctttttcagattttaaaaaagagcaagaaagcaacagtgcagaactttatgcaaaaaaaattagtgaattagattataaaaacaaaaggaagttttttgagccttttagtggttttaggcaaaaggttttagataaaattgatgaaatttttgtctcaaaacctgagagaaaaaagccaagcggagctttacatgaagaaacatttagaaaagaagaagaattctatcaatcatacggcggaaaagaaggagttttaaaagccctagagcttggtaaaatccgcaaagtaaatggtaaaatagttaaaaatggcgatatgtttagagtggatatttttaaacacaaaaagacaaataaattttatgctgtgccaatttatactatggattttgctttaaaagtattaccaaataaagctgtagcacgaagtaaaaaaggtgagataaaagactggattttaatggatgaaaattatgagttttgcttttctttatacaaagatagtttgattttaattcaaactaaagatatgcaagagccagaatttgtttattataatgcttttacaagctctactgttagtttgattgtttcaaaacacgataataaatttgaaacgctaagcaaaaatcaaaaaatattgtttaaaaatgcaaatgaaaaagaagtaatcgcaaaaagcataggaattcaaaatctaaaagtatttgaaaaatacatagtttcagcacttggggaagttacaaaggctgagtttagacaaagagaagattttaaaaaatgagttacgatgaagcttttaaaacactgcttattagctctaatgccaagctaaatttagagctaaatcatcttgtgattaagcaagatgaaaatatagccaaattgtttttaaaagatataaatatcatcgttttagaaagcttacaagtaagcattagttccgcactttttaacgcttttgcaaggcataaaatcatcttgctaacctgcgatgaaactcatagtataaatggtgtttttactccttttttagggcattttcaaagtgcaaaaatcgcaaaagagcaaatgaatgtaagtgctcaaaaaaaggctattttatggcaaaaaatcattaaaaataaaatcctaaatcaagcctttatcttaaaaaaatacaataaaatagagcaaagcaatgagcttataaatttggctaaaaaagtaagcttaaatgatagtaaaaatattgaagctgttgcggcggcgctttattttaaaactttgtttgggacttctttttcaagagatgagctttgctttgaaaattctgctttaaattatggctatgcaatcattagggcttgtattattagagcagtttgtataagtgggcttttgccttggcttggcattaagcacgataatatttataattcttttgcgctttgtgatgatttgatagaagtgtttagggctagtgttgatgattgtgttttaaagcttaagggtgaaagtgagtttttaagcaaagatgacaaaagagcgttgattggcaatttacaaagcaaaatcaattttgatgggcaaaattatcctttaaacagagcgataaatcattatgtggcaaattttaaaaatgctttattgtatgaagatgaactaaagatagtgaaatttgatgattgaagataaatttatgcgcgtgcttttgatgtttgatgtacctactaaaagtaaaaaagagcaaaaactagcaagtaaatttagaaacaatcttataaaattaggttattttatgctgcaatttagcgtttatatgcgtatttgcaagggtttaagttctgcaaaaagttctattgaaaatgtaaaaaagattttgccaccttatggaaatgtaagggctttaatcatcactgaaaagcaatttgataaaatggagcttttgcttggtggcatagtttttaatgaaaaagttaataacgaaaccaatttaacactttttgatatagatagtcatggagaatttaaatacaaaaattcaaataatgaagaaatacaactaaacaaaaaacaagaaaaatatcatcagcaaaatttatttgaattttaaaagcggttttaggggattgtaaccccgcagagtcccgcaaactctttattttagtccctttttaaatttcttatgagattatagcataatttttgctatttttcatgaaaaaaccccgaaattttcattatctggtaaatatctattttaccataaagaaatttaaaaagggactaaaactactcctattcttaaaaaaagctcaagtgaattttaccataaagaaatttaaaaagggactaaaacttataggtaaaatgaacgataatgcagaaaattttaccataaagaaatttaaaaagggactaaaacatttgtcaagtgtttttactgaaattatttattttaccataaagaaatttaaaaagggactaaaacatatatatcttttcctatgcgctcttgattattttaccataaagaaatttaaaaagggactaaaacaataattggttttcacaattaagcaatttaattttaccataaagaaatttaaaaagggactaaaacaacattttattccttttcacttgaaaataaattttaccataaagaaatttaaaaagggactaaaacttatatattctacaaagctgtaaaaagtttattttaccataaagaaatttaaaaagggactaaaactggttgcttcgttcaatcaaaaacaggtgcattttaccataaagaaatttaaaaagggactaaaataataatggctaaatatttcatgagaatggaattttaccataaagaaatttaaaaagggactaaaataaaccctagtggattgaaactccgctagggctaattactccactaaaaggaggttgcgaatttgaaacttattgaaatttagggttgattaaaatcgaaataaaattatttaaataattttaaggcataaagataatatccactaaactttcattttctaaaatttcacattcttttggcgccaccataagggcagctttattgttaagattgtttataatcgcactagagccttcttttttgccttcaagattggctaaaatgcgtccattttcaaactttatgttacaagcgacaaattccaaataaggtgtttttttcttgtaacttccttgtaaaaaggctttgcaaatatagtctttaggctgaagtaaccaagagtttaaaatctctcttgcgtaaagattaaacattaccatagccgagtaaggaaaacctggtaaggcgatgatgaatttttcattagccttagctattttgatatgtctacctggttttatgtcggctttatcgatgatgatttcgtattctttgatggctttttttaaaaagtcaaaatctcccatagaaaccccgcccgttgtaaccaaaatatcacaactttgcaaagcactttcaagggtggaaaaagtggctttctcatcatcttttaaaagaggaaaaacccttgtatcgcaatttaaatttttagctaaattagctatggcgatatgatttgaagagcggatttgagcaggattttccaaggcttctcctagatctttgatctcacttccactacttaaaacccctacaataggctttataaacacactaatgtgaaaaaatccaagttcagctaaaagagctatctcgctataatttaactttgtgccttttttgagtaaaatttcatcttttttatagttttctcctaccgcacgcacggcaaaagcttggggaacttttttttctataaaaagagtatcattttctatgcgtatattttcaacagggactaaagtatcgcttccttcgctcataagtgatcctgtaaaggttttgacacaagtattgttttctactttaaattcaggcatagtgcccgcaggtgtgaggcctaaaatttttaaaggcttgtcttgatcttcaaatttgatcgcataaccatccatagccgaggttggaaattcaggctgatttttactcgcttttatatcttgagctaaaatgcgtcctaaacactctgtaagagctattttttcaatcttttcataagttttaatatgagaatgtaaaatttttaaactttcttcataagacattaacattttttatccttttaaaagtcctgcaccgcaaagtttggttgatctttctttggcataaattctttctttgtttatcacatcatacttccaaatgggtgcacttgctttaaaatcttcaacaaattcattaagaagtttaagtcctaattttctttgtttgcttaaaattcctgcaaaatacgagctttcatgaaccgccacatcgcctatagagtgagcaaaaagcaagctaataccatcaaaatctactcttttttgccactcatcaaaccatttttttaaaagcggttcataaatatcaaaactaagtgcctcaatacctccttcttcacgcacaataccacaaaaagtcagtaaagcaccgcagtttttatccttggaaaattcataccattggctataaattttaggaatatctaaagagccttgataaagtgtaaaatgtttcatttagcctccacaaactggcggtaaaagtgctattttatcaccatcttttaacttggtgttttcatcaaaaatgatttcatcatttaaagatacagcacaaagttctagccattcttttaaactctcatctttttgcaaaatttcttttaattcttttaaattttttaccttaagttctaaattttctttatttatagggcctaaaaattccacttttaccattttattcctttacttctaaatttcccatcattcctaaatcttcatgttctaaaatatggcaatgatacattctaagtcctttaaaatcttgtttcattctaagtcttaattcttcattaggacgcacatttatagtatctctgaaggctctaaattcggctttttgaactttgccattgagttttgatgagatgagttcaaattgcgtgccgtgtatgtggaaaggatgatccatgtgagatttatttatcactatccagtcttcaactactccaagcttggagcttaaatcaatgcgttttaaatcatagcttttgccattgattaaaaacatagacgcaagagcgatttttaattcgctttcactttttcccatcataccatgcatttgcatatgatcttcactcatgattatttctttaaattccttaggttcttctaaaggtttgaaaatttttaaattttttggaagttctacattttctttttttaggttaatattggctagaaatagggtattaggttcttcttttaccatcattttatccctatcataataagcactttctagcttaaaattcccatcttttggagcgtcgattaaaacttctacgcgagaagcaggacttaagaaaagttcctctttaaaaataggtttttctataagtcctccatcggtaccaacaagtataaacttagctccttgtatgcgtaaatttaaatatcttgccgcagtagcattataaatgcgtatgcgttcgtttgtggcgagtttgattttaggtttaaattgtccattgatgagtacaaactcaccctctctaccattaagccaatcatttaggttgttgtttggaatttgagcattttcatcaaggcgcaaatcactaatcatcaaatctctttcttttaaatgacttaaagcatcttttttcgccttaatcacaaaagctccagccaatcccataaaaacttgcttagaagtagtgaaatgtgggtgtggatgataccaataagtccctgcgctatcttgaggaatttcaaatcgatatattctctcctctcctactaagataggatcatgtgggcttccatcttgatcaggtggtacaggaacgccatgccaatgtatagttgtagcttctttgagtttatttttgactaaaatttcaagtttatctccttcaaaaacttctatttttggagcaggtactaggccgttgtaagtataaaataaggtttttttacctttgataagctctatatgattttctttgatttctagggtagcgcgaaaaatatttttttctttgctttcatttttgagcaaaggcaaggcttttaaaatttttccttgggggaattgttttggatctaaaagctttaaattttttggagcaaagtttataaaagaagtatctaaatcatgatttatagaatgatttttatgcatggagtgcatatcatgcataggatttgcataggctacactcatacttgctagagtgagtgcattaaattttaaaaaatttcttctattcattagtttttccttttgcttgattttttgtattatagtcattatttctttagttttagtaaatatttattttgaaaatttggtttaattttgttatgattttagcaatttaatcaaggaaaaataatgttttatgaaaatattcaaaccccagcttatattttagaagaagataaattaagaaaaaattgtgagcttttagcaagtgttggtgaaaaaagtggtgctaaagtgcttttagctttaaaaggttttgctttttcaggagcgatgaagattgtaggtgagtatcttaaaggctgtacttgtagcgggctttgggaagcaaaatttgctaaagaatatatggataaagaaattcatacttattcgcctgcttttaaagaagatgaaatgagtgagattgctcatttgtctcatcatattgtttttaattctttgtatcaatttgataaatttaaatccttgtgtactaataactccttaggacttcgttgcaatttagaattttcttttgctcctaaagagctttataatccttgcgggaaatactctagactagggattttgagcaaggatttagaaaattttgatttaagcggagtagaaggacttcattttcatgcactttgtgaagagagtgcagatgctttagaagctgttttgaaggtttttgaagagaaatttggcaaatggatcaagcagatgaaatgggtcaattttggcggggggcatcatattacaaaacaaggctatgatatccaaaaaatcatcactctttgtaagaattttagtgataaatacggtgtgcaagtttatcttgagccaggagaagctgtgggttggcaaagtggggttttagtagcgagcgtagtggatatagttgaaaatgagaaaagaattgctattttagacacttcaagtgaagctcatatgcctgataccatcatcatgccttatacgagcgaggttttaaatgctagaattttagcaacaagagaaaatgaaaaaatttcggatttcaaagaaaatgaatttgcctatttactcacaggaaatacttgtttagctggagatgtgatgggagagtacgcttttaaagaagaattaaaacgcggagatagggtggtatttttagatcaaattcattattctatagtgaaaaatacaacttttaatggcataagacttccaaatttaatgcttttaaattccaaaaatgagcttgaaatggtaagagaattttcttacaaggattacgctctaagaaattaaaattttttggaagaataattttattatttctttttagcataaaatattttttaaatgacaaaatgaaagttttgttttttaggtttaaatattttatgcaactttttttaaaaaacctcattaaaatactattttataggctttttaaagctaaattctattttttcagattaggcagatttttaagaaaatttcagtttattttaaaacaaatcatattaagataaatcagtcaaaaataaggattaagaaggaaaattaggtgtaatttgcataatattattttgcaaattatttaacggcaaatcttcaaaaatttgaatgagttaaaaatggatttagaaaaactaagattagctagaagtctttattatcagtgcttaggagaacttttcgttttttcattttctgaaaatagattgtgtaacttaaaagcttatttagaagctatgcaagagagtttatttgatgaaagtttaagaacaagctttgaaattttacttcgtaatttacaagatgtacaagatcttcaagcattttataaagaatacgatgagctttttttagcacttaaaaacactattcctatgactttttcttacatagaagaaggctttgaaaattcaaaagcattgcttaatgtaaggcagattttagctaaaagcacaatccgccgcaatgaaaaaatttttaaagaagctgaagatagtgtaggattttgttttgttttaatgagtgaatttctaaaaaataaggaagatgaacttgctaaggcattgtttgaaaaagtcatcaatcaaagcattgatgaatttttaatgcttattttttcaaattcaaaagcgaagctttataaagaaatagcaaatattgctgcgcagtttatagaatttgaaagatattgttttgaacttgaaaaacctactataaaaccttctaagaaagttcaaaatgatttatctcgttctgaatttttaagaagagaagcaaataaacaaaggagatctcgtgaaaaatcgcagggaatttcttaaaaaatctgctattgctttgggtactgcaagtcttttaggcggtgcaagtgtagcttttgggcaagatgaagaaagaaaggatcttgttagaggcaaaagcaaaaagaaggaagtgctttatcaaagaagtgctaattgggaaaaatattatatgagggctgaataatgtcaagtatgaatgaaactatcaagcttaatcgccgttcttttcttaaaatggccgcgctttcaagtttggcaagtccgttgctagctagaagcgaaactttaagagaagcaaatgcggatgaattaaaagaagcttatgaaggaagtcaaaagattaagagtgtatgtaccgcatgttctgtaggctgcggaattattgcagaagttcaaaacggagtgtggttgcgccaagaaatcgcacaagatcaccctgttagctcgggaggccattgctgtaagggctctgatatgatcgatatggtgcgttctcatgtgcgtttaaaataccctatgaaaaaagaaaatggagaatggaaacgcatttcttatgaacaagctttaagtgaaatcggagaaaaattagcagcttatcgtaaagaaaatccagaaagcgttatgtttttaggttctgcaaaactaaacaatgaacaagcttattatataagaaaattcgcagcattttttggaaccaataatgtagatcatcaagctagaatttgacacagcgcaacagtcgccggtgtggcgaatacatttggttatggcgctatgacaaaccatcttggagatattcaaagaagtaaatgtattattattattggagcaaatccagcagtaaatcaccctgtaggttttagacacttcttaaaagcaaaagaaaaaggtgctaagcttatcgttgtagatcctagatttacaaagagtgcagcaaaagcagatatttatgcaagaattcgtccaggtactgatattgctttcatgtatggaatgttaaaaatcatttttgatgaaggtttagaagatacaaaataccttgatgaaagagtttttggtatcgataaaattcgtgaagaagctgcaaaatggactgctgaagaagtagaaaatgtaacaggaatttctaaagaactcctcattcaaatcactcatgaagtagctaaaaataaaccaactacattgatttgggctatgggcttaacacagcacaccgtaggaacttcaaatacgcgtttagcacctatagtacaaatggttttaggaaatataggtaaattcggcggcggggtaaatattttacgcggacacgataatgtgcaaggtgcttcagatatggcgtgtttgagtgaaaatttaccaggctattatcctttaaatgaagcgacttggagatattatgctaagatttggggcgttgattatgagtggcttttaggaaattttgtaagcaaagattggatgcataaaactggactttcacttgctagatggtgggctgcagccttaaatggcaaagatggaaatgataaagtggataatgcaggaacgtctttgaaagctttggtggtaatgggaaatggtatcacttcgactgcacagcaagctaaagttaaagaaggtttggaagctttagaacttttggttttagctgatccttttgtcaatgaagcaggaattattgcagaaagaaaagatggaatttatcttttacctgctgcaacgcagtttgaaacaagtggaagcgtaacagctacaaatcgtagcggacaatggagatttaaggttatagatccactttatgaaagcaaagaagatcaagaaattttatttgagcttgccaaaaaattaggtttttatgaagactttactaaaaccttacgcgatgaaaatggcaagattgtttggcctgaaaatgctactagagaaattgcaagtgcagttagaagcataggacttaatggttggagccctgaaagacttaaaaaacatactttaaattgggataaatttgatgaggtgactttagaaggcaaagacgaattagcgggtgaatactatgggcttccttggccttgctggagtgataaacatccaggatc

SEQ ID NO: 3793 - DNA, 22954 bp, synthetic construct
  source 1..22954: mol_type = other DNA
  misc_feature 1..22954: note = Synthetic
cggctgatggtgcttttcgtcgtggcaaaccttatatgttaaaacctgcagtagataaggctttaagtgaagggtgtgaaagtgtagaaaaagtacttatagttatacgcaataatgagcctatagaatatattaaaggaagggactatgtttataacgaacttgtgaaaaatgaatcttataagtgtgaacccgaaatcatggatagcgaggatttgttgtttttgctttacacttcaggatcaacgggcaagccaaaaggagttatgcatgcaagtgcaggatatatactttgggcacaaatgactatggaatgggtttttgatattaaagattatgataattattggtgtagtgctgatgtgggttggattacaggacatacttatgtagtttatgggcctttagcatgtggagcaacgactataatgcatgaaggaactcctacttatccaaattctgggcgttggtggagaatgatagaagagtatcaaataagcaaattctacacttcgccaactgctataagaatgcttcatgctgatgcacctgatgagccaagaaaatatgatttaagtacgcttgaagtgcttggaacggttggagagcctatcaatcctagtgcttggaagtggttttatgatgaaatagggggaactaaaagtcctatagtcgatacttggtggcaaacagaaacaggtgggcatatgatcacgcctttaccaggtgctactcctttaaaaccaggttgtgccaccttgcctttgccagggatttttgcagaagttattgatgaagaaggcaataaaaaagatgagggtgaagatgggttgctttgtataatcaaaccttggccttcgatgattcgtggaatttggggtaatgatgaacgctatatagaaagttatttttctcaagctaaaaaagatggaaaagctgtatattttagtggcgatggtgctttttatgataaaaatggttatataactatcacaggaagaacagatgatgtggttaatgttgcaggacatcgtataggaacggctgaaattgaaagcgctattgctaaacatccaagtgtagcagaatcagctgtagtgagtattttggatgtgattaagggcgagtcattgtttgcttttgtggttttaagtcctgcatccagttgtgatcttggcggagctatagaaactttaaaagaacttaatgacattttaagagtagaaataggacctatagctaaaatagaaaaaattctttatactccaggtttgccaaaaactagaagcggtaaaataatgagaagaattttaagaactatagcaagaggcgaagaaatcaaacaggatatttcaacacttgaagattctaaagtagtagaaaccattgttaaattagctaaggcagagtttgaataacaaggcaaaaagaactttgcctagttgcatgaaaattcataaaaataagctataatgataaaaaaataaaaggaaatttttatgcttcaaacttgtattttccctgcggcaggttatgggacgagatttttacctgcaacaaaaactttacctaaagagatgttacctatcttaaccaaacctttgatccattatggtgttgatgaagctttggaagcaggaatggaaaatatgggctttgtcacagggcgtggaaaaagagctttggaggattattttgatatttcttatgaacttgagcatcaaatttcaggtacaaaaaaagaatacttacttgatgaaattcgctctttgatcaatcgttgcacctttacttttacaagacaaaatcaaatgaaaggtttaggtgatgcggttttaaaaggtagacctttggttggcgatgaagcttttggcgtaattttagctgatgatttgtgtgtcaatgaagaaggcttaaatgttatggctcaaatggtaaaaatttatgaaaaatatcgctgcaccatcatagctgtgatggaagtaccaaaagagcaagtttcaaactatggagtaatttctggaaattttgtagaagaaaatcttatcatggttaattctatgatagaaaaaccaagtcctgatgaagctccaagtaatcttgctatcataggaagatatattttaactcctgatatttttggaattttagaaaatactaaagcgggaaaaaatggtgaagtccaacttaccgacgcgcttttaactcaagcaaccaatggtatggttttagcttataaatttcaaggaaaacgctttgattgtggaagtgtagaaggctttgtagaagcgacaaattatttttacgagaaaagtaaatgttaaacaatacacttttttttaagcaaagtgaaattcacactataagttcttatgcaaatcgtattaatgatgaggtaaaaagtggagatatagggtattatcatcttattgatacaagtttgaatttaatcgatgagagtttggcttttatcaaagacaaagaacacataaaaaatatcgttttagtgggaatgggtggttcaagttgtggtgtaaaagccttgcgtgatatgctttttaatgaaaaaagcaaccaaagagaactttttatactcgataacacaagttcacattcttttaataagactttagaaaaaatcaagcttgaggaaagtttgtttttaatcatcagcaaaacaggtagtactatagaagttgtatcgctttttaaacttcttattgaacattttaaacttgatatgcaagaattaaaaaaatactttgtttttattaccgataaggattcaaaacttcatcaagaaggtgaaaatttaggtattaaatgcttttttatccctgcaaatgtaggaggtcgttttagcatactttcagccgtaggtatagttccgctttgtttttgtggctataatgccaaagctcttttagaaggagctaaagcttgttttgaagatttttttactcataaaaaagatgaaattttacaaaaagcctatcattattgcacacacaaaaatgccaatatcaatgtacttttttcatatagtgatgcttttaaaggctttaatgaatggtatatccagcttattgctgaaagtttaggtaaaaagcaaggctataaacgtataggtttaactcctattgcactcattggagcaagagatcagcatagttttttacaactcattatggatggacctaaaaataaaactgtaacttttttaaaaatcaaagacgctcaaaaagcacctattatccctgatattcattttaaatttttagattctttaagtaataaagtcaatcttcacgaacttttaaacgctcaatgtaatgcaactatgcacgctttaatcgctgaaaatttgagcgttgatgtgatagaacttgaaaaacttgatgcttggcatgcgggatatttgatgtattattatgaactttttacttcaacttgcggtgttatgctagggattaacacctatgatcaacctggtgtggaagttggaaagttgatcttaaaaaatatattaaattcttaatcaaaattcattaaaaaagagtataataattttaagttaaaattataataaaaatttttaattaataataattattatttaagaattttatgttataattttaaaaattaaaaaaaggagtcaatcatgtcagttacaaaacaattattacaaatgcaagcagatgctcatcatctatgggttaaatttcataattatcactggaatgtaaaaggtttgcaatttttttctatacacgagtacacagaaaaagcttatgaagaaatggcagaactttttgatagttgtgctgaaagagttttacaacttggcgaaaaagctatcacttgccaaaaagttttaatggaaaatgcaaaaagtccaaaagttgcaaaagattgctttactccgcttgaagtcatagaactgatcaaacaagattatgaatatcttttagcagaatttaaaaaactcaatgaagcagcagaaaaagaaagtgatactacaacagctgcttttgcacaagaaaatatcgcaaaatatgaaaaaagtctttggatgataggcgctactttacaaggtgcttgcaaaatgtaatttaaggggctttatgccccaattatacaaactaggttataatatccttttttaaaggataaaattgaaagtacttaattttttttatgaaaaccaccctaaatttgaagtaagttatgaaagaaaaaatcaaatttcaaaaccaaatattatcataaaaggcccacgattttgtggtaaaaaaacacttatttttaattttttatctcaatttaaagcaagtgaaattttgtttttagatttatatgatacacgctttgaaaaacaaagtttagaaagacttgctgattttctgaatgaaaatttacaaattaaaattctttgcctttataatttggattttatccctaatttagaaaaaattaacattcccatcatcttaagtacaaatataaaagatttaaatgtaaatgggtttgaagagcttgaacttgattattttgattttgaagaatttattagtgtaagtaagaaaaatttacctataaataatttagtaggtctttttttgcaaagtggacgcagtaaatttggagaaaaaaacatacttctaagacaaagctttactcttttagaattagaaattttaaagtatttagctttaaatttgggtcagcaaatcagtatttctaagatatttatagaactcaaaaaaagattaaaaacttcaaaagatagtgtttatcaagctatcaaaaaattagaaaatacttatgtgatttataccttaaaacatgatgaaaaaaaacttcaaaagatttattttaaagattttggcctaagaaataatctttgtatttcaaaggatttttcacatttatttgaaaatttagttttaagcgagttgtttaaatttaaagaagaatttttttataacaaatactttaacttttatagccaaatatctaaaattgcttatatttcaagtccaactttagatattgatttgattaaattacgtgctaagaaaattttaccaaaggctttagaacttggaatttttcatgtgatttttatcactctttcaagcgaggatagtttttttgagcaaggggttaaatttgaagtcatatcttttgataaattttcacttggattttaggtgttgtttgagtttgtatcgtatttttcaaggttgtatcgtttgatgatttttgtaataagattgatataatatcccttgcgttcagaataagaatctaaagttttaatagcctctagtcctgttatctctttgccttcgcttgcaaatttagctcttgcatcgcgaaacttttcataagcaaaatgacgatttaaatttaaaacataagagtaaacactatcttgcagactatcaaaaatcttaattttatgttttttatctggatgtcttaaatcaggaattaaacctttctcaccccaagtccattctccaaaaagattgtttgcttctcttgcgaagcgactggtacctgtagcactttcaactaaagcttgggctatacccatggattttggaattttttgaatacgttttttatattctgcaaaatcataaagattttcaatacgatatttgttttttatcatgataagtttttcaagatttatttggtttgaagtcctaaagcctgttttgtaagcatctttaaaaaaggcttcgataaaagctctttcttgttcaatttttttaaagctttgatcaaacatttcattcatttttataaaaaaaatttgtcttttttgatctatatcaagtttgtaatattcttctccaaatccactctttagatcatcagcaaaaagtgggattagaaaaagactaagaaaaattataattggcttcaaaacaatactttacctttccttcaaaaaacaattcttcatttttatatgcaaaccctacctcttcaccacttttaggagttattttaactttattttgtacttttttatttaaaaatgccagataaaaacaagcccccattcctgtgccgcaagctaaggtttcatcttcaactccgcgttcataggtgcgaacttttaaatgattttcatctaaaatttttacaaaattaacattggcattatatttttgtctcattttttgacaaagcattgtatcaaattcatctaaattttgacaaaaatgtactagatgtggaactccagtgttgcaaagttgccaagtttttcctaattcttcaaaagtattttgcacgctttttattttgcctaaagatacttcaactttatcttgatttacctttgcttttattactcctgcaccggttaaaaaactcatgttaggatttattttgttaatatgatgtgcaaaatgtgccgcagcccttgagccatttccacacatagcagcccttgagccatcgttattataaaattcccattcaaagtcgtatttttcatgaggcaatatcacgataaagccatccgcacctataccctcataacgattacaaagttctttagctaaagcacttctatcttcttttctatcagcatttgttatgacaaaatcattcccacttgcacaatatttataaaatttcacatttttcctttagaaatttcttgtattactttaacacattcttgcctaaaatcggcataagaattagtatttttaatgataaaatctgcttttttaagtttttcttcaatatctatttgagaatcaagtcttgcttttgcagcttctaagctgagcttatctctttgcatgattcttttaaggcttaattctttaggtgtgtaaattacaatgactttgcctaaattttcataagcaccgctttcaaaaaaaagaggaatttctacaaaaaaagctttattttccttatctagaatttgcatttgttctaaaattttagctcgaattttaggatgagtgaaattttctaaggtttttttagcttctttgttgttaaaaacaatttttccaaggatttttctatcgattttcttttcttttgtgagtaaattttttaagctaaagggagaaaaaatcttttcaagttctaaagcattttcatctaaaatttcatgagcgattttatctgcactaatgcttttaaagcctaaagaattcgctatttctataaaggtgcttttaccacaagcaattgaagcggttacaaaaaaagcatttttcatcttatgccttattaaaacttttttcgttaaaataactttttagttcttaaaggaaaataaatgaaaatttcatatgaagatgcaggcgtaagtatagataatggaaatgcctttgtagaggctataaaacctttggttaaagaaacttttaatgataatgttgtaggtggaattggttcttttgctggtgcttttagaatgccaagtggttttaaaaagcctgtgattttaggtgcaacagatggggttggtaccaagcttcgcttggcaattgatgctaaaaaatatgatactatagggcaagatttagtagcaatgtgtgtgaatgatttgatttgtaattttgctacgcctttgtttttcctagattattatgctacagccaagctcgaagtagaagtagcaaaggctgttgtatcaggcattgccaagggatgtaagatggcaaattgtgcattaattggcggagaaactgctgaaatgcctggaatgtatgcaaaagatgattttgatcttgcgggttttgcagtgggtatggctgaagaagatgagattgatagaagtaaatttgttaaaaatggtgatattttattggcacttcctagttcaggacttcattcaaatggttattctttagctagaaaagtactttttgaaagtttaaaattaaaatttgatgacaagatagagggtaaaaatttaattgatattttattagaacctacaaggatttatgtgcgtgattttcttacactaaagccttatatcagtgctctagctcatattacagggggtggtttagtagaaaatttaccacgcgttttacctcgtggtatgggtgcaactatacgcaaacatcatcttaaaactcctgaaattttttatactataggacaggttgtagaagaaagcgaaatgtatagaagctttaacatgggagtaggtttagtagtggttgtagatccttctaatgtaagtaaggttttagaaaattcagatgcctttattattggcgaaatttgcattaatgaaggtattgttttagaatgaaaataaagcgtcaatacgctttatttttgtattttaagttctatttttgtagtgttttgttcttttggcaaaggatggtttgtgctagataaaaggctacaagtacatttacaagcatagcgataagtaaaagaggagtggttcgttttataatatccattggagctacttttgcaaatccagctaaagctatgattccgcctgctattggtgaagctgcacgacctaaacaagatgcaatttctataggtaaaactagagtaataggtgcaacgcctaattttgtagctatatcaggagctagttttccaaaagcattaaaagcggcaattccacttcccataatcactgtggcaaaataaactaaaaagcttaaaatagctatactcaaaagaattccaaaccatgcaaaatttcctgttccaagacttgaaaccgcgttggcaaggatattaactccaccaagtgctttaatgccttcagcaaatactccagcggcgatgattatgcttacgactgagataaaaatttcagccatagcttttaaaatcaccatcatatcttcgcctaattttctagcatttctatgtcttgcaaattcaacaagaaaaactaaagaaatgcttacaaaatttgctgttacaacatcgagcttgatagtaaaaaaatacgctgtaaataaaaatacaacaggtaaccaaggaaagagtatgtaaaaagtagggcatttaggatcaatgatttgcggaatttcaacttcatcatttaaaacacctttttctttatctcttttatcaatccaagcaaaataaaaaggaatcaagatggcaataactacaacataggcaatcacactataaatttggtaatttaaaaaaagccctacgacattatcactttgtcctaccatatctgccatattgattgaatttccatcttttggaccataatcaagcgcaattaaagaaagcacacatacagctgtaataggacggattttaagtgagattaaaacaggataaatacatgctaacaaaagcaaaagcaatccagcatagctagaaatgacgatttttaaagccattccaacaacaaaagttccacttaaaatcaagtatttatttttgatttttcctaagggtttatttgctaaaaaagcaagttttgctgaagcattgatatgtttcatataagcagcaaaacctgccacactcatgataataagtcctactccagaaagctgacttttaaaagtcgctgtgataaaagcataactatcaagtaaaacattcaaaaagcttgcatgttctctgctcggggcttttggtataggtgttcctgtgatgtaaaaagcaaaaataagcaagataatacctgaaagaaaaaatacaaaaataggattgtattttttaagtatataataagtaacgacaattaccgctaaaagtgtagaacatatcataaaaattggcatgatttctcctaaagttattattagcttttattttattttagctaaaatttaactaataaatatttttcatttaaaattttacttattttttgcattataaaattaataatatgtatagtttggttactgaaaagtttatgtttgtataaaaaatgatttttatattataattataaacaaattataaatatcaaaaaggatctagtgtggcaagaattttggcatttgatataggtataagctctattggctgggcgtttagcgaaaatgatgagttaaaagattgcggagttaggatttttacaaaggctgaaaatcctaaaacaggagaatccctagccttaccaagacgccttgcaagaagtgccagaaaacgccttgctagacgcaaagcaaggctaaatcacttaaaacatttaatcgcaaatgaatttaagttaaattacgaagattatcaaagctttgatgaaagtttagctaaggcttataaaggctctttaattagcccttatgagttaagatttagagctttaaacgagcttttaagtaagcaagattttgcaagagtgattttacatattgcaaaaaggcgtggctatgatgatattaaaaataatggtgatgaagaaaaaggcaagattttaaaagctatcaagcaaaatgaagaaaaactagtaaattatcaaagtgtgggagagtatctttataaagagtattttcaaaaattcaaagaaaattccaaagaatttataaatgttagaaataaaaaagaaagttatgaacgctgcataacgcaaagttttttaaaatatgaattaaagcttatttttcaaaaacaaagagaatttggcttttctttttcaaagaaatttgaagaggaagtgcttagtgtagcattttataaaagggctttaaaagatttttctcatttagtgggaaattgtagtttttttactgatgaaaaaagagcgccaaaaaattcgcctttagcttttatgtttgtagcactcacaagaattatcaatattttaaacaatcttaaaaatactgaaggaattttatatacaaaagatgatttaaacgcccttttaaatgaagttttaaaaaacggcactctaacttataaacaaacaaaaaagcttttgggcttaagcgatgattatgaatttaaaggagaaaaaggaacttattttattgagtttaaaaaatacaaagaatttataaaagccctaggtgagcataatttaagccaagatgatttaaatgaaatagcaaaagatatcactcttataaaagatgagattaaacttaaaaaggctttagcaaaatacgatttaaatcaaaatcaaattgatagcttaagcaaattggaatttaaagaccatttaaatataagttttaaagccttaaaacttatcactcctttaatgcttgaaggtaaaaaatacgatgaagcttgcaatgagcttaatttaaaagtagcaatcaatgaagataaaaaagattttttacccgcatttaatgaaacttattataaagatgaggtaactaatcctgtggttttaagggcgattaaagaatatagaaaggtcttaaatgctttacttaaaaaatacggcaaagtgcataaaataaacattgaattagcaagagaagtaggtaaaaattacagccaaagagctaaaatagaaaaagagcaaaatgaaaactacaaggccaaaaaagacgccgaacttgaatgtgaaaaactaggcttaaaaataaatagcaaaaatattttaaaattaagattatttaaagaacaaaaagaattttgtgcttatagtggagaaaagattaaaattagtgatttgcaagatgaaaaaatgcttgaaattgaccatatttacccttattctagaagttttgatgattcttatatgaataaggttttagtttttaccaagcaaaatcaagaaaagcttaataaaaccccatttgaagcctttggcaatgatagtacaaaatggcagaaaattgaagttttggcaaaaaatttacctgaaaaaagcaaaaaagaattttagataaaaactataaagacaaagagcaaaaagactttaaagatagaaatctaaacgatactcgctacatcgcaaggcttgttttaaactatactaaagattatttagattttttacctttaagcgatgatgaaaatacaaagttaaacgacacacaaaaaggctcaaaagtgcatgtagaagcaaaaagcggtatgctaacatcggctttaaggcacacttggggctttagcactaaggatagaaataatcatcttcatcacgctattgatgcagtaattattgcttatgcaaacaactctatcgtaaaggctttttctgattttaaaaaagagcaagaaagcaacagtgcagaactttatgcaaaaaaaattagtgaattagattataaaaacaaaaggaagttttttgagccttttagtggttttaggcaaaaggttttagataaaattgatgaaatttttgtctcaaaacctgagagaaaaaagccaagcggagccttacacgaagaaacatttagaaaagaagaagaattctatcaatcatacggcggaaaagaaggagttttaaaagccctagagcttggtaaaatccgcaaagtaaatggtaaaattgttaaaaatggcgatatgtttagagtggatatttttaaacacaaaaagacaaataaattttatgctgtgccaatttatactatggattttgctttaaaagtattaccaaataaagctgtagcacgaagtaaaaaaggtgagataaaagactggattttaatggatgaaaattatgagttttgcttttctttatacaaagatagtttgattttaattcaaactaaagatatgcaagagccagaacttgtttattttaatgcttttacaagctctactgttagtttgattgtttcaaaacacgataataaatttgaaacgctaagcaaaaatcaaaaaatattgtttaaaaatgcaaatgaaaaagaagtaatcgcaaaaagcataggaattcaaaatctaaaagtatttgaaaaatacatagtttcagcacttggggaagttacaaaggctgagtttagacaaagagaagattttaaaaaatgagttacgatgaagcttttaaaacactgcttattagctctaatgccaagctaaatttagagctaaatcatcttgtgattaagcaagatgaaaatatagccaaattgtttttaaaagatataaatatcatcgttttagaaagcttacaaataagcattagttccgcactttttaatgcctttgcaaagtataaaattatcttgctaacctgcgatgaaactcatagtataaatggtgtttttactccttttttagggcattttcaaagtgcaaaaatcgcaaaagagcaaatgaatgtaagtgctcaaaaaaaggctattttatggcaaaaaatcattaaaaataaaatcctaaatcaagcctttatcttaaaaaaacacaataaaatagagcaaagcaatgagcttataaatttggctaaaaaagtaagcttaaatgatagtaaaaatattgaagctgttgcggcggcgctttattttaaaactttgtttggtacttctttttcaagagatgagctttgctttgaaaattctgctttaaattatggctatgcaatcattagggcttgtattattagagcagtttgcataagtgggcttttgccttggcttggcataaagcacgataatatttataattcttttgcgctttgcgatgatttgatagaagtgtttagggctagtgttgatgattgtgttttaaagcttaagggtgaaagtgagtttttaagcaaagatgacaaaagagcgttgattggcaatttacaaagcaaaatcaattttgatgggcaaaattatcctttaaacagagcgataaatcattatgtggcgaattttaaaaatgctttattgtatgaagatgaactaaagatagtgaaatttgatgattgaagataaatttatgcgcgtgcttttgatgtttgatgtacctactaaaagtaaaaaagagcaaaaactagcaagtaaatttagaaacaatcttataaaattaggttattttatgctgcaatttagtgtttatatgcgtatttgcaagggtttaagttctgcaaaaagttctattgaaaatgtaaaaaagattttgccaccttatggaaatgtaagggctttaatcatcactgaaaagcaatttgataaaatggagcttttgcttggtggcatagtttttaatgaaaaagttaataacgaaaccaatttaacactttttgatatagatagtcatggagaatttaaatacaaaaattcaaataatgaagaaatacaactaaacaaaaaacaagaaaaatatcatcagcaaaatttatttgaattttaaaagcggttttaggggattgtaaccccgcagagtcccgcaaactctttattttagtccctttttaaatttcttatgagattatagcataatttttgctatttttcatcaaaaaaccccgaaattttcattatctggtaaatatctattttaccataaagaaatttaaaaagggactaaaactctatacttatatccacagaagtagctccaattttaccataaagaaatttaaaaagggactaaaacacgtgtgggagggagagcctttagagtataattttaccataaagaaatttaaaaagggactaaaacagtgctacagcctttactacacttcaatcaattttaccataaagaaatttaaaaagggactaaaataaaccctagtggattgaaactccgctagggctaattactccactaaaaggaggttgcgaatttgaaacttattgaaatttagggttgattaaaatcgaaataaaattatttaaataattttaaggcataaagataatatctactaaactttcattttctaaaatttcacattcttttggcaccaccataagggcagctttattgttaagattgtttataatcgcactagagccttcttttttgccttcaagattggctaaaatgcgtccatttttaaactctatattgcaagcgacaaattccaaataaggtgtttttttcttgtaacttccttgtaaaaaggctttgcaaatatagtctttaggttgaagtaaccaagagtttaaaatctctcttgtgtaaagattaaacattaccatagccgagtaaggaaaacctggtaaggcgatgatgaatttttcattagccttagctattttgatatgtctgcctggttttatgtcggctttatcgatgatgatttcgtattctttgatggctttttttaaaaagtcaaaatctcccatagaaaccccgcccgttgtaaccaaaatatcacaactttgcaaagcactttcaagggtggaaaaagtggctttctcatcatcttttaaaagaggaaaaacccttgtatcgcaatttaaatttttagctaaattagctatggcgatatgatttgaagagcggatttgagcaggattttccaaggcttctcctagatctttgatctcacttccactacttaaaacccctacaataggctttataaacacactaatgtgaaaaaatccaagttcagctaaaagagctatctcgctataatttaaccttgtgccttttttgagtaaaatttcatcttttttatagttttctcctaccgcacgcacggcaaaagcttggggaacttttttttctataaaaagagtattattttctatgcgtatattttcaacagggactaaagtatcgcttccttcgctcatgagtgagcctgtaaaggtttttacacaagtgccattttgcacgctaaattgtggcatagtacccgcaggtgtgaggcctaaaatttttaaaggcttgtcttgatcttcaaatttgatcgcataaccatccatagccgaggttggaaattcaggctgatttttaggggcttttatatcttgagctaaaatgcgtcctaaacactctgtaagagctattttttcaatcttttcataagttttgatatgagaatgtaaaatttttaaactttcttcataagacattagcattttttatccttttaaaagtcctgcaccgcaaagcttggttgatctttctttggcataaattctttctttgtttatcacatcatacttccaaatgggcgcacttgctttaaaatcttcaacaaattcattaagaagtttaagtcctaattttctttgtttgcttaaaattcctgcaaaatacgagctttcatgtatcgctacatcgcctatagagtgagcaaaaagcaagctaataccatcaaaatctactcttttttgccactcatcaaaccatttttttaaaagcgattcataaatatcaaaactaagtgcctcaatacctccttcttcacgcacaataccacaaaaagtcagtaaagcaccgcagtttttatccttggaaaattcataccattggctataaattttaggaatatctaaagagccttgataaagtgtaaaatgtttcatttagcctccacaaactggcggtaaaagtgctattttatcaccagtttttaacttagtgttttcatcaaaaatgatttcatcatttaaagatacagcacaaagttctagccattcttttaaactctcatctttttgcaaaatttcttttaattcttttaaattttttacctcaagctctaaattatctttatttatggggcctaaaaattccacttttaccattttattcctttacttctaaatttcccatcattcctaaatcttcatgttctaaaatatggcaatgatacattctaagccctttaaaatcttgtttcattctaagtcttaactcttcattaggacgcacatttatagtatctcttaaggctctaaattcggctttttgaactttgccattgagttttgatgagatgagttcaaattgcgtgccgtgtatgtggaaaggatgatccatgtgagatttgtttatcactatccagtcttcaactactccaagtttggagcttaaatcaatgcgttttaaatcatagcttttgccattgattaaaaacatagacgcaagagcgatttttaattcgctttcactttttcccatcataccatgcatttgcatatgatcttcactcatgattatttctttaaattccttaggttcttctgaaggtttgaaaatttttaatttttttggaagttctacattttctttttttaggttaatattggctagaaatagggtattaggttcttcttttaccatcattttatccctatcataataagcactttctagcttaaaattcccatcttttggagcatcgattaaaacttctacacgagaagcaggacttaagaaaagttcttctttataaatagctttttctataagtccaccatcagtaccaacaagtataaacttagctccttgtatgcgtaaatttaaatatcttgctgcagtagcattataaatgcgtatgcgttcgtttgtggcgagtttgattttaggtttaaattgtccattgatgagtacaaattctccttctctaccatttagccaatcatttaggttattgtttggaatttgagcgttttcatcaagacgcaaatcgctaatcatcaaatctttttcttttaaatgacttaaagcatctttttttgctttgatcacaaaagcccctgctaaacccataaaaacttgtttagaagccgtataatgaggatgtggatgataccagtaagttcctgcgctatcttgaggaatttcaaaacgatatattctttcttctcctgctaagataggatcatgtgggcttccatcttgatcaggtggcacaggaacgccatgccaatgtatagttgtagcttctttgagtttgtttttgactaaaatttcaagtttatctccttcaaaaacttgtatttttggagcaggcacgaggccattgtaagtataaaataaggtttttttacctttgataagctctatatgattttctttgatttctagggtagcacgaaaaatatttttttctttactttcatttttgagtaaaggcaaggcttttaaaatttctccttgggggaattgttttggatctaaaagctttaaattttttggagcaaagtttataaaagaagtatctaagtcatgatttatagaatgatttttatgcatggagtgcatatcgtgcataggatttgcataggctacacccatacttgctagagtaagtgcattaaattttaaaaaatttcttctattcattagtttttccttttgcttgattttttgtattatagtcattatttttttaactttagtaaatatttattttgaaaatttggtttaattttgttatgattttagcaatttaatcaaggaaaaataatgttttatgaaaaaattcaaactccagcttatattttagaagaagataaattaagaaaaaattgtgagcttttagcaagtgttggcgaaaaaagtggtgctaaagtgcttttagctttaaaaggttttgctttttcaggagcgatgaaaattgttggagaatacttaaaaggttgtacttgtagcggactttgggaagcaaaatttgctaaagaatacatggataaagaaattcatacttattcgcctgcttttaaagaagatgaaataggtgaaatagccagcttatctcatcatatagtgtttaactctttagctcaatttcataaatttcaagctaaaacacaaaaaaattccttaggtcttcgttgtaatgttgaattttctctagccccaaaagaactttacaatccttgtggaagatactcaagacttggaattcgtgctaaagattttgaaaatgtggatttaagtaccatagaaggacttcattttcacgcactttgcgaagaaagtgctgatgctttagaagctgttttaaaggtttttgaagagaaatttggcaaatggatagggcaaatgaaatgggtgaattttggaggagggcatcacatcactaaaaaaggctatgatgttgaaaaacttattgctttgtgtaaaaatttcagtgataaatatagcgtgcaagtttatcttgaaccaggtgaagcggtaggttggcaaacaggaaatttagtggctagtgtagtagatatcatagaaaatgaaaaacaaattgctattttagacacttcaagcgaagcgcatatgccagatactatcatcatgccttatacaagtgaagttttaaatgctagaattttagccacaagagaaaatgaaaaaatttcagacttaaaagaaaacgaatttgcctatttacttactggaaatacttgtttagcaggtgatgtaatgggagaatatgcctttgataaaaagcttaaaatcggcgataaaattgtttttttagatcaaattcattacaccattgtgaaaaacacaacttttaatggtataagacttccaaatctcatgcttttaaatgcaaaaaatgaacttcaaatgataagagaattttcttataaggattattctttaagaaattagtattatttataatttgcataaaatgttaattttactcggaagagaatcaaagatgtaaattttatgcaaagtattttatttttttcaaatataaaatcaactcaaatatctaattttcaatactttggtatgattttttaatattttaaatccttgtggaattttattgaaattcagtgatttttaaatcaaatagtattaagataaatcgatttaaaaatcggctttaaaatgaatattaggtatattttgcataatattcattcaagcaaaatttaaagctatttttgaaaattttgaatgcatgggagctttaatggatttggaaaaattaagattagctagaagtctttattatcaatgtctaggagagctttttgttttttcattttctgaagaaagattgtcaaaattacaagagtatttaaagacaatgcaagaatgtttatttgatgaaaatttaaaatcaaattttgatatcttgcttaagcatttagatgatgaaaattttatacaagcattttttaaagaatatgatttgctttttttaagtcttaaaaatagcattccaacgactttttcttacatagaagaaggttttgaaaattcaaatcctttactttgcgtgcgtcaaattttagtcaaaagtaaaataagacgcaatgaaaaattttttaaagaaagtgaagatagtgttggattttgtttattgttgatgagtgaatttttaaggcaaaatgaagatgatttagccaaagagctttttgaaaaagtgatcaataaaagcattgatgagtttttaggcgatgttttcatgaataaaaatgcgaatttatataaggaaattgcaagtattgcatcggcttttatggaatttgaaagactttgctttgaagtggaaaaacctgcaaaaataaattctaaaaaagtgcaaaacgatctatcgcgttcagaatttttaagaagagaagcaaataaacaaaggaggactcgtgaaaaatcgcagggaatttcttaaaaaatccgcttttgccttaggggctgctggagtgcttggtagcacaactttagctctagctaaagatgaagaaagaaaagatttggttaaaggtaaaagtaagaaaaaagaagtgctttttcaaagaagtgctaattgggaaaattattatataaaggctgagtaatgtcaagtgtaggtgaaaatatcaagcttacgcgtcgttcttttcttaaaatggcagcactttcaagcctagcaacaccgttgcttgctagaagtgaaactttaagagaagcgagtgctgatgagcttaaagaagcttatgaaggtagtaaaaaagtaaaaacagtttgtacagcctgttctgtaggctgtgggattattgcagaagtgcaaaatggtgtttgggtgcgtcaagaaatcgctcaagatcatcctgtgagttcaggtggacattgctgcaagggatctgatatgatcgatatggtgcgttcacatgtgcgtttaaaatatcctatgaaaaaagaaaatggagaatggaaacgcataagttatgagcaagctttaagtgagatcggagaaaaactagctgcttatcgtaaagaaaatcctgaaagtgttatgtttttaggttctgcaaaacttaataatgaacaagcttattatataagaaaatttgcagcattttttggaacgaacaatgtagatcatcaagctagaatttgacacagcgcaacagtcgccggtgtggcgaatacatttggttatggcgctatgacaaaccatcttggagacatccaaagaagtaaatgtatcattatcattggagcaaatccagcggtaaatcaccctgtgggttttagacatttcttaaaagcaaaagaaaaaggtgcaaagcttatcgttgtagatcctagatttacaaaaagtgcggcaaaagcggatatttatgcaagaattcgtccaggaaccgacattgctttcatgtatggaatgctaaaaatcatctttgatgaaggcttagaagatacaaaatatcttgatgaaagagtttttggaatcgataaaattcgcgaagaagcagcaaaatggacagccgaagaagtagaaaatgttacagggatctctaaagaacttttggtgcaaatcactcacgaagtagctaaaaacaaaccaactacgcttatttgggctatgggtttaactcaacacactgtaggaacttcaaatacacgtttagcacctattgtgcaaatggtacttggaaatataggtaaatttggtggtggagttaatatcttacgcggacacgataatgttcaaggtgcttcagatatggcttgtttgagcgaaaatttaccaggttattatcctttaaatgaagcgacttggagatactatgccaaaatttggggtgtggattatgagtggcttttaggaaattttgtaagcaaagattggatgcataaaactgggctttcacttgctagatggtgggcagcggctttaaatggaaaagatggaaatgatgctatcgataatgcaggaacgcctttaaaagctttagtagttatgggaaatggtattacttcgactgcacaacaagtaaaagttaaagaaggtttggaagctttagagcttttagttttagccgatccttttgtaaatgaagcagggattattgcagaaagaaaagatggaatttatcttttacctgcagcaacacagtttgaaacaagcggaagtgtaacagcaacaaatcgtagcggacaatggagatttaaagttgtagatccactttatgaaagcatggaagatcaagaaattttatttgagcttgctaaaaaattaggtttttatgaagactttaccaagactttacgcgatgaaaaaggtgagattgtttggcctgaaaatgcaacaagagaaattgcaaaagcagttagaagtatagggcttaatggttggagtcctgaaaggcttaaaaagcatactttatactgggataaatttgatgaggtaactttagaaggaaaagacgaagttgctggcgagtattacgggcttccttggccttgttggagtgataagcacccaggttctcctgtgctttataataccgacattgaagtagcaaaaggtggtatgggctttagaaacaattttggacttgaatatgaaggagagagtttacttgctaaaaatgcacctttaaattcacctattgatacaggttatccacaaattactaaagataatatagaaaaagttttaggtattactttaagtgctcaagaaaaagaaaaaatgggatcaacttggtcttatgatgatagcaatatcatagcaactaaatgtatagaaaaaggcatagttccttatggaaatgctaaagctagagctgtagtttggacttttaaagataaaattccactccaccgtgagcctttacattctccaagaaacgatttggtgcaaaaatatccaagttttgaagatcaaaaagcgctttac

SEQ ID NO: 3794 - DNA, 22954 bp, synthetic construct
  misc_feature 1..22954: note = Synthetic
  source 1..22954: mol_type = other DNA
ttgaaagcgctattgctaaacatccaagtgtagcagaatcagctgtagtgagtattttggatgcgattaaaggcgagtcattgtttgcttttgtggttttaagtcctgcatccagttgtgatcttggcggagctatagaaactttaaaagaacttaatgacattttaagagtagaaataggacctatagctaaaatagaaaaaattctttatactccaggtttgccaaaaactagaagtggtaaaataatgagaagaattttaagaactatagcaagaggtgaagaaatcaaacaggatatttcaacgctcgaagattctggagtagtagaaatcattgttaaattagctaaggcagagtttgaataacaaggcaaaaagaactttgccttgttgcataaaaattcataaaaataagctataatgataaaaaaataaaaggaaatttttatgcttcaaacttgtattttccctgcggcaggttatgggacgagatttttacctgcaacaaaaactttacctaaagagatgttacctatcttaactaagcctttgatccattatggggttgatgaagctttggaagcaggaatggaaaatatgggctttgtcacagggcgtggaaaaagagctttggaggattattttgatatttcttatgaacttgagcatcaaatttcaggtacaaaaaaagaatacttgcttgatgaaattcgctctttgatcaatcgttgcacctttacttttacaagacaaaatcagatgaaaggcttaggtgatgcggttttaaaaggtaaacctttggttggcgatgaagcttttggcgtaattttggctgatgatttgtgtgtcaatgaagaaggcttaaatgttatggctcaaatggtaaaaatttatgaaaaatatcgctgcaccatcatagctgtgatggaagtaccaaaagaacaagtttcaaactatggagtaatttctggaaattttgtagaagaaaatcttatcatggttaattctatgatagaaaaaccaagtcctgatgaagctccaagtaatcttgctatcataggaagatatattttaactcctgatatttttggaattttagaaaatactaaagcaggaaaaaatggcgaaattcaacttaccgacgcgcttttaactcaagcaaccaatggtatggttttagcttataaatttcaagggaaacgctttgattgtggaagtgtagaaggctttgtagaggcgacaaattatttttacgagaaaagtaaatgttaaacaatacacttttttttaaacaaagtgaaattcacactataagctcttatgcaaatcgtattaatgatgaggtaaaaagtggagatatagggtattatcatcttattgacacaagcttaagcctgattgatgagagtttggcttttatcaaagacaaagaacacataaaaaatattgttttagtgggaatgggtggttcaagttgcggtgtaaaagccttgcgtgatatgctttttaatgaaaaaagtaatcaaagagaactttttatactcgataacacaagttcacattcttttaataagactttagaaaaaatcaagcttgaagaaagtttgtttttaatcatcagtaaaacaggtagcactatagaagtcgtatcgctttttaaacttcttattgaacattttaaacttgatatgcaagaattaaaaaaatactttgtttttattaccgataaggattcaaaacttcatcaagaaggtgaaaatttaggtattaaatgcttttttatccctgcaaatgtaggaggtcgttttagcatactttcagccgtaggtatagttccgctttgtttttgtggctataatgccaaagctcttttggaaggagctaaagcttgttttgaagatttttttactcacaaaaaagatgaaattttacaaaaagcctaccattattgcacgcataaaaatgccaatatcaatgtacttttttcatatagtgatgcttttaaaggctttaatgaatggtatattcagcttattgctgaaagtttaggtaaaaagcaaggctataaacgcataggtttgactcctattgcacttattggcgcaagagatcagcatagttttttacaactcatcatggatggacctaaaaataaaactgtaacttttttaaaaatcaaagacgctcaaaaagcacctattatccctgatattcattttaaatttttagattctttaagcaataaagtcaatcttcacgaacttttaaacgctcaatgtgatgcaactatgcacgctttaatcgctgaaaatttgagtgttgatgtgatagaacttgaaaaacttgacgcttggcatgcgggatatttgatgtattattatgaactttttacttcaacttgcggtgttatgctagggattaacacttatgatcaacctggtgtggaagttggaaagttgatcttaaaaaatatattaaattcttaatcaaaattcattaaaaaagagtataatgattttaagttaaaattataataaaaatttttaattaataataattattatttaagaattttatgttataattttaaaaattaaaaaaaggagtcaatcatgtcagttacaaaacaattattacaaatgcaagcagatgctcatcatctatgggttaaatttcataattatcactggaatgtaaaaggtttgcaatttttttctatacacgagtacacagaaaaagcttatgaagaaatggcagaactttttgatagttgtgctgaaagagttttacaacttggcgaaaaagctatcacttgccaaaaagttttaatggaaaatgcaaaaagtccaaaagttgcaaaagattgctttactccgcttgaagtcatagaactgatcaaacaagattatgaatatcttttagcagaatttaaaaaactcaatgaagaagcagaaaaagaaagcgatactacaacagctgcttttgcgcaagaaaatatcgcaaaatatgaaaaaagtctttggatgataggcgctactttacaaggtgcttgcaaaatgtaatttaaggggctttatgccccaattatacaaactaggttataatatccttttttaaaggataaaattttgaaagtacttaattttttttatgaaaaccaccctaaatttgaagtaagttatgaaagaaaaaatcaaatttcaaaaccaaatattatcataaaaggcccacgattttgtggtaaaaaaacacttatttttaattttttatctcaatttaaagcaagtgaaattttgtttttagatttatatgatacacgctttgaaaaacaaagtttagaaagacttgctgattttctgaatgaaaatttacaaattaaaattctttgcctttataatttggattttatccctaatttagaaaaaattaaaattcccatcatcttaagtacaaatataaaagatttaaatataaatgggtttgaagagcttgaactcgattattttgattttgaagaatttattagtgtaagtaagaaaaatttacctataaataatttagtaggtctttttttacaaagtggacgcagtaaatttggagaaaaaaacatacttctaagacaaagcttcactcttttagaattagaaattttaaagtatttagctttaaatttgggtcagcaaatcagtatttctaagatatttatagaactcaaaaaaagattaaaaacttcaaaagatagtgtttatcaagctataaaaaaattagaaaatacttatgtgatctatactttaaaacatgatgaaaaaaaacttcaaaagatttattttaaagattttggcctaagaaataatctttgtatttcaaaggatttttcacatttatttgaaaatttagttttaagcgagttgtttaaatttaaagaagaatttttttataacaaatactttaacttttatagccaaatatctaaaattgcttatatttcaagtccaactttagatattgatttgatcaagctacgtgctaagaaaattttaccaaaggctttagaacttggaatttttcatgtgatttttatcactctttcaagcgaggataatttttttgagcaaggggttaaatttgaagtcatatcttttgataaattttcacttggattttaggtgttgtttgagtttgtatcgtatttttcaaggttgtatcgtttgatgatttttgtaataagattgatataatatcccttgcgttcagaataagaatctaaagttttaatagcctctagccctgttatctctttgccttcgctttcaaatttagctcttgcatcgcgaaacttttcataagcaaaatgacgatttaaatttaaaacataagagtcaacactatcttgcagactatcaaaaattttaattttgtgttttttatctggatgtcttaaatcaggaattaaacctttctcaccccaagtccattctccaaaaagattgtttgcttctcttgcgaagcgactggtacctgtagcactttcaactaaagcttgggctatacccatggattttggaattttttgaatacgttttttatattctgcaaaatcataaagattttcaatgcgatatttgttttttatcgtgataagtttttcaagatttatttggtttgaagtcctaaagcctgttttgtaagcatctttaaaaaaggcttcgataaaggctctttcttgttcaatttttttaaagctttgatcaaacatttcattcatttttgtaaaaaaaatttgccttttttgatctatatcaagtttgtaatattcctctccaaatccactctttagatcatcagcggcaaaaagtgggattagaaaaagactaagaaaaattataattggcttcaaaacaatactttacctttccttcaaaaaacaattcttcatttttatatgcaaaccctacctcttcaccacttttaggagttattttaactttattttgtacttttttatttaaaaatgccagataaaaacaagcccccattcctgtgccacaagctaaggtttcatcttcaactccgcgttcataggtgcgaacttttaaatgattttcatctaaaatttttacaaaattaacattggcattatatttttgtctcattttttgacaaagcattgtatcaaattcatctaaattttgacaaaaatgtactagatgtggaactccagtgttgcaaagttgccaagtttttcctaattcttcaaaagtattttgcacgctttttattttgcctaaagatacttcaactttatcttgatttacctttgcttttattactcctgcaccagttaaaaaactcatgttaggatttattttgttaatatgatgtacaaaatgtgccgcagcccttgagccattgccacacatagcagcccttgagccatcgttattataaaattcccattcaaagtcgtatttttcatgaggtaatatcacgataaagccatccgcgcctataccctcataacgattacaaagttctttagctaaagcacttctatcttcttttctatcagcatttgttatgacaaaatcattcccacttgcacaatatttataaaatttcacatttttcctttagaaatttcttgtattactttaacacattcttgcctaaaatcggcataagaattagtatttttaatgataaaatctgcttttttaagtttttcttcaatatctatttgagaatcaagtcttgcttttgcagcttctaagctaagcttatctctttgcatgattcttttaaggcttaattctttaggtgtgtaaattacaatgactttgcctaaattttcataagcaccgctttcaaaaaaaagaggaatttctacaaaaaaagctttattttccttatctagaatttgcatttgttctaaaattttagctcgaattttaggatgagtgaaattttctaagatttttttagcttctttgttgttaaaaacaatttctccaaggatttttctatcgattttcttttcttttgtgagtaaattttttaaactaaagggagaaaaaatcttttcaagctctaaagcattttcatctaaaatttcatgagcgattttatctgcactaatgcttttaaagcctaaagaattcgctatttctataaaggtgcttttaccacaagcaattgaagcggttacaaaaaaagcatttttcatcttatgccttattaaaacttttttcgttaaaatacctttttagttcttaaaggaaaataaatgaaaatttcatatgaagatgcaggcgtaagtatagataatggaaatgcctttgtagaggctataaaacctttggttaaagaaacttttaatgataatgttgtaggcggaattggttcttttgctggtgcttttagaatgccaagtggttttaaaaagcctgtgattttaggtgcaacagatggggttggtaccaagcttcgcttggcaattgatgctaaaaaatatgatactatagggcaagatttagtagcaatgtgtgtgaatgatttgatttgtaattttgctacacctttgtttttcctagattattatgctacagccaagctcgaagtagaagtagcaaaggctgttgtatcaggcattgccaagggatgtaagatggcaaattgtgcattaatcggcggagaaactgctgaaatgcctggaatgtatgcaaaagatgattttgatcttgcgggttttgcagtgggtatggctgaagaagatgagattgatagaagtaaatttgttaaaaatggtgatattttgttggcacttcctagttcaggacttcattcaaatggctattctttagccagaaaagtactttttgaaagtttaaaattaaaatttgatgacaagatagagggtaaaaatttaatcgatattttattagaacctacaaggatttatgtgcgtgattttcttacactaaagccttatatcagtgctctagctcatattacagggggtggtttagtagaaaatttaccacgcgttttacctagtggtatgggtgcaactatacgcaaacatcatcttaaaactcctgaaattttttatactataggacaggctgtagaagaaagtgaaatgtatagaagctttaacatgggagtgggtttagtaatggttgtagatccttctaatgtaagtaaggttttagaaaattcagatgcctttattatcggcgaaatttgcattaatgaaggtattgttttagagtgaaaagaatttattttttaagatattttaagagtaaattaaaaaaataataaggaaaagtgatgaaaaatattgtctttcattcggatggttttggagatttattagtttgttttaaagctttgtatgctataaagcaactctatccagagtataaattatttttattaacaaatggattaatggaaagtgattttttagaaaaaattccatttattgatgaagttttgatttataaggatgattttttagaaaaaattcaaagcaaaaatccagtaatttttattaccacacgaagacaaggtttatattttaaaaaattaaaatttttaaatgttcaaaaatgtatagtattccctcatcttattagtataatttctaaaaatttaaccacacctttaccattttttagagctaaaaaacatatgagtgaaattgttttaaaattggttaggatgattaatactaggcattttgataaaaattttaatcaaattgatttttctaaaattaaaaatttattaccttatgatgcaagattaagtgataatttttttaaacaaattgatacaaaatatgaaaaaattataggtattaatgctttttcaaataatagcgaatatagaggatttaatttttttataaaagattggatagggcttgcaaggcaactttctttaaaatatcctaaatttttatttatacttttaaattttagtacgaattctattcagtataatattgatcagaatgcaaatttgaaagttttctgtaataataaaaatattgcttctttggtaagtatttctcaaaagctagattttttaattactgttgatactggaaatttacatctttgtgatattttacaaattcctactttggcttttacaagtagtcttgcagcttatagatttggaggtggaagttatggaggtagatttgataaattgatagtaaaaccagcttggcaaaaagaatatagaaaaatttatgaaatttttactaaaaaagcagaaaataatttagaaaatttatagtttttataaaataataaatatttattatttattatttaaagatactgctatttttgtagtgttttgttcttttggcaaaggattggtttgtgctagataaaaggctacgagtacatttacaagcatagcgataagcaaaagaggagtggttcgttttataatatccattggagctacttttgcaaatccagctaaagctatgattccgcctgctattggtgaagctgcacgacctaaacaagatgcaatttctataggtaaaactagagtaataggtgcaacgcctaattttgtagctatatcaggagctagttttccaaaagcattaaaagcagcaattccacttcccataatcactgtggcaaaataaactaaaaagcttaaaatagctatacttaaaagaattccaaaccatgcaaaatttcctgttccaagatttgaaaccgcgttagcaaggatattaactccaccaagtgctttaatgccttcagcaaatactccagcagcgatgattatgcttacgactgagataaaaatttcagccatagcttttaaaatcaccatcatatcttcgcctaattttctagcatttctgtgtcttgcaaattcaacaagaaaaactaaagaaatgcttacaaaatttgctgttacaacatcgagcttgatagtaaaaaaatacgctgtaaataaaaatacaacaggtaaccaaggaaagagtatgtaaaaagtagggcatctaggatcaatgatttgcggaatttcaacttcatcatttaaaacacctttttctttatctcttttatcaatccaagcaaaataaaaaggaatcaagatggcaataactacaacataggcaatcacactataaatttggtaatttaaaaaaagccctacgacattatcactttgtcctaccatatctgccatattgattgaatttccatcttttggaccataatcaagcgcaattaaagaaagcacacatacagttgtaataggacggattttaagtgagattaaaacaggataaatacatgctaacaaaagcaaaagcaatccagcatagctagaaatgacgatttttaaagccattccaacaacaaaagttccacttaaaatcaagtatttatttttgatttttcctaagggtttatttgccaaaaaagcaagttttgccgaagcattgatatgtttcatataagcagcaaaacctgccacactcatgataataagtcctactccagaaagctgacttttaaaagtcgctgtgataaaagcataactatcaagtaaaacattcaaaaagcttgcatgttctctgctcggggcttttggtataggtgttcctgtgatgtaaaaagcaaaaataagcaagataatacctgaaagaaaaaatacaaaaataggattgtattttttaagtatataataagcaacgacaattaccgctaaaagtgtagaacatatcataaaaattggcatgatttctcctaaagttattattagcttttattttattttagctaaaatttaactaataaatatttttcatttaaaattttacttattttttgcattataaaattaataatatgtatagtttggttactgaaaagtttatgtttgtataaaaaatgatttttatattataattataaacaaattataaatatcaaaaaggatctagtgtggcaagaattttggcatttgatataggaataagctctattggctgggcatttagcgaaaatgatgagttaaaagattgcggagttaggatttttacaaaggctgaaaatcctaaaacaggagaatccctagccttaccaagacgccttgcaagaagtgccagaaaacgccttgctagacgcaaagcaaggctaaatcacttaaaacatttaatcgcaaatgagtttaagttaaattacgaagattatcaaagctttgatgaaagtttagctaaggcttataaaggctctttaattagcccttatgagttaagatttagagctttaaacgagcttttaagtaagcaagattttgcaagagtgattttacatattgcaaaaaggcgtggctatgatgatattaaaaataatggtgatgaagaaaagagcgagattttaaaagctatcaagcaaaatgaagaaaaactagtaaattatcaaagtgtgggagagtatctttataaagagtattttcaaaaattcaaagaaaattccaaagaatttataaatgttagaaataaaaaagaaagttatgaacgctgcataacgcaaagttttttaaaagatgaattaaagcttatttttcaaaaacaaagagaatttggcttttctttttcaaagaaatttgaagaagaagtgcttagtgtagcattttataaaagggctttaaaagatttttctcatttagtgggaaattgtagtttttttactgatgaaaaaagagcgccaaaaaattcgcctttagcttttatgtttgtagcactcacaagaattatcaatattttaaacaatcttaaaaatactgaaggaattttatatacaaaagatgatttaaacgcccttttaaatgaagttttaaaaaacggcactctaacttataaacaaacaaaaaagcttttgggcttaagcgatgattatgaatttaaaggagaaaaaggaacttattttattgagtttaaaaaatacaaagaatttataaaagccctaggtgagcataatttaagccaagatgatttaaatgaaatagcaaaagatatcactcttataaaagatgagattaaacttaaaaaggctttagcaaaatacgatttaaatcaaaatcaaattgatagcttaagcaaattggaatttaaagaccatttaaatataagttttaaagccttaaaacttatcactcctttaatgcttgaaggtaaaaaatacgatgaagcttgcaatgagcttaatttaaaagtagcaatcaatgaagataaaaaagactttttacccgcatttaatgaaacttattacaaagatgaagtaactaatcctgtggttttaagggcgattaaagaatatagaaaaatcttaaatgccttacttaaaaaatacggtaaagtgcataaaataaacattgaattagcaagagaagtaggtaaaaatcacagccaaagagctaaaatagaaaaagagcaaaacgaaaactacaaggccaaaaaagacgccgaaattgaatgtgaaaaactaggcttaaaaataaatagcaaaaatattttaaaattaagattatttaaagaacaaaaagaattttgtgcttatagtggagaaaagattaaacttagtgatttgcaagatgaaaaaatgcttgaaattgaccatatttacccttattctagaagttttgatgattcttatatgaataaagttttagtttttaccaagcaaaatcaagaaaagcttaataaaaccccctttgaagcctttggcaatgatagtacaaaatggcagaaaattgaagttttggcaaaaaatttacctgaaaaaaagcaaaaaagaattttagataaaaattacaaagacaaagagcaaaaagactttaaagatagaaatctaaatgatactcgctacatcgcaaggcttgttttaaactacactaaagattatttagattttttacctttaagcgatgatgaaaatacaaaattaaacgatacgcaaaaaggctcaaaagtgcatgtagaagcaaaaagcggtatgctaacatcggctttaaggcacacttggggctttagcgctaaggatagaaacaaccatcttcatcacgccatcgatgcagcaattattgcttatgcaaacaattctatcgtaaaggctttttcagattttaaaaaagagcaagaaagcaacagtgtagaactttatgcaaaaaaaattagtgaattagattataaaaacaaaaggaagttttttgagccttttagtggttttaggcaaaaggttttagataaaattgatgaaatttttgtctcaaaacctgagagaaaaaagccaagtggagctttacatgaagaaacatttagaaaagaagaagaattctatcaatcatacggcgaaaagaaggagttttaaaagccctagagcttggtaaaatccgcaaagtaaatggtaaaattgttaaaaatggcgatatgtttagagtggatatttttaaacacaaaaagacaaataaattttatgctgtgccaatttatactatggattttgctttaaaagtattaccaaataaagctgtagcgcgaagtaaaaaaggtgagataaaagactggattttaatggatgaaaattatgagttttgcttttctttatacaaagatagtttgattttaattcaaactaaagatatgcaagagccagaacttgtttattttaatgcttttacaagctctactgttagtttgattgtttcaaaacacgataataaatttgaaacgctaagcaaaaatcaaaaaatattgtttaaaaatgcaaatgaaaaagaagtaatcgcaaaaagcataggaattcaaaatctaaaagtatttgaaaaatacatagtttcagcacttggagaagtgacaaaggctgagtttagacaaagagaagattttaaaaaatgagttacgatgaagcttttaaaacactgcttattagctctaatgccaagctaaatttagagctaaatcatcttgtgattaagcaagatgaaaatatagccaaattgtttttaaaggatataaacatcatcgttttagaaagcttacaagtaagccttagttccgcactttttaacgcttttgcaaggcataaaattatcttattaacctgctgaaactcatagtataaatggtgtttttactccttttttagggcattttcaaagtgcaaaaatcgcaaaagagcaaatgaatgtaagtgctcaaaaaaaggctattttatggcaaaaaatcattaaaaacaaaatcctaaatcaagcctttgttttgaaaaaacacaataaaatagggcaaagcaatgagcttataaatttggctaaaaaagtaagcttaaatgatagtaaaaatatcgaagctgttgcagcggcgctttattttaaaactttgtttggcgtttctttttcaagagatgagctttgctttgaaaattctgctttaaattatggctatgcaatcattagggcttgtattattagagcagtttgtataagtgggcttttgccttggcttggcataaagcacgataatatttataattcttttgcactttgtgatgatttgatagaagtgtttagggctagtgttgatgattgtgttttaaagcttaagggtgaaagtgagtttttaagcaaagatgacaaaagagcgttgattggcaatttacaaagcaaaatcaattttgatgggcaaaattatcctttaaacagagcgataaatcattatgtggcgaattttaaaaatgctttattgtatgaagatgagctaaagatagtgaaatttgatgattgaagataaatttatgcgcgtgcttttgatgtttgatgtacctactaaaagtaaaaaagagcaaaaactagcaagtaaatttagaaacaatcttataaaattaggttattttatgctgcaatttagcgtttatatgcgtatttgcaagggtttaagttctgcaaaaagttctattgaaaatgtaaaaaagattttgccaccttatggaaatgtaagggctttaatcatcactgaaaagcaatttgataaaatggagcttttgcttggtggcatagtttttaatgaaaaagttaataacgaaactaatttaacgctttttgatatagatagtcatggagaatttaaatacaaaaattcaaataatgaagaaatacaactaaacaaaaaacaagaaaaatatcatcagcaaaatttatttgaattttaaaagcggttttaggggattgtaaccccgcagagtcccgcaaactctttattttagtccctttttaaatttcttattgagattatagcataatttttgctatttttcatgaaaaaaccccgaaattttcattatctggtaaatatctattttaccataaagaaatttaaaaagggactaaaacaaaatcaaattttttatataccttgcaaatattttaccataaagaaatttaaaaagggactaaaacaagccaacttgatgggttactaataaatcaattttaccataaagaaatttaaaaagggactaaaaaccctagtggattgaaactctgctagggctaattacttcactaaaaggaggtgcaaatttgaaacttattgaaatttagggttgattaaaatcgaaataaaattatttaaataattttaaggcataaagataatatctactaaactttcattttctaaaatttcacattcttttggtactaccataagggcagctttattgttaagattgtttataatcgcactagagccttctttcttaccttcaagattggctaaaatgcgtccatttttaaattccacattacaagcgacaaattccaaataaggtgtttttttcttgtagcttccttgtaaaaaggctttgcaaatatagtctttaggctgaagtaaccaagagtttaaaatctctcttgcgtaaagattaaacattaccatagccgagtaaggaaaacctggtaaggcgatgatgaatttttcattagccttggctattttgatatgtctacctggttttatgtcggctttatcgatgatgatttcgtattcttttacagctttttttaaaaagtcaaaatctcccatagaaactccgcctgttgtaatcaaaatatcacaactttgcaaagcactttcaagggtagaaaaagtggctttttcatcatcttttaaaagtggaaaaacccttgtatcgcaatttaaatttttagctaaattagctatggcgatatgatttgaagagcggatttgagcaggattttccaaggcttctcctagatctttgatctcacttccactacttaaaacccctacaataggctttataaacacactaatgtgaaaaaatccaagttcagccaaaagagctatttcgctataatttaactttgtgccttttttgagtaaaatttcatcttttttatagttttctcctactgcacgcacggcaaaagcttggggaacttttttttctataaaaagagtatcattttctacgcgtacattttcaacagggactaaagtatcacttccttcactcataagtgaacctgtaaaggtttttacacaagtaccattttgcacgctaaattgtggcatagtgcctgcaggtgtgaggcctaaaatttttaaaggcttatcttgatcttcaaatttgatcgcataaccatccatagccgaagttggaaattcaggctgatttttaggggcttttatgtcttgagctaaaatgcgtcctaaacactctgtaagagctattttttcaatcttttcataagttttgatatgagagtgtaaaatttttaaactttcttcataagacattaacattttttatccttttaaaagtcctgcaccgcaaagtttggttgatctttctttggcataaattctttctttgtttatcacatcatacttccaaataggtgcacttgctttaaaatcttcaacaaattcattaagaagtttaagtcctaattttctttgtttgcttaaaattcctgcaaaataagagctttcatgaaccgccacatcgcctatagagtgagcaaaaagcaagctaatatcatcaaaatctactcttttttgccactcatcaaaccatttttttaaaagcggttcataaatatcaaaactaagtgcctcaatgcctccttcttcacgcacaataccacaaaaagtcagcaaagcaccgcagtttttatccttggcaaattcataccattggctataaattttaggaatatctaaagaaccttgatagagtgtaaaatgtttcatttaacccccacaaactggcggtaaaagtgctattttatcaccatcttttaacttagtgttttcatcaaaaatgatttcatcgtttaaagatacggcacaaagttctagccattcttttaaactctcatctttttgcaaaatttcttttaattcttttaaattttttacctcaagctctaaattttctttatttatggggcctaaaaattccacttttatcattttattcctttacttctaaatttcccatcattcctaaatcttcatgttctaaaatatgacaatgatacattctaagtcctttaaaatcttgtttcattctaagtcttaactcttcattaggacgcacatttatagtatctcttaaggctctaaattcggctttttgaactttgccattgagttttgatgagatgagttcaaattgcgtgccgtgtatgtggaaaggatgatccatgtgagatttgtttatcactatccagtcttcaactactccaagtttggagcttaaatcaatgcgttttaaatcatagcttttgccattgattaaaaacatagacgcaagagcgatttttaattcgctttcactttttcccatcataccatgcatttgcatatgatcttcactcatgattatttctttaaattccttaggttcttctgaaggtttgaaaatttttaaattttttggaagttctacattttctttttttagactaatattagctaaaaatagggtattaggttcttcttttaccatcattttatccctatcataataagcactttctagcttaaaattcccatcttttggagcgtcgattaaaacttctacgcgagaagcaggacttaagaaaagttcttctttataaatagctttttctataagtccaccatcagtaccaacaagtataaacttagctccttgtatgcgtaaatttaaatatcttgctgcagtagcattataaatgcgtatgcgttcgtttgtggcgagtttgattttaggtttaaattgtccattaatgagtacaaattctccttctctaccatttagccaatcatttaggttgttgttcggaatttgagcgttttcatcaagacgcaaatcgctaatcatcaaatctttttcttttaaatgacttaaagcatctttttttgctttgatcacaaaagcccctgctaagcccataaaaacttgtttagaagtggtataatgagggtgtggatgataccagtaagttcctgcgctatcttgaggaatttcaaaacgatatattctttcttttcctgctaagataggatcatgtgggcttccatcttgatcaggtggcacaggaacgccatgccaatgtatagttgtagcttccttgagtttgtttttgactaaaatttcaagtttatctccttcaaaaacttctatttttggagcaggtactagaccattgtaagtataaaataaggtttttttacctttgataagctctatatgattttctttgatttctagggtagcacgaaaaatatttttttctttactttcatttttgagcaaaggcaaggcttttaaaatttctccttgggggaattgttttggatctaaaagttttaaattttttggagcaaagttgataaaagaagtatctaagtcatgatttatagaatgatttttatgcatagagtgcatatcgtgcataggatttgcataggctacacccatacttgctagagtaagtgcattaaattttaaaaaatttcttctattcattagtttttccttttgcttgattttttgtattatagtcattatttttttagttttagtaaatatttattttgaaaatttgatttaattttgttatgattttagcaatttaatcaaggaaaaataatgttttatgaaaaaattcaaactccagcttatattttagaagaagataaattaagaaaaaactgtgagcttttagcaagtgttggtgaaaaaagtggtgctaaagtgcttttagctttaaaaggttttgctttttcaggagcgatgaaaattgttggagaatacctaaaaggttgtacttgtagcggactttgggaagcaaaatttgctaaagaatacatggataaagaaattcatacttattcacctgcttttaaagaagatgaaataggtgaaatagccagtttatctcatcatatagtgtttaattctttagctcaatttcataaatttcaaagcaaaacacaaaaaaattccttaggtcttcgttgcaatgttgaattttctctagccccaaaagaactttacaatccttgtggaagatactcaagacttggaattcgtgctaaagattttgaaaatgtggatttaaatgctatagaaggacttcattttcacgcactttgtgaagaaagtgctgacgctttagaagctgttttaaaggtctttaaagagaaatttggtaaatggatagggcaaatgaaatgggtgaattttggaggaggacatcacatcaccaaaaaaggctatgatgttgaaaaacttattgctttgtgtaaaaatttcagcgataaatatggtgtacaagtttatcttgaaccaggtgaagcggtaggttggcaaacaggaaatttggttgctagtgtagtagatatcatagaaaatgaaaaacaaattgccattttagatacttcaagcgaagcacatatgccagatactatcatcatgccttatacaagtgaagttttaaatgctagaattttagccacaagagaaaatgaaaaaatttcagacttaaaagaaaacgaatttgcctatttacttactggaaatacttgtttagcgggtgatgtaatgggagagtacgcttttgataaaaagcttaaaatcggcgataaaattgtttttttagatcaaattcattacaccattgtgaaaaacacaacttttaatggtataagacttccaaatctcatgcttttagaccataaaaatgaacttcaaatgataagagaattttcttataaggattattctttaagaaattagtattatttataatttgcataaaatattaattttactcggaagagaatcaaagatataaattttatgcaaagtattttattttttcaaatataaaatcaactcaaatatctaattttcaatactttgatatgattttttaagattttaaatccttgtggaattttattgaaattcagtgatttttaaatcaaatagtattaagataaatcgatttaaaaatcggctttaaaatgaatattaggtatattttgcataatattcattcaagcaaaatttaaagctatttttgaaaattttgaatgcatggaggctttaatggatttggaaaaattaagattagctagaagtctttattatcaatgtctaggagagctttttgttttttcattttctgaagaaagattgtcaaaattacaagagtatttaaagacaatgcaagaatgtttatttgatgaaaatttaaaatcaaattttgatatcttgcttaagcatttagatgatgaaaattctatacaagcattttttaaagaatacgatttgctttttttaagtcttaaaaacagcattccaacgactttttcttacatagaagaaggttttgaaaattcaaatcctttactttgcgtgcgtcaaattttagtcaaaagtaaaataagacgcaatgaaaaattttttaaagaaagtgaagatagtgttggattttgtttattgttgatgagtgaatttttaaggcaaaatgaagatgatttagctaaagagctttttgaaaaagtgatcaataaaagcattgatgagtttttaggcgatgttttcatgaataaaaatgcgaatttatataaggaaattgcaagtattgcgatggcttttatggaatttgaaagactttgctttgaagtggaaaaacctgcaaaaataaattctaaaaaagtgcaaaatgatctatcgcgttcggaatttttaagaagagaagcaaataaacaaaggaggactcgtgaaaaatcgcagggaatttcttaaaaaatccgcttttgccttaggggctgctggagtgcttggtagcacaactttagctctagctaaagatgaagaaagaaaagatttggttaaaggtaaaagcaagaaaaaagaagtgctttttcaaagaagtgctaattgggaaaattattatataaaggctgagtaatgtcaagtgtaggtgaaaatatcaagcttacgcgtcgttcttttcttaaaatggcagcactttcaagtctagcaacaccgttgcttgctagaagtgaaactttaagagaagcgagtgctgatgagcttaaagaagcttatgaaggtagtaaaaaagtaaaaacagtttgtacagcctgttctgtaggctgtgggattattgcagaagtgcaaaatggtgtttgggtgcgtcaagaaatcgctcaagatcatcctgtgagttcaggtggacattgctgcaagggatctgatatgatcgatatggtgcgttcacatgtgcgtttaaaatatcctatgaaaaaagaaaatggagaatggaaacgcataagttatgagcaagctttaagtgagatcggagaaaaactagctgcttatcgtaaagaaaatcctgaaagtgttatgtttttaggttctgcaaaaatgagcaatgaacaagcttattatgtacgtaaatttgcagcgttttttggaacaaacaatgtagatcatcaagctagaatttgacacagcgcaacagtcgccggtgtggcgaatacatttggttatggcgctatgacaaaccatcttggagacattcaaagaagtaaatgtatcattatcattggggcaaatccagcggtaaatcatcctgtgggttttagacatttcttaaaagcaaaagaaaaaggtgcaaagcttatcgttgtagatcctagatttacaaaaagtgcagcaaaagcggatatttatgcaagaattcgtccaggaactgacattgctttcatgtatggaatgctaaaaatcatctttgatgaaggtttagaagatacaaaatatcttgatgaaagagtttttggaatcgataaaattcgtgaagaagcggcaaaatggacagctgaagaagtagaaaatgtcacaggaatttctaaagaacttttggtgcaaatcactcacgaagtagctaaaaacaaaccaactacgcttatttgggctatgggtttaactcaacacactgtaggaacttcaaatacacgtttagcacctattgtgcaaatggtacttggaaatataggtaaatttggtggtggagttaatatcttacgcggacatgataatgttcaaggtgcttcagatatggcttgtttgagcgaaaatttaccaggttattatcctttaaatgaagcgacttggagatactatgccaaaatttggggtgtggattatgagtggcttttaggaaattttgtaagcaaagattggatgcataaaaccggactttcacttgctagatggtgggcagcggctttaaatggaaaagatggaaatgatgctatcgataacgcaggaacgcctttaaaagctttagtagttatgggaaatggtatcacttcgactgcacaacaagtaaaagttaaagaaggtttggaagctttagagcttttagttttagccgatccttttgtaaatgaagcaggcattattgcagaaagaaaagatggaatttatcttttacctgcagcaacacagtttgaaacaagcggaagtgtaacagcaacaaatcgtagcggacaatggagatttaaagttgtagatccactttatgaaagcatggaagatcaagaaattttatttgagcttgctaaaaaattaggtttttatgaagactttaccaagactttacgcgatgaaaaaggtgagattgtttggcctgaaaatgcaacaagagaaattgcaaaagcagttagaagtatagggcttaatggttggagtcctgaaaggcttaaaaagcatactttatactgggataaatttgatgaggtaagtttagaaggaaaagatgaagttgctggtgagtattacgggcttccttggccttgttggagtgataagcacccaggttctcctgtactttataataccgacattgaagtcgcaaaaggtggtatgggctttagaaataattttggacttgagtatgaaggagagagtttacttgctaaaaatgcgcctttaaattcacctattgatacaggttatccacaaattactaaagataatatagaaaaagttttaggtattactttaagtgcccaagaaaaagaaaaaatgggatcaacttggtcttatgatgatagcaatatcatagcaactaaatgtatagaaaaaggcatagttccttatggaaatgctaaagctagagctgtagtttggacttttaaagataaaattccactccaccgtgagcctttacattctccaagaaacgatttggtgcaaaaatatccaagttttgaagatcaaaaagcgctttaccgcgtggatactaaatttgtgtctgtgcaacaagctaaggattattctaaagaattcccgcttaatcttgtt

SEQ ID NO: 3795 - DNA, 22954 bp, synthetic construct
  source 1..22954: mol_type = other DNA
  misc_feature 1..22954: note = Synthetic
gctgatggtgcttttcgtcgtggcaaaccttatatgttaaaacctgcagtagataaggctttaagtgaagggtgtgaaagtgtagaaaaagtacttatagttatgcgcaataatgagcctatagaatatattaaaggaagggactatgtttataacgaacttgtgaaaaatgaatcttataagtgtgaacccgaaattatggatagcgaggatttgttgtttttgctttacacttcaggatcaacgggcaagccaaaaggagttatgcatgcaagtgcaggatatatactttgggcacaaatgactatggaatgggtttttgatattaaagattatgataattattggtgtagtgctgatgtgggttggattacaggacatacttatgtagtttatgggcctttagcatgtggagcaacgactataatgcatgaaggaactcctacttatccaaattctgggcgttggtggagaatgatagaagagtatcaaataagcaaattctacacttcgccaactgccataagaatgcttcatgctgatgcacctgatgagccaagaaaatatgatttaagtacgcttgaagtgcttggaacggttggagagcctatcaatcctagtgcttggaagtggttttatgatgaaatagggggaactaaaagtcctatagtcgatacttggtggcaaacagaaacaggtgggcatatgatcacgcctttaccaggcgctactcctttaaaaccaggttgtgctaccttgcctttgccaggaatttttgcagaagttattgatgaagaaggcaataaaaaagatgaaggtgaagatggattgctttgtataaccaaaccttggccttcgatgattcgtggaatttggggtaatgatgaacgctatatagaaagttatttttctcaagctaaaaaagatggaaaagctgtatattttagtggcgatggtgctttttatgataaaaatggttatataactatcacaggaagaacagatgatgtggttaatgttgcaggacatcgtataggaacggctgaaattgaaagcgctattgctaaacatccaagtgtagcagaatcagctgtagtgagtattttggatgcgattaagggtgagtcattgtttgcttttgtggttttaagtcctgcatccagttgtgatcttggcggagctatagaaactttaaaagaacttaatgacattttaagagtagaaataggacctatagctaaaatagaaaaaattctttatactccaggtttgccaaaaactagaagtggtaaaataatgagaagaattttaagaactatagcaagaggtgaagaaatcaaacaggatatttcaacactcgaagattctggagtagtagaaatcattgttaaattagctaaggcagagtttgaataacaaggcaaaaagaactttgccttgttgcatgaaaattcataaaaataagctataatgataaaaaaataaaaggaaatttttatgcttcaaacttgtattttccctgcggcaggttatgggacaagatttttacctgcaacaaaaactttacctaaagagatgttgcctatcttaactaagcctttgattcattatggggttgatgaagctttggaagcaggaatggaaaatatgggctttgtcacagggcgtggaaaaagagctttggaggattattttgatatttcttatgaacttgagcatcaaatttcaggtacaaaaaaagaatacttacttgatgaaattcgctctttgatcaatcgttgcacctttacttttacaagacaaaatcaaatgaaaggcttaggtgatgcggttttaaaaggtaaacctttggttggcgatgaagcttttggcgtaattttggctgatgatttgtgtgtcaatgaagaaggcttaaatgttatggctcaaatggtaaaaatttatgaaaaatatcgctgcaccatcatagctgtgatggaagtaccaaaagaacaagtttcaaactatggagtaatttctggaaattttgtagaagaaaatcttatcatggttaattctatgatagaaaaaccaagtcctgatgaagctccaagtaatcttgctatcataggaagatatattttaactcctgatatttttggaattttagaaaatactaaagcaggaaaaaatggcgaaattcaacttaccgacgcgcttttaactcaagcaaccaatggtatggttttagcttataaatttcaaggaaaacgctttgattgtggaagtgtagaaggctttgtagaggctacaaattatttttacgagaaaagtaaatgttaaacaatacacttttttttaaacaaagtgaaattcacactataagctcttatgcaaatcgtattaatgatgaggtaaaaagtggagatatagggtattatcatcttattgacacgagcttaagcctgattgatgagagtttggcttttatcaaagacaaagaacacataaaaaatattgttttagtgggaatgggtggttcaagttgcggtgtaaaagccttgcgtgatatgctttttaatgaaaaaagtaatcaaagagaactttttatactcgataacacaagttcacattcttttaataagactttagaaaaaatcaagcttgaagaaagtttgtttttaatcatcagtaaaacaggtagcactatagaagttgtatcgctttttaaacttcttattgaacattttaaacttgatatgcaagaattaaaaaaatactttgtttttattaccgataaggattcaaaacttcatcaagaaggtgaaaatttaggtattaaatgcttttttatccctgcaaatgtaggaggtcgttttagcatactttcagctgtaggtatagttccgctttgtttttgtggctataatgccaaagctcttttagaaggagctaaagcttgttttgaagatttttttactcacaaaaaagatgaaattttacaaaaagcctatcattattgtacacacaaaaatgccaatatcaatgtacttttttcatatagtgatgcttttaaaggctttaatgaatggtatatccagcttattgctgaaagtttaggtaaaaagcaaggctataaacgcataggtttaactcctattgcactcattggagcaagagatcagcatagttttttacaactcatcatggatggacctaaaaataaaactgtaacttttttaaaaatcaaagacgctcaaaaagcacctattatccctgatattcattttaaatttttagattctttaagtaataaagtcaatcttcacgaacttttaaacgctcaatgtgatgcaactatgcacgctttaatcgctgaaaatttgagtgttgatgtgatagaacttgaaaaacttgacgcttggcatgcgggatatttgatgtattattatgaactttttacttcaacttgcggtgttatgctagggattaacacttatgatcaacctggtgtggaagttggaaaattgatcttaaaaaatatattaaattcttaatcaaaattcattaaaaaagagtataatgattttaagttagaattataataaaaatttttaattaataataattattatttaagaattttatgttataattttaaaaattaaaaaaaaggagtcaatcatgtcagttacaaaacaattattacaaatgcaagcagatgctcatcatctatgggttaaatttcataattatcactggaatgtaaaaggtttgcaatttttttctatacacgagtacacagaaaaagcttatgaagaaatggcagaactttttgatagttgtgctgaaagagttttacaacttggcgaaaaagctatcacttgccaaaaagttttaatggaaaatgcaaaaagtccaaaagttgcaaaagattgctttactccgcttgaagtcatagaactgatcaaacaagattatgaatatcttttagcagaatttaaaaaactcaatgaagcagcagaaaaagaaagtgataccacaacagctgcttttgcgcaagaaaatatcgcaaaatatgaaaaaagtctttggatgataggtgctactttacagggtacttgcaaaatgtaatttaaggggctttatgccccaattatacaaactaggttataatatccttttttaaaggataaaattgaaagtacttaattttttttatgaaaatcaccctaaatttgaagtaagttatgaaagaaaaaatcaaatttcaaaaccaaatattatcataaaaggcccacgattttgtggtaaaaaaacacttatttttaattttttatctcaatttaaagcaagtgaaattttgtttttagatttatatgatacacgctttgaaaaacaaagtttagaaagacttgctgattttctgaatgaaaatttacaaattaaaattctttgcctttataatttggattttatccctaatttagaaaaaattaaaattcccatcatcttaagtacaaatataaaagatttaaatataaatgggtttgaagagcttgaacttgattattttgattttgaagaatttattagtgtaagtaagaaaaatttacctataaataatttagtaggtctttttttacaaagtggacgcagtaaatttggagaaaaaaacatacttctaagacaaagcttcactcttttagaattagaaattttaaagtatttagctttaaatttgggtcagcaaatcagtatttctaagatatttatagaactcaaaaaaagattaaaaacttcaaaagatagtgtttatcaggctataaaaaaattagaaaatacttatgtgatctatactttaaaacatgatgaaaaaaaacttcaaaagatttattttaaagattttggcctaagaaataatctttgtatttcaaaggatttttcacatttatttgaaaatttagttttaagcgagttgtttaaatttaaagaagaatttttttataacaaatactttaacttttatagccaaatatctaaaattgcttatatttcaagtccaactttagatattgatttgattaaattacgtgctaagaaaattttaccaaaggctttagaacttggaatttttcatgtgatttttatcactctttcaagcgaggatagtttttttgagcaaggggttaaatttgaagtcatatcttttgataaattttcacttggattttaggtgttgtttgagtttgtatcgtatttttcaaggttgtatcgtttgatgatttttgtaataagattgatataatatcccttgcgttcagaataagaatctaaagttttaatagcctctagccctgttatctctttgccttcgctttcaaatttagctcttgcatcgcgaaacttttcataagcaaaatgacgatttaaatttaaaacataagagtcaacactatcttgcagactatcaaaaattttaattttgtgttttttatctggatgtcttaaatcaggaattaaacctttctcaccccaagtccattctccaaaaagattgtttgcttctcttgcgaagcgactggtacctgtagcactttcaactaaagcttgggctatacccatggattttggaattttttgaatacgttttttatattctgcaaaatcataaagattttcaatgcgatatttgttttttatcgtgataagtttttcaagatttatttggtttgaagtcctaaagcctgttttgtaagcatctttaaaaaaggcttcgataaaggctctttcttgttcaatttttttaaagctttgatcaaacatttcattcatttttataaaaaaaatttgtcttttttgatctatatcaagtttgtaatattcctctccaaatccactctttagatcatcagcaaaaagtgggattagaaaaagactaagaaaaattataattggcttcaaaacaatactttacctttccctcaaaaaacaattcttcatttttatatgtaaaccccacctcttcaccacttttaggagttattttaactttattttgtacttttttatttaaaaatgccagataaaaacaagcccccattcctgtgccgcaagctaaggtttcatcttcaactccgcgttcataggtgcgaacttttaaatgattttcatctaaaatttttacaaaattaacattggcattatatttttgtctcattttttgacaaagcattgtattaaattcatctaaattttgacaaaaatgtactagatgtggaactccagtgttgcaaagttgccaagtttttcctaattcttcaaaagtattttgcacgctttttattttgcctaaagatacttcaactttatcttgatttacctttgcttttattactcctgcaccggttaaaaaactcatgttaggatttattttgttaatatgatgtgcaaaatgtgccgcagcccttgagccattgccacacatagcagcccttgagccatcgttattataaaattcccattcaaagtcgtatttttcatgaggcaatatcacgataaagccatccgcacctataccctcataacgattacaaagttctttagctaaagcacttctatcttcttttctatcagcatttgttatgacaaaatcattcccacttgcacaatatttataaaatttcacatttttcctttagaaatttcttgtattactttaacacattcttgcctaaaatcggcataagaattagtatttttaatgataaaatctgcttttttaagtttttcttcaatatctatttgagaatcaagtcttgcttttgcagcttctaagctgagcttatctctttgcatgattcttttaaggcttaattctttaggtgtgtaaattacaatgactttgcctaaattttcataagcaccgctttcaaaaaaaagaggaatttctacaaaaaaagctttattttccttatctagaatttgcatttgttctaaaattttagctcgaattttaggatgagtgaaattttctaaggtttttttagcttctttgttgttaaaaacaatttctccaaggatttttctatcgattttattttcttttgtgagtaaattttttaagctaaagggagaaaaaatcttttcaagttctaaagcattttcatctaaaattttatgagcgattttatctgcactaatgcttttaaagcctaaagaattcgctatttctataaaggtgcttttaccacaagcaattgaagcggttacaaaaaaagcatttttcatcttatgccttattaaaacttttttcgttaaaatacctttttagttcttaaaggaaaataaatgaaaatttcatatgaagatgcaggtgtaagtatagataatggaaatgcctttgtagaggctataaaacctttggttaaagaaacttttaatgataatgttgtaggtggaattggttcttttgctggtgcttttagaatgccaagtggttttaaaaagcctgtgattttaggtgcaacagatggggttggtaccaagcttcgcttggcaattgatgctaaaaaatatgataccatagggcaagatttagtagcaatgtgtgtgaatgatttgatttgtaattttgctacgcctttgtttttcctagattattatgctacagccaagcttgaagtagaagtagcaaaggctgttgtatcaggcattgccaagggatgtaagatggcaaattgtgcattaatcggcggagaaactgctgaaatgcctggaatgtatgcaaaagatgattttgatcttgcgggttttgcagtgggtatggctgaagaagatgagatcgatagaagtaaatttgttaaaaatggtgatattttattggcacttcctagttcaggacttcattcaaatggctattctttagctagaaaagtactttttgaaagtttaaaattaaaatttgatgacaagatagagggtaaaaatttaattgatattttattagaacctacaaggatttatgtgcgtgattttcttacactaaagccttacatcagtgctctagctcatattacagggggtggtttagtagaaaatttaccacgcgttttacctcgtggtatgggtgcaactatacgcaaacatcatcttaaaactcctgaaattttttatactataggacaggctgtagaagaaagcgaaatgtatagaagctttaacatgggagtgggtttagtaatggttgtagatccttctaatgtaagtaaggttttagaaaattcagatgcctttattatcggcgaaatttgcattaatgaaggtattgttttagagtgaaaataaagcgtcaatacgctttatttttgtattttaagttctatttttgtagtgttttgttcttttggcaaaggattggtttgtgctagataaaaggctacaagcacatttacaagcatagcgataagtaaaagaggagtggttcgttttataatatccattggagctacttttgcaaatccagctaaagctatgattccgcctgctattggtgaagctgcacgacctaaacaagatgcaatttctataggtaaaactagagtaataggtgcaacgcctaattttgtagctatatcaggagctagttttccaaaagcattaaaagcagcaattccacttcccataatcactgtggcaaaataaactaaaaagcttaaaatagctatactcaaaagaattccaaaccatgcaaaatttcctgttccaagatttgaaaccgcgttggcaaggatattaactccaccaagtgctttaatgccttcagcaaatactccagcagcgatgattatgcttacgactgagataaaaatttcagccatagcttttaaaatcaccatcatatcttcgcctaattttctagcatttctgtgtcttgcaaattcaacaagaaaaactaaagaaatgcttacaaaatttgctgttacaacatcgagcttgatagtaaaaaaatacgctgtaaataaaaatacaacaggtaaccaaggaaagagtatgtaaaaagtagggcatttaggatcaatgatttgcggaatttcaacttcatcatttaaaacacctttttctttatctcttttatcaatccaagcaaaataaaaaggaatcaagatggcaataactacaacataggcaatcacactataaatttggtaatttaaaaaaagccctacgacattatcactttgtcctaccatatctgccatattgattgaatttccatcttttggaccataatcaagcgcaattaaagaaagcacacatacagctgtaataggacggattttaagtgagattaaaacaggataaatacatgctaacaaaagcaaaagcaatccagcatagctagaaatgacgatttttaaagccattccaacaacaaaagttccacttaaaatcaagtatttatttttgatttttcctaagggtttatttgctaaaaaagcaagttttgctgaagcattgatatgtttcatataagcagcaaaacctgccacactcatgataataagtcctactccagaaagctgacttttaaaagtcgctgtgataaaagcataactatcaagtaaaacattcaaaaagcttgcatgttctctgctcggggcttttggtataggtgttcctgtgatgtaaaaagcaaaaataagcaagataatacctgaaagaaaaaatacaaaaataggattgtattttttaagtatataataagcaacgacaattaccgctaaaagtgtagaacatatcataaaaattggcatgatttctcctaaagttattattagcttttattttattttagctaaaatttaactaataaatatttttcatttaaaattttacttattttttgcattataaaattaataatatgtatagtttggttactgaaaagtttatgtttgtataaaaaatgatttttatattataattataaacaaattataaatatcaaaaaggatctagtgtggcaagaattttggcatttgatataggaataagctctattggctgggtatttagcgaaaatgatgagttaaaagattgcggagttaggatttttacaaaggctgaaaatcctaaaacaggagaatccctagccttaccaagacgccttgcaagaagtgccagaaaacgccttgctagacgcaaagcaaggctaaatcacttaaaacatttaatcgcaaatgaatttaagttaaattacgaagattatcaaagctttgatgaaagtttagctaaggcttataaaggctctttaattagcccttatgagttaagatttagagctttaaacgagcttttaagtaagcaagattttgcaagagtgattttacatattgcaaaaaggcgtggctatgatgatattaaaaataatggtgatgaagaaaagagcgagattttaaaagctatcaagcaaaatgaagaaaaactagtaaattatcaaagtgtgggagagtatctttataaagagtattttcaaaaattcaaagaaaattccaaagaatttataaatgttagaaataaaaaagaaagttatgaacgctgcataacgcaaagttttttaaaagatgaattaaagcttatttttcaaaaacaaagaggatttggcttttctttttcaaagaaatttgaagaagaagtgcttagtgtagcattttataaaagggctttaaaagatttttctcatttagtgggaaattgtagtttttttactgatgaaaaaagagcgccaaaaaattcgcctttagcttttatgtttgtagcacttacaagaattatcaatcttttaaacaatcttaaaaatactgaaggaattttatatacaaaagatgatttaaacgctcttttaaatgaagttttaaaaaacggcactctaacttataaacaaacaaaaaagcttttgggtttaagcgatgattatgaatttaaaggagaaaaaggaacttattttattgagtttaaaaaatacaaagaatttataaaagccttagatgaacatagtttaagccaagatgatttaaatgaaatagcaaaagatattactcttataaaagatgagattaaacttaaaaaggctttagcaaaatacgatttaaatcaaaatcaaattgatagcttaagcaaattggaatttaaagaccatttaaatataagttttaaagccttaaaacttatcactcctttaatgcttgaaggtaaaaaatacgatgaagcttgtaatgagcttaatttaaaagtagcaatcaatgaagataaaaaagattttttacccgcatttaatgaaacttattataaagatgaggtaactaatcctgtggttttaagggcgattaaagaatatagaaaaatcttaaatgccttacttaaaaaatacggtaaagtgcataaaataaacattgaattagcaagagaagtaggtaaaaatcacagccaaagagctaaaatagaaaaagagcaaaacgaaaactacaaggccaaaaaagacgccgaaattgaatgtgaaaaactaggcttaaaaataaatagcaaaaatattttaaaattaagattatttaaagaacaaaaagaattttgtgcttatagtggagaaaagattaaaattagtgatttgcaagatgaaaaaatgcttgaaattgaccatatttacccttattctagaagttttgatgattcttatatgaataaagttttagtttttactaagcaaaatcaagaaaagcttaataaaaccccctttgaagcctttggcaatgatggtgtaaaatggcagaaaattgaagttttggcaaaaaatttacctgaaaaaaagcaaaaaagaattttagataaaaattacaaagacaaagagcaaaaagactttaaagatagaaatctaaacgatactcgctacatcgcaaggcttgttttaaactacactaaagattatttagattttttacctttaagcgatgatgaaaatacaaaattaacgatacgcaaaaaggctcaaaagtgcatgtagaagcaaaaagcggtatgctaacatcggctttaagacacacttggggctttagcactaaggatagaaataatcatcttcatcacgccatcgatgcagcaattattgtttatgcaaacaactctatcgtaaaggctttttcagattttaaaaaagagcaagaaagcaacagtgcagaactttatgcaaaaaaaattagtgaattagattataaaaacaaaaggaagttttttgagccttttagtggttttaggcaaaaggttttagataaaattgatgaaatttttgtctcaaaacctgagagaaaaaagccaagtggagctttacatgaagaaacatttagaaaagaagaagaattctatcaatcatacggcggaaaagaaggagttttaaaagccctagagcttggtaaaatccgcaaagtaaatggtaaaatagttaaaaatggcgatatgtttagagtggatatttttaaacacaaaaagacaaataaattttatgctgtgccaatttatactatggattttgctttaaaagtattaccaaataaagctgtagcacgaagtaaaaaaggtgagataaaagactggattttaatggatgaaaattatgagttttgcttttctttatacaaagatagtttgattttaattcaaactaaagatatgcaagagccagaacttgtttattttaatgcttttacaagctctactgttagtttgattgtttcaaaacacgataataaatttgaaacgctaagcaaaaatcaaaaaatattgtttaaaaatgcaaatgaaaaagaagtaatcgcaaaaagcataggaattcaaaatctaaaagtatttgaaaaatacatagtttcagcacttggggaagttacaaaggctgagtttagacaaagagaagattttaaaaaatgagttacgatgaagcttttaaaacactgcttattagctctaatgccaaactaaatttagagctaaatcatcttgtgattaaacaagatgaaaatatagccaaattgtttttaaaggatataaacatcatcgttttagaaagcttacaagtaagccttagttccgcactttttaatgcctttgcaaagcataaaattatcttattaacctgcgatgaaactcatagtataaatggtatttttactccttttttagggcattttcaaagtgcaaaaatcgcaaaagagcaaatgaatgtaagtgctcaaaaaaaggctattttatggcaaaaaatcattaaaaacaaaatcctaaatcaagcctttgttttgaaaaaacacaataaaatagggcaaagcaatgagcttataaatttggctaaaaaagtaagcttaaatgatagtaaaaatatcgaagctgttgcagcggcgctttattttaaaactttgtttggcgtttctttttcaagagatgagctttgctttgaaaattctgctttaaattatggctatgcaatcattagggcttgtattattagagcagtttgtataagtgggcttttgccttggcttggcataaagcacgataatatttataattcttttgcgctttgcgatgatttgatagaagtgtttagggctagtgttgatgattgtgttttaaagcttaagggtgaaagtgagtttttaagcaaagatgacaaaagagcgttgattggcaatttacaaagcaaaatcaattttgatgggcaaaattatcctttaaatagagcgataaatcattatgtggcgaattttaaaaatgctttattgtatgaagatgaactaaagatagtaaaatttgatgattgaagataaatttatgcgcgtgcttttgatgtttgatgtacctactaaaagtaaaaaagagcaaaaactagcaagtaaatttagaaacaatcttataaaattaggttattttatgttgcaatttagcgtttatatgcgtatttgcaagggtttaagttctgcaaaaagttctattgaaaatgtaaaaaagattttgccaccttatggaaatgtaagagctttaatcatcactgaaaagcagtttgataaaatggagcttttgcttggtggcatagtttttaacgaaaaagttaataacgaaaccaatttaacgctttttgatatagatagtcatggagaatttaaatataaaaattcaaataatgaagaaattcaaataaacaaaaaacaagaaaaatatcatcagcaaaatttatttgaattttaagagcggttttaggggattgtaaccccgcagagtcccgcaaactctttattttagtccctttttaaatttcttatgagattatagcataatttttgctatttttcatcaaaaaaccccgaaattttcattatctggtaaatatctattttaccataaagaaatttaaaaagggactaaaactctccaattccctgtattctctctctaaaaattttaccataaagaaatttaaaaagggactaaaactaaactacctaaagcaagattatcgcttttattttaccataaagaaatttaaaaagggactaaaacttagcaagtgatagtattataaacaatgcattttaccataaagaaatttaaaaagggactaaaactgctttttttatatattcaaaaggtaatttattttaccataaagaaatttaaaaagggactaaaaccaaacaattaaagagattgaaagtcgcaaaattttaccataaagaaatttaaaaagagactaaaacaacacccctgttacacaatttgatttttctattttaccataaagaaatttaaaaagggactaaaacatttgctataaactcatttatttcagtgcaattttaccataaagaaatttaaaaagggactaaaactcaagaccaagaagcagagtatcaaaatacattttaccataaagaaatttaaaaagggactaaaactggttgttttgttcaatcaaaaacaggtgcattttaccataaagaaatttaaaaagggactaaaaaccctagtggattgaaactctgctagggctaattacttcactaaaaggaggtgcaaatttgaaacttattgaaatttagggttgattaaaatcgaaataaaattatttaaataattttaaggcataaagataatatctactaaactttcattttctaaaatttcacattcttttggtactaccataagggcagctttattgttaagattgtttataatcgcactagagccttctttcttaccttcaagattggctaaaatgcgtccgtttttaaattctatattacaagcaacaaattccaaataaggcgtttttttcttgtagtttccttgtaaaaaggctttacaaatgtaatctttaggctgaagcaaccaagaatttaaaatttctcttgcataaagattaaacattaccatagccgagtaaggaaaaccgggtaaggcgataatgaatttttcattagccttagctattttgatatgtcttcctggttttatatctgctttatcaatgatgatttcatattcttttacagctttttttaaaaagtcaaaatcccccatagaaaccccacctgttgtaactaaaatatcacaactttgtaaagcgctttcaagagtggaaaaagttgttttttcatcatcttttaaaagtggaaaaactcttgtttgacatcctaaatttttagctaaattagctatagctatatgattgctagatctaatttgtgcaggattctccaaggtttctcctagatctttgatctcacttccactacttaaaacccctacaataggctttataaacacgctaatgtgaaaaaatccaagttcagccaaaagagctatctcgctataatttaactttgctccttttttcagtaaaatttcatcttttttatagttttctcctattttacgaactgcaaaacctttagaaactttttcttctataaaaagggtattattttccacacgtacattttcaataggaattaaagtatcacttcccttactcataagagaacctgtaaaggtttttacacaagtgccattttgcacgctaaattgtggcatagtacctgcagatgtgatacctaaaatttttaaaggcttatcttgatcttcaaatttgatcgcataaccatccatagccgaagttggaaattcaggttgatttttagctgcttttatatcttgagctaaaatacgtcctaaacactctgtaagagctattttttcaatcttttcataggttttgatatgagagtgtaaaattttcaaactttcttcataagacattaacattttttatccttttaaaagtcctgcaccgcaaagtttggttgatctttctttggcataaattctttctttgtttatcacatcatacttccaaataggtgcacttgctttaaaatcttcaacaaattcattaagaagtttaagtcctaattttctttgtttgcttaaaattcctgcaaaataagagctttcatgaaccgccacatcgcctatagagtgagcaaaaagcaagctaataccatcaaaatctactcttttttgccactcatcaaaccatttttttaaaagcggttcataaatatcaaaactaagtgcctcaatgcctccttcttcacgcacaataccacaaaaagtcagcaaagcaccgcagtttttatccttggcaaattcataccattggctataaattttaggaatatctaaagaaccttgatagagtgtaaaatgtttcatttaacccccacaaactggcggtaaaagtgctattttatcaccatcttttaacttagtgttttcatcaaaaatgatttcatcgtttaaagatacggcacaaagttctagccattcttttaaactctcatctttttgcaaaatttcttttaattcttttaaattttttacctcaagctctaaattttctttatttatggggcctaaaaattccacttttatcattttattcctttacttctaaatttcccatcattcctaaatcttcatgttctaaaatatgacaatgatacattctaagtcctttaaaatcttgtttcattctaagtcttaactcttcattaggacgcacatttatagtatctcttaaggctctaaattcggctttttgaactttgccattgagttttgatgagatgagttcaaattgcgtgccgtgtatgtggaaaggatgatccatgtgagatttgtttatcactatccagtcttcaactactccaagtttggagcttaaatcaatgcgttttaaatcatagcttttgccattgattaaaaacatagacgcaagagcgatttttaattcgctttcactttttcccatcataccatgcatttgcatatgatcttcactcatgattatttctttaaattccttaggttcttctgaaggtttgaaaatttttaaattttttggaagttctacattttctttttttagactaatattagctaaaaatagggtattaggttcttcttttaccatcattttatccctatcataataagcactttctagcttaaaattcccatcttttggagcgtcgattaaaacttctacgcgagaagcaggacttaagaaaagttcttctttataaatagctttttctataagtccaccatcagtaccaacaagtataaacttagctccttgtatgcgtaaatttaaatatcttgctgcagtagcattataaatgcgtatgcgttcgtttgtggcgagtttgattttaggtttaaattgtccattaatgagtacaaattctccttctctaccatttagccaatcatttaggttgttgttcggaatttgagcgttttcatcaagacgcaaatcgctaatcatcaaatctttttcttttaaatgacttaaagcatctttttttgctttgatcacaaaagcccctgctaaacccataaaaacttgtttagaagtggtataatgagggtgtggatgataccagtaagttcctgcgctatcttgaggaatttcaaaacgatatattctttcttttcctgctaagataggatcatgtgggcttccatcttgatcaggtggcacaggaacgccatgccaatgtatagttgtagcttccttgagtttgtttttgactaaaatttcaagtttatctccttcaaaaacttctatttttggagcaggtactagaccattgtaagtataaaataaggtttttttacctttgataagctctatatgattttctttgatttctagggtagcacgaaaaatatttttttctttactttcatttttgagcaaaggcaaggcttttaaaatttctccttgggggaattgttttggatctaaaagttttaaattttttggagcaaagttgataaaagaagtatctaagtcatgatttatagaatgatttttatgcatagagtgcatatcgtgcataggatttgcataggctacacccatacttgctagagtaagtgcattaaattttaaaaaatttcttctattcattagtttttccttttgcttgattttttgtattatagtcattatttttttagttttagtaaatatttattttgaaaatttgatttaattttgttatgattttagcaatttaatcaaggaaaaataatgttttatgaaaaaattcaaactccagcttatattttagaagaagataagttaagaaaaaattgtgagcttttagcaagtgttggtgaaaaaagtggtgctaaagtgcttttagctttaaaaggttttgctttttcaggagcgatgaaaattgttggagaatacctaaaaggttgtacttgtagcggactttgggaagcaaaatttgctaaagaatacatggataaagaaattcatacttattcacctgcttttaaagaagatgaaataggtgaaatagccagtttatctcatcatatagtgtttaattctttagctcaatttcataaatttcaaagcaaaacacaaaaaaattccttaggtcttcgttgcaatgttgaattttctctagccccaaaagaactttacaatccttgtggaagatactcaagacttggaattcgtgctaaagattttgaaaatgtggatttaaatgctatagaaggacttcattttcacgcactttgtgaagaaagtgctgacgctttagaagctgttttaaaggtctttgaagagaaatttggtaaatggatagggcaaatgaaatgggtgaattttggaggaggacatcacatcaccaaaaaaggctatgatgttgaaaaacttattgctttgtgtaaaaatttcagcgataaatatggtgtacaagtttatcttgaaccaggtgaagcggtaggttggcaaacaggaaatttggttgctagtgtagtagatatcatagaaaatgaaaaacaaattgccattttagatacttcaagcgaagcacatatgccagatactatcatcatgccttatacaagtgaagttttaaatgctagaattttagccacaagagaaaatgaaaaaatttcagacttaaaagaaaacgaatttgcctatttacttactggaaatacttgtttagcgggtgatgtaatgggagagtacgcttttgataaaaagcttaaaatcggcgataaaattgtttttttagatcaaattcattacaccattgtgaaaaacacaacttttaatggtataagacttccaaatctcatgcttttagaccataaaaatgaacttcaaatgataagagaattttcttataaggattattctttaagaaattagtattatttataatttgcataaaatattaattttacccggaagagaatcaaagatataaattttatgcaaagtattttattttttcaaatataaaatcaactcaaatatctaattttcaatactttgatatgattttttaagattttaaatccttgtggaattttattgaaattcagtgatttttaaatcaaatagtattaagataaatcgatttaaaaatcggctttaaaatgaatattaggtatattttgcataatattcattcaagcaaaatttaaagctatttttgaaaattttgaatgcatggaggctttaatggatttggaaaaattaagattagctagaagtctttattatcaatgtctaggagagctttttgttttttcattttctgaagaaagattgtcaaaattacaagagtatttaaagacaatgcaagaatgtttatttgatgaaaatttaaaatcaaattttgatatcttgcttaagcatttagatgatgaaaattctatacaagcattttttaaagaatacgatttgctttttttaagtcttaaaaacagcattccaacgactttttcttacatagaagaaggttttgaaaattcaaatcctttactttgcgtgcgtcaaattttagtcaaaagcaaaataagacgcaatgaaaaattctttaaagaaagtgaagatagtgttggattttgtttattgttgatgagtgaatttttaaggcaaaatgaagatgatttagccaaagagctttttgaaaaagtgatcaataaaagcattgatgagtttttaggcgatgttttcatgaataaaaatgcgaatttatataaggaaattgcaagtattgcatcggcttttatggaatttgaaagactttgctttgaagtggaaaaacctgcaaaaataaattctaaaaaagtgcaaaacgatctatcgcgttcagaatttttaagaagagaagcaaataaacaaaggaggactcgtgaaaaatcgcagggaatttcttaaaaaatccgcttttgccttaggggctgctggagtgcttggtagcacgactttagctctagctaaagataaagaaagaaaagatttggttaaaggtaaaagtaagaaaaaagaagtgctttttcaaagaagtgctaattgggaaaattattatataaaggctgagtaatgtcaagtgtaggtgaaaatatcaagcttacgcgtcgttcttttcttaaaatggcagcactttcaagcctagcaacaccgttgcttgctagaagtgaaactttaagagaagcgagtgctgatgagcttaaagaagcttatgaaggtagtaaaaaagtaaaaacagtttgtacagcctgttctgtaggctgtgggattatcgcagaagtgcaaaatggtgtttgggtgcgtcaagaaatcgctcaagatcatcctgtgagttcaggtggacattgctgcaagggatctgatatgatcgatatggtgcgttcacatgtgcgtttaaaatatcctatgaaaaaagaaaatggagaatggaaacgcataagttatgagcaagctttaagtgagatcggagaaaaactagctgcttatcgtaaagaaaatcctgaaagtgttatgtttttaggttctgcaaaaatgagcaatgaacaagcttattatgtgcgtaaatttgcagcgttttttggaacaaacaatgtagatcatcaagctagaatttgacacagcgcaacagtcgccggtgtggcgaatacatttggttatggcgctatgacaaaccatcttggagacattcaaagaagtaaatgtatcattatcattggggcaaatccagcggtaaatcatcctgtgggttttagacatttcttaaaagcaaaagaaaaaggtgcaaagcttatcgttgtagatcctagatttacaaaaagtgcggcaaaagcggatatttatgcaagaattcgtccaggaactgacattgctttcatgtatggaatgctaaaaatcatctttgatgaaggcttagaagatacaaaatatcttgatgaaagagtttttggaattgataaaattcgtgaagaagcagcaaaatggacagctgaagaagtagaaaatgttacagggatctctaaagaacttttggtgcaaatcactcacgaagtagctaaaaacaaaccaactacgcttatttgggctatgggtttaactcaacacactgtaggaacttcaaatacacgtttagcacctattgtgcaaatggtacttggaaatataggtaaatttggtggtggagttaatatcttacgcggacatgataatgttcaaggtgcttcagatatggcttgtttgagcgaaaatttaccaggttattatcctttaaatgaagcgacttggagatactatgccaaaatttggggtgtggattatgagtggcttttaggaaattttgtaagcaaagattggatgcataaaactgggctttcacttgctagatggtgggcagcggctttaaatggaaaagatggaaatgatgctatcgataacgcaggaacgcctttaaaagctttagtagttatgggaaatggtatcacttcgactgcacagcaagtaaaagttaaagaaggtttggaagctttagagcttttagttttagccgatccttttgtaaatgaagcaggcattattgcagaaagaaaagatggaatttatcttttacctgcagcaacacagtttgaaacaagcggaagtgtaacagcaacaaatcgtagcggacaatggagatttaaagttgtagatccactttatgaaagcatggaagatcaagaaattttatttgagcttgctaaaaaattaggtttttatgaagactttaccaagactttacgcgatgaaaaaggtgagattgtttggcctgaaaatgcaacaagagaaattgcaaaagcagttagaagtatagggcttaatggttggagtcctgaaaggcttaaaaagcatactttatactgggataaatttgatgaggtaactttagaaggaaaagatgaagttgctggtgagtattacgggcttccttggccttgttggagtgataagcacccaggttctcctgtactttataataccgac

SEQ ID NO: 3796 - DNA, 22915 bp, synthetic construct
  misc_feature 1..22915: note = Synthetic
  source 1..22915: mol_type = other DNA
tgatggtgcttttcgtcgtggcaaaccttatatgttaaaacctgcagtagataaggctttaagtgaagggtgtgaaagtgtagaaaaagtacttatagttatacgcaataatgagcctatagaatatattaaaggaagggactatgtttataacgaacttgtgaaaaatgaatcttataagtgtgaacccgaaatcatggatagcgaggatttgttgtttttgctttacacttcaggatcaacaggtaagccaaaaggagttatgcatgcaagtgcaggatatatactttgggcacaaatgactatggaatgggtttttgatattaaagattatgataattattggtgtagtgctgatgtgggttggattacaggacatacttatgtagtttatgggcctttagcatgtggagcaacgactataatgcatgaaggaactcctacttatccaaattctgggcgttggtggagaatgatagaagaatatcaagtgagtaaattctacacttcgccaactgccataagaatgcttcatgctgatgcacctgatgtgccaagaaaatatgatttaagtacgcttgaagtgcttggaacggttggagagcctatcaatcctagtgcttggaagtggttttatgatgaaatagggggaactaaaagtcctatagtcgatacttggtggcaaacagaaacaggtgggcatatgatcacgcctttaccaggcgctactcctttaaaaccaggttgtgccaccttgcctttgccaggaatttttgcagaagttattgatgaagaaggcaataaaaaagatgagggtgaagatggattgctttgtataaccaaaccttggccttcgatgattcgtggaatttggggtaatgatgaacgctatatagaaagttatttttctcaagctagaaaagatggaaaagctgtatattttagtggcgatggtgctttttatgataaaaatggttatattaccatcacaggaagaacagatgatgtggttaatgttgcaggacatcgtataggaacggctgaaattgaaagcgctattgctaaacatccaagtgtagcagaatcagctgtagtgagtattttggatacgattaagggcgagtcattgtttgcttttgtagttttaagtcctgcatccagttgtgatcttggcggagctatagaaactttaaaagaacttaatgacattttaagagtagaaataggacctatagctaaaatagaaaaaattctttatactccaggtttgccaaaaactagaagtggtaaaataatgagaagaattttaagaactatagcaagaggcgaagaaatcaaacaggatatttcaacacttgaagattctaaagtagtagaaaccattgttaaattagctaaggcagagtttgaataacaaggtaaaaagaactttgcctagttgcatgaaaattcataaaaataagctataatgataaaaaaataaaaggaaatttttatgcttcaaacttgtattttccctgcggcaggttatgggacgagatttttacctgcaacaaaaactttacctaaagagatgttacctatcttaaccaagcctttgatccattatggagttgatgaagctttagaagcaggaatggaaaatatgggatttgtcacagggcgtggaaaaagagctttggaggattattttgatatttcttatgaacttgaacatcaaatttcaggtacaaaaaaagaatacttacttgatgaaattcgttctttaatcaatcgttgtacctttacttttacaagacaaaatcaaatgaaaggcttaggtgatgcggttttaaaaggtagacctttggttggcgatgaagcttttggcgtaattttggctgatgatttgtgtgttaatgaagaaggcttaaatgttatggctcaaatggtaaaaatttatgaaaaatatcgctgcaccatcatagctgtgatggaagtaccaaaagaacaagtttcaaactatggagtaatttctggaaattttgtagaagataatcttatcatggttaattctatgatagaaaaaccaagtcctgatgaagctccaagtaatcttgctatcataggaagatatattttaactcctgatatttttggaattttagaaaatactcaagcaggaaaaaatagcgaaattcaacttaccgacgcgcttttaactcaagcaaccaatggtatggttttagcttataaatttcaaggaaaacgttttgattgtggaagtgtagaaggctttgtagaggcgacaaattatttttacgagaaaagtaaatgttaaacaatacgcttttttttaaacaaagtgaaattcacactataagttcttatgcaaatcgtattaatgatgaggtaaaaagtggagatatagggtattatcatcttattgacacaagtttaaatttaatcgatgagagcttgcaatttattcaagataaagagtatgtaaaaaatatcgttttagtgggaatgggaggttcaagttgtggtgtaaaagccttgcgtgatatgctttttaatgaaaaaagcaaccaaagagagctttttatactcgataacacaagctcgcattcttttaataagactttagaaaaaatcaagcttgaagaaagtttgtttttaatcatcagtaaaacaggtagcactatagaagttgtatcgctttttaaacttcttattgagtattttaaacttgatatgcaagaattaaaaaaatactttgtttttattaccgataaggattcaaaacttcatcaagaaggtgaaaatttaggtattaaatgcttttttatccctgcaaatgtaggaggtcgttttagcatactttcagccgtaggtatagttccgctttgtttttgtggctataatgccaaagctcttttagaaggagctaaagcttgttttgaagatttttttactcacaaaaaagatgaaattttacaaaaagcttatcattattgcacgcataaaaatgccaatatcaatgtacttttttcatatagcgatgcttttaaaggctttaatgaatggtatatccagcttattgctgaaagtttaggtaaaaagcaaggctataaacgcataggtttaactcctattgcactcattggcgcaagagatcagcatagttttttacagctcattatggatggacctaaaaataaaactgtaacttttttaaaaatcaaagacgctcaaaaagcgcctattattcctgatattcattttaaatttttagattctttaagcaataaagtcaatcttcacgaacttttaaacgctcaatgtgatgcaactatgcacgctttaatcgccgaaaatttgagtgttgatgtgatagaacttgaaaaacttgacgcttggcatgcgggatatttgatgtattattatgaactttttacttcaacttgcggtgttatgctagggattaacacttatgatcaacctggtgtggaagttggaaagttgatcttaaaaaatatattaaattcttaatcaaaattcattaaaaaagagtataatgattttaaattaaaattataataaaaatttttaattaataataattattatttaagaattttatgttataattttaaaaatcaaaaaaaggagtcaatcatgtcagttacgaaacaattattacaaatgcaagcagatgctcatcatctatgggttaaatttcataattatcactggaatgtaaaaggtttgcaatttttttctatacacgaatacacagaaaaagcttatgaagaaatggcagaactttttgatagttgtgctgaaagagttttacaacttggcgaaaaagccatcacttgccaaaaagttttaatggaaaatgcaaaaagtccaaaagttgcaaaagattgctttactccacttgaagtcatagaactgatcaaacaagattatgaatatcttttagcagaatttaaaaaactcaatgaagcagcagaaaaagaaagtgataccacaacagctgcttttgcgcaagaaaatatcgcaaaatatgaaaaaagtctttggatgataggcgctactttgcaaggtgcttgcaaaatgtaatttaaggggctttatgccccaattatacaaactaggttataatatccttttttaaaggataaaattgaaagtacttaattttttttatgaaaaccatcctaaatttgaagtaagttatgaaagaaaaaatcaaatttcaaaaccaaatattatcataaaaggcccacgattttgtggtaaaaaaacacttatttttaattttttatctcaatttaaagcaagtgaaattttgtttttagatttatatgatacacgctttgaaaaacaaagtttagaaagacttgctgattttctgaatgaaaatttgcaaattaaaattctttgcctttataatttggattttatccctaatttagaaaaaattaaaattcccatcatcttaagtacaaatataaaagatttaaatgtaaatgggtttgaggagcttgaactcgattattttgattttgaagaatttattagtgtaagtaagaaaaatttacctataaataatttagtaggtctttttttacaaagtggacgcagtaaatttggagaaaaaaacatacttctaagacaaagctttactcttttagaattagaaattttaaagtatttagctttaaatttgggtcagcaaatcagtatttctaagatatttatagaactcaaaaaaagattaaaaacttcaaaagatagtgtttatcaggctataaaaaaattagaaaatacttatgtgatctatactttaaaacatgatgaaaaaaaacttcaaaagatttattttaaagattttggcctaagaaataatctttgtatttcaaaggatttttcacatttatttgaaaatttagttttaagcgagttatttaaatttaaagaagaatttttttataacaaatactttaacttttatagccaaatatctaaaattgcttatatttcaagtccaactttagatattgatttgattaaattacgtgctaagaaaattttaccaaaggctttagaacttggaatttttcatgtgatttttatcactctttcaagcgaggatagtttttttgagcaaggggttaaatttgaagtcatatcttttgataaattttcacttggattttaggtgttgtttgagtttgtatcgtatttttcaaggttgtatcgtttgatgatttttgtaataagattgatataatatcccttgcgttcagaataagaatctaaagttttaatagcctctagccctgttatctctttgccttcgttttcaaatttagctcgtgcatcgcgaaacttttcataagcaaaatgacgatttaaatttaaaacataagagtcaacactatcttgcagactatcaaaaatcttaattttatgttttttatctggatgtcttaaatcaggaattaaacctttctcaccccaagtccattctccaaaaagattgtttgcttctcttgcgaagcgactggtacctgtagcactttcaactaaagcttgggctatacccatggattttggaattttttgaatacgttttttatattctgcaaaatcataaagattttcaatgcgatatttgttttttatcgtgataagtttttcaagatttatttggtttgaagtcctaaagcctgttttgtaagcatctttaaaaaaggcttcgataaaagctctttcttgttcaatttttttaaagctttgatcaaacatttcattcatttttgtaaaaaaaatttgccttttttgatctatatcaagtttataatattcctctccaaatccactctttagatcatcagcagcaaaaagtgggattagaaaaagactaagaaaaattataattggcttcaaaacaatactttacctttccttcaaaaaacaattcttcatttttatatgtaaacccaacctcttcaccacttttaggagttattttaactttattttgtacttttttatttaaaaatgccagataaaaacaagcccccattcctgtgccacaagctaaggtttcatcttcaactccgcgttcatacgtacgaacttttaaatgattttcatctaaaatttttataaaattaacattggcattatatttttgtctcattttttgacaaagtattgtatcaaattcatctaaattttgacaaaaatgcactagatgtggaactccagtgtcgcaaagttgccaagtttttcctaattcttcaaaagtattttgcacgctttttattttgcctaaagatacttcaactttatcttgatttacctttgcttttattattcctgcaccggttaaaaaactcatgttaggatttattttgttaatatgatgtgcaaaatgtgccgcagcccttgagccattgccacacatagcagcccttgagccatcgttattataaaattcccattcaaagtcgtatttttcatgaggcaatatcacgataaagccatccccacctatgccctcataacgattgcaaagttctttagctaaagcacttctatcttcttttctatcagcatttgttatgacaaaatcattcccacttgcacaatatttataaaatttcacatttttcctttagaaatttcttgtattactttaacacattcttgcctaaaatcggcataagaattagtatttttaatgataaaatctgcttttttaagtttttcttcaatatctatttgagaatcaagtcttgcttttgcagcttctaagctgagcttatctctttgcatgattcttttaaggcttaattctttaggtgcgtaaattactatgactttgcctaaattttcataagcaccgctttcaaaaaaaagaggaatttctacaaaaaaagctttattttctttatctagaatttgtatttgttctaaaattttagctcgaattttaggatgggtgaaattttctaatgtttttttagcttctttgttattaaaaacaatttctccaaggatttttctatcgattttcttttcttttgtgagtaaattttttaagctaaagagagaaaaaatcttttcaagttctaaagcattttcatctaaaattttatgagcgattttatctgcgctaatgcttttaaagcctaaagaattcgctatttctataaaagtgcttttaccacaagcaattgaagcggttacaaaaaaagcatttttcatcttatgccttattaaaacttttttcgttaaaatacctttttagttcttaaaggaaaataaatgaaaatttcatatgaagatgcaggcgtaagtatagataatggaaatgcctttgtagaggctataaaacctttggttaaagaaacttttaatgataatgttgtaggcggaattggttcttttgctggtgcttttagaatgccaagtggttttaaaaagcctgtgattttaggtgcaacagatggtgttggtaccaagcttcgcttggcaattgatgctaaaaaatatgatactatagggcaagatttagtagcaatgtgtgtgaatgatttgatttgtaattttgctacgcctttgtttttcctagattattatgctacagccaagctcgaagtagaagtagcaaaggctgttgtatcaggcattgccaagggatgtaagatggcaaattgtgcattaatcggcggagaaactgctgaaatgcctggaatgtatgcaaaagatgattttgatcttgcgggttttgcagtgggtatggctgaagaagatgagatcgatagaagtaaatttgttaaaaatggtgatattttattggcacttcctagttcaggacttcattcaaatggttattctttagctagaaaagtactttttgaaagtttaaaattaaaatttgatgacaagataggggataaaaatttaattgatattttattagagcctacaaggatttatgtgcgtgattttcttacattaaagccttatatcagtgctctagctcatattacagggggtggtttagtagaaaatttaccacgcgttttacctcgtggtatgggtgcaactgtacgcaaacatcatcttaaaactcctgaaattttttatactataggacaggctgtagaagaaagcgaaatgtatagaagctttaacatgggagtgggtttagtaatggttgtagatccttctaatgtaagtaaggttttagaaaattcagatgcctttattatcggcgaaatttgcattaatgaaggtattgttttagaatgaaaataaagcgttaatacgctttatttttgtattttaagttctatttttgtagtgttttgttcttttggcaaaggattggtttgtgctagataaaaggctacaagcacatttacaagcatagcaataagtaaaagaggagtggttcgttttataatatccattggagctacttttgcaaatccagctaaaactatgattccgcctgctattggtgaagctgcacgacctaaacaagatgcaatttctataggtaaaactagagtaataggtgcaacgcctaattttgtagctatatcaggagctagttttccaaaagcattaaaagcagcaattccacttcccataatcactgtggcaaaataaactaaaaagcttaaaatagctatactcaaaagaattccaaaccatgcaaaatttcctgttccaagatttgaaaccgcgttagcaaggatattaactccaccaagtgctttaatgccttcagcaaatactccagcagcgatgattatgcttacgactgagataaaaatttcagccatagcttttaaaatcaccatcatatcttcacctaattttctagcatttctgtgtcttgcaaattcaacaagaaaaactaaagaaatgcttacaaaatttgctgttacaacatcgagcttgatagtaaaaaaatacgctgtaaataaaaatacaacaggtaaccaaggaaagagtatgtaaaaagtagggcatttaggatcaatgatttgcggaatttcaacttcatcatttaaaacacctttttctttatctcttttatcaatccaagcaaaataaaaaggaatcaagatggcaataactacaacataggcaatcacactataaatttggtaatttaaaaaaagccctacgacattatcactttgtcctaccatatctgccatattgattgaatttccatcttttggaccataatcaagcgcaattaaagaaagcacacatacagctgtaataggacggattttaagtgagattaaaacaggataaatacatgctaacaaaagcaaaagcaatccagcatagctagaaatgacgatttttaaagccattccaacaacaaaagttccacttaaaatcaagtatttatttttgatttttcctaagggtttatttgctaaaaaagcaagttttgccgaagcattgatatgtttcatataagcagcaaaacctgccacactcatgataataagtcctactccagaaagctgacttttaaaagtcgctgtgataaaagcataactatcaagtaaaacattcaaaaagcttgcatgttctctgctcggggcttttggtataggtgttcctgtgatgtaaaaagcaaaaataagcaagataatacctgaaagaaaaaatacaaaaataggattgtattttttaagtatataataagcaacaacaattaccgctaaaagtgtagaacatatcataaaaattggcatgatttctcctaaagttattattagcttttattttattttagctaaaatttaactaataaatatttttcatttaaaattttacttattttttgcattataaaattaataatatgtatagtttggttactgaaaagtttatgtttgtataaaaaatgatttttatattataattataaacaaattataaatatcaaaaaggatctagtgtggcaagaattttggcatttgatataggaataagctctattggctgggcatttagcgaaagtgatgagttaaaagattgcggagttaggatttttacaaaggctgaaaatcctaaaacaggagaatccctagccttaccaagacgccttgcaagaagtgccagaaaacgccttgctagacgcaaagcaaggctaaatcacttaaaacatttaatcgcaaatgagtttaagttaaattacgaagattatcaaagctttgatgaaagtttagctaaagcttataaaggctctttaattagcccttatgagttaagatttagagctttaaacgagcttttaaataagcaagattttgcaagagtgattttacatattgcaaaaaggcgtggctatgatgatattaaaaatagtgatgatgaagaaaaaggcaagattttaaaagctatcaagcaaaatgaagaaaaactagtaaattatcaaagtgtgggagagtatctttataaagagtattttcaaaaattcaaagaaaattccaaagaatttataaatgttagaaataaaaaagaaagttatgaacgctgcataacgcaaagttttttaaaagatgaattaaagcttatttttcaaaaacaaagagaatttggcttttctttttcaaagaaatttgaagaagaagtgcttagtgtagcattttataaaagggctttaaaagatttttctcatttagtgggaaattgtagtttttttactgatgaaaaaagagcgccaaaaaattcgcctttagcttttatgtttgtagcacttacaagaattatcaatcttttaaacaatcttaaaaatactgaaggaattttatatacaaaagatgatttaaacgctcttttaaatgaagttttaaaaaacggcactctaacttataaacaaacaaaaaagcttttgggtttaagcgatgattatgaatttaaaggagaaaaaggaacttattttattgagtttaaaaaatacaaagaatttataaaagccttagatgaacatagtttaagccaagatgatttaaatgaaatagcaaaagatattactcttataaaagatgagattaaacttaaaaaggctttagcaaaatacgatttaaacgaaaatcaaattgatagtttaagtaaattggaatttaaagaccatttaaatataagttttaaagccttaaaacttatcactcctttaatgcttgaaggtaaaaaatacgatgaagcttgtaatgagcttaatttaaaagtagcaatcaatgaagataaaaaagattttttacccgcatttaatgaaacttattacaaagatgaagtaactaatcctgtggttttaagggcgattaaagaatacagaaaggtcttaaatgctttacttaaaaaatacggcaaagtgcataaaataaacattgaattagcaagagaagtaggtaaaaatcacagccaaagagctaaaatagaaaaagagcaaaatgaaaactacaaggctaaaaaagacgccgagcttgagtgtgaaaaactaggcttaaaaataaatagtaaaaatattttaaaattaagattatttaaagaacaaaaagaattttgtgcttatagtggagaaaagattaaacttagcgatttgcaagatgaaaaaatgcttgaaattgaccatatttacccttattctagaagttttgatgattcttgtatgaataaggttttagtttttaccaagcaaaatcaagaaaagcttaataaaaccccctttgaagcctttggcaatgatagtacaaaatggcagaaaattgaagttttggcaaaaaatttacctgaaaaaaagcaaaaaagaattttagataaaaactataaagacaaagagcaaaaagactttaaagatagaaatctaaacgatactcgctacatcgcaaggcttgttttaaactatactaaagattatttagattttttacctttaagcgatgatgaaaatacaaagttaaacgacacacaaaaaggctcaaaagtgcatctagaagcaaaaagcggtatgctaacatcggctttaagacacacttggggctttagcactaaggatagaaataatcatcttcatcacgctattgatgcagtaattattgcttatgcaaacaactctatcataaaggctttttctgattttaaaaaagagcaagaaagcaacagtgcagaactttatgcaaaaaaaattagtgaattagattataaaaacaaaaggaagttttttgagccttttagtggttttaggcaaaaggttttagataaaattgatgaaatttttgtctcaaaacctgagagaaaaaagccaagcggagccttacatacggcggaaaagaaggagttttaaaagccctagagcttggtaaaatccgcaaagtaaatggtaaaattgttaaaaatggcgatatgtttagagtggatatttttaaacacaaaaagacaaataaattttatgctgtgccaatttatactatagattttgctttaaaagtattaccaaataaagctgtagcacgaagtaaaaaaggtgagataaaagactggattttaatggatgaaaattatgagttttgcttttctttatacaaagatagtttgattttaattcaaactaaagatatgcaagagccagaacttgtttattttaatgcttttacaagctctactgttagtttgattgtttcaaaacacgataataaatttgaaacgctaagcaaaaatcaaaaaatattgtttaaaaatgcaaatgaaaaagaagtaatcgcaaaaagcataggaattcaaaatctaaaagtatttgaaaaatacatagtttcagcacttggagaagtgacaaaggctgagtttagacaaagagaagattttaaaaaatgagttacgatgaagcttttaaaacactgcttattagctctaatgccaagctaaatttagagctaaatcatcttgtgattaagcaagatgaaaatatagccaaattgtttttaaaggatataaacatcatcgttttagaaagcttacaagtaagccttagttccgcactttttaacgcttttgcaaggcataaaattatcttattaacctgcgatgaaactcatagtataaatggtgtttttactccttttttagggcattttcaaagtgcaaaaatcgcaaaagagcaaatgaatgtaagtgctcaaaaaaaggctattttatggcaaaaaatcattaaaaacaaaatcctaaatcaagcctttgttttgaaaaaacacaataaaatagagcaaagcaatgagcttataaatttggctaaaaaagtaagcttaaatgatagtaaaaatatcgaagctgttgcagcggcgctttattttaaaactttgtttggcgtttctttttcaagagatgagctttgctttgaaaattctgctttaaattatggctatgcaatcattagggcttgtattattagagcagtttgtataagtgggcttttgccttggcttggcataaagcacgataatatttataattcttttgcactttgtgatgatttgatagaagtgtttagggctagtgttgatgattgtgttttaaagcttaagggtgaaagtgagtttttaagcaaagatgacaaaagagtgttgattggcaatttacaaagcaaaatcaattttgatgggcaaaattatcctttaaacagagcgataaatcattatgtggcaaattttaaaaatgctttattgtatgaagatgagctaaagatagtgaaatttgatgattgaagataaatttatgcgcgtgcttttgatgtttgatgtacctactaaaagtaaaaaagagcaaaaactagcaagtaaatttagaaacaatcttataaaattaggttattttatgctgcaatttagcgtttatatgcgtatttgcaagggtttaagttctgcaaaaagttctattgaaaatgtaaaaaagattttgccaccttatggaaatgtaagggctttaatcatcactgaaaagcaatttgataaaatggagcttttgcttggtggcatagtttttaatgaaaaagttaataacgaaaccaatttaacgctttttgatatagatagtcatggagaatttaaatacaaaaattcaaataatgaagaaatacaactaaacaaaaaacaagaaaaatatcatcagcaaaatttatttgaattttaaaagcggttttaggggattgtaaccccgcagagtcccgcaaactctttattttagtccctttttaaatttcttatgagattatagcataatttttgctatttttcatcaaaaaacccctaaattttcattatctggtaaatatctattttaccataaagaaatttaaaaagggactaaaactgccatttttctagatataaaatctgcaatattttaccataaagaaatttaaaaagggactaaaaccctaacatgctagcattagtatctcgtgcgattttaccataaagaaatttaaaaagggactaaaacaaatctactccattgatatttaaagattttattttaccataaagaaatttaaaaagggactaaaaccctagtggattgaaactctgctagggctaattactccactaaaaggagattgcaaatttgaaacttattgaaatttagggttgattaaaatcgaaataaaattatttaaataattttaaggcataaagataatatccactaaactttcattttctaacatttcacattcttttggtaccaccataagggcagctttattgttaagattgtttataatcgcactagagccttctttcttaccttcaagattggctaaaatgcgtccatttttaaactctatattgcaagcaacaaattccaaataaggtgtttttttcttgtaacttccttgtaaaaaggctttgcaaatatagtctttaggttgaagtaaccaagagtttaaaatctctcttgcgtaaagattaaacattaccatagccgagtaaggaaaacctggtaaggcgatgatgaatttttcattagccttagctattttgatatgtctgcctggttttatgtcggctttatcgatgatgatttcatattctttgacggctttttttaaaaagtcaaaatctcccatagaaactccgcccgtcgtaaccaaaatatcgcaactttgcaaagcactttcaagggtagaaaaagtggctttttcatcatcttttaaaagaggaaaaacccttgtatcgcaatttaaatttttagctaaattagctatggcgatatgatttgaagagcggatttgagcgggattttctaaggcttctcctagatctttgatctcgcttccactacttaaaacccctacaataggctttataaacacactaatgtgaaaaaatccaagttcagccaaaagagctatctcactataatttaaccttgtgccttttttgagtaaaatttcatcttttttatagttttctcctaccgcacgcacggcaaaagcttggggaacttttttttctataaaaagagtatcattttctacgcgtacattttcaacagggactaaagtatcacttccttcgctcatgagtgaacctgtaaaggtttttacacaagtgccattttgcacgctaaattgtggcatagtacccgcaggtgtgagacctaaaatttttaaaggcttgtcttgatcttcaaatttgatcgcataaccatccatagccgaggttggaaattcaggctgatttttaggggcttttatatcttgagctaaaatgcgtcctaaacactctgtaagggctattttttcaatcttttcataggttttgatatgagagtgtaaaatttttaaactttctttataagacattagcatctttattccttcatactgatataaatttgagtcttgtttgttgtataaaattcaaaatctgtgtcaaattttctttggagacttgaatttttaaaaaattcattgatattttgccaaagttttggggcaatgatttcaggttttccagagtcttcaaaaagcatgtatttgccaccttttatacaaattttttcgcctttttcgtgaggatttttcatacccacacaaattttatactctaacttgtgagtgtttttataatcataatacacgctataaatttcatcaggtgtaccaaagatgctatgaaattttttccacaaaggaaaaatcaaagaactatttaaatcgctctcaagttcctcatcagttttaacgcttactccataaatgctaaattcttctatttcttgtatcattttaaaagtcctgcaccgcaaagtttggttgatctttctttggcataaattctttctttgtttatcacatcatacttccaaatgggcgcacttgctttaaaatcttcaacaaattcattaagaagtttaagtcctaattttctttgtttgcttaaaattcctgcaaaatacgagctttcatgtatcgctacatcgcctatagagtgagcaaaaagcaagctaataccatcaaaatctactcttttttgccactcatcaaaccatttttttaaaagcggttcataaatatcaaaactaagtgcctcaatacctccttcttcacgcacaataccacaaaaagtcagtaaagcaccgcagtttttatccttggaaaattcataccattggctataaattttaggaatatctaaagagccttgataaagtgtaaaatgtttcatttaacccccacaaactggcggtaaaagtgctattttatcaccatcttttaacttggtgttttcatcaaaaatgatttcatcatttaaagatacagcacaaagttctagccattcttttaaactctcatctttttgcaaaatttcttttaattcttttaaattttttacttcaagttctaaattttctttatttatagggcctaaaaattccacttttaccattttattcctttacttctaaatttcccatcattcctaaatcttcatgttctaaaatatggcaatgatacattctaagtcctttaaaatcttgtttcattctaagtcttaattcttcattaggacgcacatttatagtatctcttaaggctctaaattcggctttttgaacttttccattgagttttgatgagatgagttcaaattgcgtgccgtgtatgtggaaaggatgatccatgtgagatttatttatcactatccagtcttcaactactccaagtttggagcttaaatcaatgcgttttaaatcatagcttttgccattgattaaaaacatagacgcaagagcgatttttaattcgctttcactttttcccatcataccatgcatttgcatatgatcttcactcatgattatttctttaaattccttaggttcttctgaaggtttgaaaatttttaatttttttggaagttctacattttctttttttaggttaatattggctagaaatagggtattaggttcttcttttaccatcattttatccctatcataataagcactttctagcttaaaattcccatcttttggagcatcgattaaaacttctacacgagaagcaggacttaagaaaagttcttctttataaatagctttttctataagtccaccatcagtaccaacaagtataaacttagctccttgtatgcgtaaatttaaatatcttgctgcagtagtattataaatgcgtatgcgttcgtttgtggcgagtttgattttaggtttaaattgtccattgatgagtacaaattctccttctctaccatttagccaatcatttaggttattgtttggaatttgagcgttttcatcaagacgcaaatcgctaatcatcaaatctttttcttttaaatgacttaaagcatctttttttgctttgatcacaaaagcccctgctaaacccataaaaacttgtttagaagccgtataatgaggatgtggatgataccagtaagttcctgcgctatcttgaggaatttcaaaacgatatattctttcttctcctgctaagataggatcatgtgggcttccatcttgatcaggtggcacaggaacgccatgccaatgtatagttgtagcttctttgagtttgtttttgactaaaatttcaagtttatctccttcaaaaacttgtatttttggagcaggcacgaggccattgtaagtataaaataaggtttttttacctttgataagctctatatgattttctttgatttctagggtagcacgaaaaatatttttttctttactttcatttttgagtaaaggcaaggcttttaaaatttctccttgggggaattgttttggatctaaaagctttaaattttttggagcaaagtttataaaagaagtatctaagtcatgatttatagaatgatttttatgcatggagtgcatatcgtgcataggatttgcataggctacacccatacttgctagagtaagtgcattaaattttaaaaaatttcttctattcattagtttttccttttgcttgattttttgtattatagtcattatttttttagttttagtaaatatttattttgaaaatttggtttaattttgttatgattttagcaatttaatcaaggaaaaataatgttttatgaaaaaattcaaaccccagcttatattttagaagaagataaattaagaaaaaattgtgagcttttagcaagtgttggcgaaaaaagtggtgctaaagtgcttttagctttaaaaggttttgctttttcaggagcgatgaaaattgttggagaatacttaaaaggttgtacttgtagcggactttgggaagcaaaatttgctaaagaatacatggataaagaaattcatacttattcgcctgcttttaaagaagatgaaatcgatgaaatagccagcttatctcatcatatagtgtttaactctttagctcaatttcataaatttcaagctaaaacacaaaaaaattccttaggtcttcgttgtaatgttgaattttctctagccccaaaagaactttacaatccttgtggaagatactcaagacttggaattcgtgctaaagattttgaaaatgtggatttaaatgctatagaaggacttcattttcacgcactttgtgaagaaagtgctgatgctttagaagctgttttaaaggcttttgaagagaaatttggcaaatggatagggcaaatgaaatgggtgaattttggaggagggcatcacatcaccaaaaaaggctatgatgttgaaaaacttattgctttgtgtaaaaatttcagtgataaatatagcgtgcaagtttatcttgaaccaggtgaagcggtaggttggcaaacaggaaatttagtggctagtgtagtagatatcatagaaaatgaaaagcaaattgctattttagacacttcaagcgaagcgcatatgccagatactatcatcatgccttatacaagtgaagttttaaatgctagaattttagccacaagagaaaatgaaaaaatttcagacttaaaagaaaacgaatttgcctatttgcttactggaaatacttgtttagcaggtgatgtaatgggagaatacgcctttgataaaaagcttaaaatcggcgataaaattgtttttttagatcaaattcattacaccattgtgaaaaacacaacttttaatggtataagacttccaaatctcatgcttttaaatgcaaaaaatgaacttcaaatgataagagaattttcttataaggattattctttaagaaattagtattatttataatttgcataaaatgttaattttactcggaagagaatcaaagatgtaaattttatgcaaagtattttatttttttcaaatataaaatcaactcaaatatctaattttcaatactttggtatgattttttaatattttaaatccttgtggaattttattgaaattcagtgatttttaaatcaaatagtattaagataaatcgatttaaaaatcggctttaaaatgaatattaggtatattttgcataatattcattcaagcaaaatttaaagctatttttgaaaattttgaatgcatgggagctttaatggatttggaaaaattaagattagctagaagtctttattatcaatgtctaggagagctttttgttttttcattttctgaagaaagattgtcaaaattacaagagtatttaaagacaatgcaagaatgtttatttgatgaaaatttaaaatcaaattttgatatcttgcttaagcatttagatgatgaaaattctatacaagcattttttaaagaatatgatttgctttttttaagtcttaaaaatagcattccaacgactttttcttacatagaagaaggttttgaaaattcaaatcctttactttgcgtgcgtcaaattttagtcaaaagtaaaataagacgcaatgaaaaattttttaaagaaagtgaagatagtgttggattttgtttattgttgatgagtgaatttttaaggcaaaatgaagataatttagccaaagagctttttgaaaaagtgatcaataaaagcattgatgagtttttaggcgatgttttcatgaataaaaatgcgaatttatataaggaaattgcaagtattgcatcggcttttatggaatttgaaagactttgctttgaagtggaaaaacctgcaaaaataaattctaaaaaagtgcaaaacgatctatcgcgttcagaatttttaagaagagaagcaaataaacaaaggaggactcgtgaaaaatcgcagggaatttcttaaaaaatccgcttttgccttaggggctgctggagtgcttggtagcacaactttagctctagctaaagatgaagaaagaaaagatttggttaaaggtaaaagtaagaaaaaagaagtgctttttcaaagaagtgctaattgggaaaattattatataaaggctgagtaatgtcaagtgtaggtgaaaatatcaagcttacgcgtcgttcttttcttaaaatggcagcactttcaagcctagcaacaccgttgcttgctagaagtgaaactttaagagaagcgagtgctgatgagcttaaagaagcttatgaaggtagtaaaaaagtaaaaacagtttgtacagcctgttctgtaggctgtgggattattgcagaagtgcaaaatggtgtttgggtgcgtcaagaaatcgctcaagatcatcctgtgagttcaggtggacattgctgcaagggatctgatatgatcgatatggtgcgttcacatgtgcgtttaaaatatcctatgaaaaaagaaaatggagaatggaaacgcataagttatgagcaagctttaagtgagatcggagaaaaactagctgcttatcgtaaagaaaatcctgaaagtgttatgtttttaggttctgcaaaacttaataatgaacaagcttattatataagaaaatttgcagcattttttggaacgaacaatgtagatcatcaagctagaatttgacacagcgcaacagtcgccggtgtggcgaatacatttggttatggcgctatgacaaaccatcttggagacatccaaagaagtaaatgtatcattatcattggagcaaatccagcggtaaatcaccctgtgggttttagacatttcttaaaagcaaaagaaaaaggtgcaaagcttatcgttgtagatcctagatttacaaaaagtgcagcaaaagcggatatttatgcaagaattcgtccaggaactgacattgctttcatgtatggaatgttaaaaatcatttttgatgaaggcttggaagatacaaaatatcttgatgaaagagtttttggaattgataaaattcgcgaagaagcagcaaaatggacagctgaagaagtagaaaatgttacgggaatttctaaagaacttttggtgcaaatcactcacgaagtagctaaaaacaaaccaactacgcttatttgggctatgggtttaactcaacatactgtaggaacttcaaatacacgtttagcacctattgtgcaaatggtacttggaaatataggtaaatttggtggcggagttaatatcttacgcggacacgataatgttcaaggtgcttcggatatggcttgtttgagtgaaaatttacctggttattatcctttaaatgaagcgacttggagatactatgccaaaatttggggtgtggattatgaatggcttttaggaaattttgtaagtaaagattggatgcataaaaccggactttcacttgctagatggtgggcagcagctttaaatggaaaagatggaaatgatgctatcgataatgcaggaacgcctttaaaagctttagtagttatgggaaatggtatcacttcaactgcacaacaagtaaaagttaaagaaggtttggaagctttagagcttttagttttggctgatccttttgtaaatgaagcaggcattatcgcagaaagaaaagatgggatttatcttttacctgcagcaacacagtttgaaacaagcggaagtgtaacagcaacaaatcgtagcggacaatggagatttaaagttgtagatccactttatgaaagcatggaagatcaagaaattttatttgagcttgctaaaaaattaggcttttatgaagactttactaagactttacgcgatgaaaaaggtgagattgtttggcctgaaaatgcaacaagagaaattgcaaaagcagtcagaagtatagggcttaatggttggagtcctgaaaggcttaaaaagcatactttatactgggataaatttgatgaggtaactttagaaggaaaagacgaagttgcgggcgagtattacgggcttccttggccttgttggagtgataagcacccaggttctcctgta

SEQ ID NO: 3797 - DNA, 22720 bp, synthetic construct
  source 1..22720: mol_type = other DNA
  misc_feature 1..22720: note = Synthetic
ggtatcgcaagtggctggattgtgtatctaggcattatttacctaggattagtccattggctcaatacctccataatgcagttttgcctaagctttattggtggaagctatttgctctatctaggctttataatacttagctccacccctcaaacttatgctttagaatctgcagattctatccgcaaagatggcttttggcagggcttaatccttaatctctccaacccaaaggcgattttatttttcatatttttagttacgccatttatcaatgaagacataaaaataggtctaatcgctctatggtgctcgcttttagtgcttttgtgtgcgttatcatctgcgggagtgtggctcgagcatatatcaatgcacgtatgtttatgataatagatagaatctgtgggatttgctttgtatgctttgcgtggcttttattctttgaatgtggggagctgggtgtgaggctttttgtccattaatcactattaactcctacaaaagcaatgcaaatcacttagctcaatttgctatttacttttgtgaaagcatttcaatacagaattgtgtttgctaactaaataaaatccatagtttaagcttttgcgttaagatagcaaacttaaaacaaaaggataggatatgggctataaacgcgtgttagtaaagttttcaggcgaggcattatcgggtaatagcgggtttggcattgatgtgaaaatattagaatatatcgcaggtgagattaaaacgcttgtagataatggcgtggaagtaggtattgtcatcggcggaggtaatatcatacgtggtgtatccgccgcacaaggaggcattatccgccgcacaagcggagattatatgggtatgcttgccacggtgattaatgcagtggctatgcaggaggctttagaatatttaggcgtagatgtgcgggtgcaaagtgccatagaaatcaaagaagtgtgtgaaagctatatttatcgccgtgctataagacatttagagaagggacgtgtagtggtgtttggctctggcacggggaatccattctttactaccgatagtgcagcgactttacgtgcggtggaaatcggggcagatgtgattatcaaggcgacaaaggttgatggtgtttatgataaagatccacataaatttagcgatgcaaaaatgcttgaaagtattagctatgatgaggcattgcgcgatcatattaaggtgatggacgatactgctattgcattggctaaggataataaattgccgattttggtatgcaatatgtttaaaaaaggtaatttacttgatttagtgaagtttgataaaggcatttgctccgttgtcaaatagtctaaagcaaaatcaaataaaaaacacgatagaatctacaatatttaatatatttctcaaaaaagtaaaggatagctatggatacattacggacagaagaaattgctgcaaaagctcttaaaagggtgcaagatgatagatacatacttgcaagccttatttttgagcgtgtgaaagaactaggaaatggtgcaaaacctttggtagatatggatattaaactccataaattacctgatattgctatgcgcgaaattgctgaaggcaagatagagcttagttctattgaggatagaaactagggagaacttttggatttttttgcccaaatagctcaaattaacgatatagaatctgctatcgctagacttcaatcacttacaaatattacgcctaaagtgcaaaaagccattgatatggcaatacaagcacatcaaggacagcttcgtataagtggaataccctatgtgatacacccattgtgcgtggcgtgtattgtggcattctatggtggtgatgaaacaatgctttgtgcagcattattacacgatgtagtagaggatacattatgctcgcttgaagacataagggcagaatttgattgggacgtgggacatttggtcgatgcactaaccaaaatcgtagagattcgcaatgaggagctaagccataatcctaatgataagcttactgcctctgccctaagcttccgtaaaatgctgcttgcctccataaaagatattcgcgctcttgtgattaagattagcgatagaatgcataatatgctcacccttgatgccctccctccacataagcaaaaacgtatcgcagaagaaacacttatggtatatgccccaatcgctcatagattaggaatctcttcgcttaaaaatgagctagaagatagaagttttttttatatcttccctaaagattaccaaaaaatcgattcatatattagagaaaataatcaatctattacgctaaaactcaatgaatttactcaaaaaattacaacaattttattgcaaaatggctttacacaaaaggattttagcattgaaagtcgcgtgaaacgttattactctatttttcttaaaatgcagcgtaagggtgtgagtatcgatgagattcttgatttgctcgctattagaatcatcatgcctacaaacttagaatgttataaagtattagggcttttacatttgcagctaaagcctgtgatctcacgtcttaaggattatatcgctattcctaaagaaaatggctatcaaacaatccatacgacgatttttgagggagcaagtatctatgaagtgcagattcgcacttttgatatgcataaatctgcacaatatggtgtagcagcgcattggaaatacaaaagcggaggtattgagccaaatttagaatggctcaataatttgcaataccaaaatgacaccattgaggagttttatgaactcgcaaagaatgatttatataaagaagatatggtggtattttctcctgcgggagatatttataatctccccgtgcgtgcagtggcacttgattttgcttatgcggtgcatagtgatataggcgataatgccaaagaagcctttatcaatcatcaaaaagcctccttactccagccccttaaaaatggtgatattgtgcgtattgtggtatctcaagatggagaaaagcttagcccacgctgcacgtggattgatgcggtgaagacttctaaagcaaaaaaccatatacggattcaatgccagacaaagcttaaagaaattgataaaaaagtagcacttcatatcttacaaaccatttttgatagttcattgcagactatcaaaacctatcttaaagagaataaattagattctcatatccatagagccgcctcggatttggtatttctaaaagaagtaaaaaatagcattagggaaaacttcgcacgtgaggcaaattttttaggaaaaattaaaatcaatatgctaaagctaaagcctcttgtatttgataatatcattgtgcagactaatcgcaatatcaatgaagtgatttttgactactgctgccaccccaaatatggcgataatattttagcgattaaaacagcccaaaaagcatatatccatcataaaatgtgcgaaagggcattaaatgagatagaacaaggaagtgaaatgctctttgtgcaatgggcaaatgagcaaaaaacaacgtataaagtaattgttgcactagaaaatcaacgaggtgttttggctcaactatgtggtatcttggctaaatatgattgcaatatcgtaagcgtggattatgatgtgcttaatcgtcaattttctacctattgtgagatctgttttgagagcaagacaaatgatgtaaaggaattaaaagatttactttacaaaagatacaagattatcgcattgagtaatctcaaagacgcgtattcaagctagaaaggaaagcaatgaaaacacaaatacaagaagctctgcaagagatttcacgaggttgtgtggaatttataggggaggagtatatcgctagtttggtggagcgattctataccacagggcagcgcttttgtgtcaaagctggatttgaccctactgcgccggatttgcatttaggacacactgtgcttttgcaaaaacttgcgatatttcaacgttatggaggcgatgtgaagtttcttatcggggattttaccgcgactattggcgatcctactggaaagagcgagacaagaaagcctcttagcaaggagcaagtagcagcaaatgccctcacatataaggagcaggtttttaaggtgcttaatcctacgcatacagagatttgttttaactctcaatggcttaatgagctaggtgcagcaggaatgattacccttacttcaaaattttccgttgcacgtatgcttgagcgagatgattttaccaagcgctacaacaatcaacaacccatttctatggtggaatttatgtatccgcttttacaaggctatgattctgtggcgttaaattgtgatattgagctaggaggcaatgaccaaaagtttaatctcttggtagggcggcatttgcaaagggcatatggtttagacaaagagcaatctgtaatgactatgccattattagagggacttgatggcgtgcagaaaatgagtaaatcactgaataattatattggcgttactgaatctgcaaatacaatgtatgcgaagattctaagcataagtgatgagatgatgtggcgatattatgaactcctctcctcactctcactgccccaaattgcagagactaaagagcgagtaagtgcaggagaagcacatcctaaagcagtaaaagaacagctcgctttagagataactacacgttatcataacattgatttagcaaaacaagctaaaatagaatttgacaatgtctttagtaaaaatgaaattcccgctgatatagcgacatttaaatgtaatagtggtgagtggatagccaaagtgcttgtgatggctaaactttgtgaatctacctcgcaagctcgtagagatatacgtgcaggagcattgaaaatcaatcagcaaaaggtaaatgatgagaatcttactttattagcgggggaatacattatccaaattggcaaaagacgttttgcaaaagtgattattcataaggggatataatgggattaaaaccgctcaaaatagcaaaacacacgattaaatacccgatttttcaagggggtatgggtgtaggtatcagctgggatagacttgctggaaatgtctccaaagagggtgcattaggcattatcagtgcagttggcacaggatattatcaaaaaatgcaatttgtcgaaaaaattaccaattctaagccttttgaggcgattaatttttattcaaaacaagctttaaatgagatttttaaaaatgcacgtaaaatctgtggtgataagcccttaggagcaaatatactctatgcgattaatgaatatgggcgagttgtgcgagatgcgtgtgaagcgggggcgaatatcattgtaacaggtgcgggattgcccaccaatatgcctgaatttaccaaaaacttccccgatgtagcccttgtgcctatcgtctcttcagcaaaggcattaaggattatttgtaaacgttggatggatagatatgcaagaatccccgatgcggtagtagtagaaggacctttgagtggcggacatcaaggctttagctatgaggattgctttaaagaagaatatcagcttgaaaatgtcctaccgcaagtggttgatgaagcgcaaaaatggggaagtatccctgttatagccgctggaggcatttgggatagaaacgatattaatagaatgatggctttgggtgcaagcggagtgcagatggggactcgttggcttggttcccaagaatgcgatgccatagcgtatagagatttaatgccttctgtcaaaaaagaagatattgagcttgtaaaatcacctgtgggctatcctgctcgcgctgtgaaaacagggatttttgaagcaatggcacagggtgatgcaccaaagattcgctgcattagcaactgcgtgtcgccttgtcatcggggtgtagaggcaaagaaagtgggttattgtatagcggattccttagggcgtggatatatgggagatagaaattatggcttgtattttacaggggcaaatggatatagaatccaaaagattcagcctgtgagggaaattattgctgaattggtccaagattagaggcgtgtatgtggaggattgcggtaagtttatgccttataatgatatgtttatggggtgagcatcgcattgtgagaatggttccctttggtgatgggagtcttaagattgtttttactcaagacattagcgatttaacttggcaagttaaaaaactacaagataataagagttttatagactttgaagccaatctcactatcccgcgccgtaattttattttcaaagataattccactttgcaagtagctcaaaataccccacaaatcgtgcgtatagtgattactacacaaccaaaatcaacttatgagattgtaaaggaaaaagagaatctctatgtgtttattaaaccaaaaacagacactaaagaagcacaacaaactaatctaaaacagtccaaagacactccgcaaaagcagccaatagcaaagcccaatgaaaagaactcatccataaaaccaactcctcaaaagcccaaaaaagagcaaatagctcaagatactgcacaatccaagcagaatacccctgccccatcaaaggttggcaatggtaaaaagatagttgttgatgcagggcatggtggtaaggattgtggcacaaaaagcgtagaaaatgtgtgcgagaaaattatcgtgctaagtgtggcaaagattctcaaagatgagctaaaaaatcgtggctatacagtatatatgacacgcgatagtgatgtctatattgacctacgtaagcgcacagagtttgccaatgccaaaaatgcagacttgtttatatccatacacgcaaattctatccccaaagattcagctaaaacaccaagcggagtggaaacatacttcctttctcctgcgcgaagtgagcgagctgaacaagtagccaaagcagaaaaccaaggtgatatagagacgatgagccactttgcaacgcgatcatttttgaataccattagtgcttatcatattgtcgcttcacataaacttgctattgagattcaatctggcattcttaatgaggtaaggagacagcataatacgcacgatggagccgtgagagagggaccattttgggtattagctggtgcgcttatgccttctgttttaatcgaaattggctatgcatcacataagcttgagggaaaactgattgccaaaaaggaatatcaaaagcttgtcgccataggtatggctgatggtatagatggatattttttaaggaatcattaatactttaaggataaagaatgaatcaacccacacgtattagcgtaatcttctcgcttgcttttttctcgctttttgtttttaccaatcttacattatttatttcacaattttcacattctttttcgcatttatttttaatctttatccgcgataatcagctttatgaccatttgagtatctttttatttttatgtggatttgtgctaagtggggcatttgtgattctaagtagttggtatcatacaagcaatatcttgcagcatatatttatactgattttaagtgttgtgtttatgtatcttttcattttgcaaagcgtatatgtgcctaaaacggaagatattatggatatgtttgcgattgagagaagcatctatcatcgtaatttttttgagcttgtgagcgattatttgccacgtattttgcttattgcttgtatatatatattttttgtatatatcccgttattgtttgaaattttcactatgcgccctagtcacaatagccagcttggtaaaatactttatggtatgcgcccatcgattaatgttatcattgtaatgctttttggcttatcgctgcagccctattattttagagataatatttatgtgtattgcgatattgtcgcttttttaggaggcgtaggactacttatatgggtaatgctaaaacataaagaactctttggattctatgaatatatgaattctgccctgcttattctcggcatactcatttgcttcatttgcacctctgtgctatctatgtcggataattattttaatgcacgttatacatttttggtcttagcatttgtagggtggtgcgctgaatggatgtataatgatattgttaagcccataaaggagtaggttatggcacttgatatttatcctgcgattgatttaaaagatggaaaagcagtgaggctttttaagggcaatatgcagagtgctacgatttatggtgaagcattggattttgctaaaaagtttgctgatatgggtgcgaaatatttgcatatcgtggatttagatggggcatttgcaggtaagccacaaaatctaagagtgatagagaatatcgtgcaaaacacagcacttaaggtgcagcttggaggggggattcgcaatgaggaaacgattaggctttacacacaaatgggggtgtcaaggctcatacttggctccatagcactaacacattgggaatttgtcaaagaaatggcacagggttatcccatagctgtgggtattgacgcacgtaatggcaaagtagcagcacagggctgggcagaagagagtgctatggattcaaaggatttagcacaacaattcgcaggtagtccggtgcaggctattatctgcacggatattaatcgcgatggggcattaagcgggattaatatatcttttacccaagacgttgcctgtcatagtggcatttatactattgcaagtggaggatttgcaaatgttgatgaactagagattcttaataagaatccacatatcagcggtgttatcataggaaaagcattttatgagggaaaaattgaccttaaaagagccttaagtatctatgctaaatagaaaagcactaaatgcctttattacccacagcctctaaaagtagggtagggcgtaagtacttaagccaagatacccacttatgccttagcgctagtctatacttagactcatcgcatcaatttgttccttataaaaatagataaactctacccattcctttattattgtgcgatttatttttttatgcaagtgagaattacctcacttgtggggagactagagattctctaccttaaaaactaacttgatgaataagacaacgtcttagtcataagtgcgtccttttgtcctcaagggctatcgccctttgcgagattaaatcccttcgggattgaatggtgcgaagcagattttatatctgcaaagcaagaccctttgcaagtgtggattagcacttcgtgcgaatacggcgattacatcgcaacagcaagggcataggagagactagaaaatccgcaaaacaactcttatgttataatcaaagaaaatcatacaaggacataataatgttttatattattgcattttgcataggagtagccctagcaatacaggcaccgattaatgcggctttgagcaaatcactttcaaatgcttctttagttgctgctcttatttcttttagcatagggacattgtgtttatgtcttttagcatacgcttatggtatgctcaatacccatacgctaaaggcaactttacatcaagaatggtggaaatatttaggtggatttttaggggcgtttgctgtatttggcacaatacttttatccccgaaaattggacttgctaatatgtttttactcatcatcttgggacagattctcacaagctcggtgcttgatcatttaggtgcgtttggcttgcctatcaaaagcctttcattgcataagattataggcttgcttatcatcgtcgcaggactttttgtatttttttacaaggatatattcaaaattcatacataacttgcttttctgtttcataatctcataaaataatatacaataatgagattgtatattagaatcttggctaaaaggaacattaatgaaggtcttaggatttgatatagggattacaagcattggttgggcgtatgtagagggtaatgagttgcaagattgcggagtgagaatcttcacccaagcagaaaatccaaaaacaggagcacctttagcattgccaagacgggaggcacgaagcacaagacggagattagcacgtagaaaaggcagactttatgccttaaaacagctgatatgcaaggaatttggcttgaatgtggatgattatttaagcgatgatggagatttaccaaaggcttatatcaataccaaagacaccaaaagcccttatgaattgcgcactttagccctcacacaaagactagaacacaaagatttggctagagtgatattgcatatcgctaaacaccgcggctatgggaacaaacacgcaagggaaatggataatgctaagcaaagtgaaaatggcaagattaaggctgccattgaagcaaacaaacgtattttggacgaaaaaggctacaaaagtgtgggtgaatatctctataaaacattttatcagcaagaacgaagtgatagtgagaaaaaaggtagcacaaatagtaaagaatttcaaaatgtgcgtaatagaggcgaaggttattatcaacgttgtgtggcacaaagtgagctcaaagcagaactagaactgattttgcatacacaaaatacattgggtgtgagactagctgagaatttttgccaaaaaattatagatattgccttttatcagcgtgagttaaaggattttagcgataaggtaggtaaatgtgtgttttatgaggaggaaaatcgtgcagctaaaaatactctaagtgcgatggagtttatcgtccttacacgcattattaacaccttgcaatctatcagtaagcaaagtggtgaagtctatggtaaagatatgattacacaaattttacacatcgtgcttgaaaaaggagagataaactataaggcattgcgtgagatattgcaattgcctgaatctatgcgatttcctaaagattctaaacttgattatactaaagagttaagcgtggcagaaaaggcggcatttattgagtttaagaattttaaagcattcaaaaaggctttgagtgggagctttgatgggcttttacgtatggatttagatgagatagctacatatatcacgctcattaaggataagatcaagctaaaaagcgccctagagcgatatgctctcgctgatacacaaaaagaatctttaagcacactaagctttgcagggcatattaaccttagcctcaaggcattagagcagattctgccttttatgcgggaggggttaaaatacgatgaggctgtgcgacaagcgggactaaaagaatggagaaagagggcgcaaaaagataatctattatcaccgctcaatgaatatgaaccttatttggcaaatcccgttgtggcaagggcgatgagtgagtatcgcaaggtgctaaatagcttacttaagaaatatgggcagatgcataagattcatattgaatttacacgtgaggtaggcaggagttttaaagagcgaaacaatattataaaggagcaaagggaacaatttgctaaaaatgagaaggcaaaaaagcaatgtgagattctagggctgccccttagtgcgataaatattcttaaagtgaagctatggctagagcagggggagttttgcgtgtatagtggggagaaaattactagagcgcatttacttaactctcaaatactgcaaattgaccatatttacccttattcgcgtagttttgatgatagctatttgaataaggtgctttgctttacgaaggaaaatcaaaataagcacaacaagacgccttttgaagcctttgggggagatacaaagaaatgggagcaaatcaaaagctactcgctgaagctccccaagccaaagcagcgcagaatctgcaatgaacattttgtagaaaaagagagtggctttatccctaggaatctcaatgacacaagctatattgcaaggctttgtgcgaattggacgaaggattgcttagaatttttgcctttaagtgaaagtgaagtaaccatctccggagaaaagggcagcaaagtgcatatagaggtagtaagtgggaatctcacggcgatgctaaggcattattggggattgggggaaaaagatagggataatcacctccaccacgcatttgatgcgattattattgcctttagtaatgcaaaaatgattaaagcttttagcgattttaaaaagcagcgagagctgaatagagcgagattctacgccaaagaaatggcagaggctgactacaaaaagcaaaaagtattttttgagcctatggcgtattttagggaaagggtattggcaaaggtggattctatctttgtttctaagcctccgcgaaaacgtgctagaagggcattgcacgaggagacattttattcttttggtgataaggctttaatgaaacaatatggcggacaaaagggtatagaaaaggcaatagcactgggcaaaatccgccgcattggcacaaaaatcgttaaaaatggcaatatggtgcgtgtagatattttcaaacataagcaaaatggcaagttctatggtgtgcctatctatacaatggactttgcattaggaatcttgcctaataaagcggtagtaagcgggaaagacaaggaggaagtcattaaagattggctagagatggataattcctacgaattttgctttagcctctttaaagatgatttaatcttagtgcagaaaaaggatatggaaaaggcagaattatgctactttgtaagctttgattctgctttagcacagattcaagttgaaaagcataataataaacttgagggcttaagcgacaatgaaaagctgctttataccaatgcgacaaaggaaaaagtcgtgggaaaaagcatagggattcaaaaccttaaaatttttgaaaaatatcaagtatcctctttgggtgaagtgcaaaaggcagattttactccgcgccaaaatatcgcgcttaaattaagtccaaaatataagaaaaggggctagaatgtttgattctgcctttaggacacttttcttaagcactcctgcaaggcttagcctctatcaaaaacacctttgtatcgcacaggagggtaaagatgaggtcaaaatccctcttaatgatattttgtgccttattttagaatctcatcaaattaccttgacaaatgcgctccttgacgctcttgcacaggcaaaaatcatttgctacacttgtgatagctctcacttgcctagcggtatctttatgccatttttgggacattttaaaagcctcactatcttacagcaccaaattcagcttagcaaacaagctaaggcaatactttggcagcacatcatcaaatcaaagattcataatcaagccttgctcctacaaatgcaacaaagagaagagtttaaagcattagaatctctagccaagggagtgaaactcgcagatagcactcataacgaagcaaaagcagcctctctatactttaaggcactttttgggaaagactttagccgcaaggtgcaaatctttgaggatacgcagatagggcttataaatgctgcgcttaattatggctatgcgattgtgaggggtatgattgtgcgaagtctttgtgcgagcgggctaaatcctgcattagggattaatcataaaaatcaatttaacgcatttaatcttgctgatgatctgatagagccttatcgtgtttttgtagattcacttgtagtagagatgtatcaaggtggggagcttgacacaaccttgagtcttgaaaatcgtgtaaggttagcaggggtcttaagtgcagcagtgatggtagaaggcaagtgctatccgcttaatcgtgggagtgtgatgagtgtgcagagccttgcatctgctattcaaaaaagcacatttaccttaaggctaccaatattttgcaaggacaaatccaatggaagatatatttatgagagtgctagtgatgtttgatatgccaacatacaccaagaaagagaggaagctttatgctaagtttcgcaaatatcttatacaagatggttttataatgcttcaatacagcgtatatatgagaatctgtaaaggtgttataagcgctaatcatcatttagataagataagtcttatcgtacctcccaaggggcacattcggggtttaatcctcacagaaaagcaatttgataatatgcggcttttacttggcaaaccaaatgataaccaaaaagccaatgaacctaaacagctcacgcttttttgatatgtctttgtagagtttgtatttttggaatcttagcttatgaaggatttttgagcattttggcataaagttaagatggagatattgtttgctctaaaatcttagattttgcagaaaatataatgaaattgagaaaaatttgtgggtatttttatgtaaaaataagggtttttaggtattgaaaacctgcggggaccctaaaccccttattctagccgcttcttaaattctttagagcagattatactcttaatttgcttaaaatctttatatcgagatattttaagcttactatattgctaaatcaccgcaccatacgttgttttagcgaagtgtattttagcataaaagaatttaagaagcggctaaaacttagaaagcatttggattatcctatacgatattttagcataaaagaatttaagaagcggctaaaacactggaacatgaaaggcgtagtgaaagtctattttagcataaaagaatttaagaagcggctaaaactacaggaagaggtaccaatatcatatgaagattttagcataaaagaatttaagaagcggctaaaaccatcaatcctttggctgctttaggtatgcaattttagcataaaagaatttaagaagcggctaaaacactgtggtgactattcaatattcttatactattttagcataaaagaatttaagaagcggctaaaacttgctcagaattctgttcagtggcgcgttgaattttagcataaaagaatttaagaagcggctaaaacatggaattatttagctgttcatattgagcaattttagcataaaagaatttaagaagcggctaaaaccctctgggacaaatgaaaaaacaattctatattttagcataaaagaatctaaagggtaacaaacgcaagaataggcaaattaaaatacattaactcggtgctattatgtttgattcgttggaggaggagggtagttcttgccttactctatgagtatggctggttagaatagatttgcaaacaaagttatgttgtaatagcctctctattgtttcaagttgaaatcctacaatatcttaaaaatatatctaaagctagtatttccttaataataatctatataatataaaatttaatatctacgttaaacaagccgatacttattataaataatatcataatatatgaagacacttgaaaattacaaaaagcccttagaagttagcacagacaacacaaaggaagtagtatgagagtaagcaacttagactttagaatctgggatagtaaagaaaaaaaacacatcaaagataacttcaatatcttttcagtgcttggcgaatatatcgccaaaaaccgacctaaggcggagcgcactcttgaaattgaactatggacaggttataaagataaagaggggcgcaaaatatatgaaggcgatatcatagaagatgtatcagtgaaacccgagcctatcaaatggcaagtcgccataagcaaagacacaaacagaatgattgccaatattccagtgaagcattttgagctatcttttaaaggggataacttgatatatgctagaattgtaagtaatatccatctacctcaagaagataaatgaaaccgatggatttaaagcgtggcaatgataaaagacaatcaaataaccccaaaaagagagctagtggcaaatgttaagtttgcctttattaaatatatcaagcaacagtatctcaatatagaaatcaagataagcataagaaattttatgcaaaagtctccgcactatggaatttgtaagagatatcttgccaatgcctcctctaatacctcttcttctaaatgcgtgacttgggagaattgtgtgcggttgaaagtgcgttggcgtttggcaagttggcaagtgtggaaatatatttgctcctttagggcttcaagtgaatctatctccccttgtaaaaatgctacacattcctttgtgccaatagcttgtagtgcaggggcttgtgcgccataggattctaaaacaaggcgcgtttcctccacaatgccgctttctatcatttttccacaccgtagagcgatacgctctctcaatgcttcacgttcgcgctctaatacaaaaatctcaatatgatgggcaaaaggtatttttttgtgtgtggcaaaatatgtgctagggggtatggctgtggctttgaaaagggctagggctttgtggattctgtatgtatcagtaggagagaggctcttagcatatttttcatcaatttcctgcaatgccatatattgcgcggagagagaacctagagaatctacccattctttacaagattctaaaggtggcatagggcttaaaccctctataatgcttttaagaaaaaagctacttccccctacaattagtagtggcttactaggtggaagctgtgcgatagcctgtgcaagcagattcgcaaaaagcattgcattgcttctttgatggggctctaggaggctaatggcgtgatagcgcacttgcgattgctctaatggcgtaggtttagccgaagcaatgtcaatgtatttataaatacttaaagcatcaaggctaaaaatctcgcaatcatactctaaagccacgcggtgggctaaggcactcttcccgctgccactgctcccaagtatggcgatgagtttattcatcgcattaaagcgtaataagtttctaaaaagactttgtttgccactccatcgaatgcccttaatttaagctccgctaatgcaagttcaactgcattgaccacccaaacactctgctctaaaggaataagccccatttgattaatgcggaaaatacttgttttgagcttatcctgtccgcctgcgacattaagcccaaaacgatttttaagtatttttctcatctctgccgcatttgcctcatcataaatcgtattcatcgcaagagctggagctttagggtagattttaagccctaaagattctaaagccttttgcgtggcaagtgaacgtgcctttgtctttgcatacacatctttaaaatttccattaagcatttcaaaatatttcgccaagcccgtgataatggtagtaggggctgtccaagcggttgtattttgcctttgattttttagttctgttttgaggttgaaataaaatcccacatcgcgctcattaaccaaatcagtagcatattgcgacaagccgataatgcttaagcccggtgggagcataaaggctttttgcgaaccaccaataagtgcgtcaatatgtgtgatgtcaatttcttctacccccatcgcagtaatcgcatcaaccaccacgacaatacgtggattataatccttaaccgccctagcaatcccttcgacattatggcgcaatccccctgcagattcacacatctgtatgcagaagcaatccacattgccctcttctttgagcgcatttaacacactttccacactcgctggtgtgttccattcattcatgatttcacgataggcaatgcgatgtgcctttgcaatcttgccaaatcgctctccaaacttgccactattgacacttagcattttttgttgcgtgaaagtgcatacacacgcctccatagccccactaccgctgcttgcaagcataagcacttcaggcattttaagcattgctaaaagcccggcttttgcttgtgcgaaaatcgcttcaaattcaggggtgcggtgatgcagagtaggctcactcatagcattccgtaaggattctggcacgggggtgggaccgggtgtgaaaagtagcataatgcctccttgaatatgcgaaataaaatcgcattatacttgaaataacgttattttagttatttaatatcgctcagttgcaagggttgtgctgccttaagtgcgcgttttgcccttttgtttagaatctttggcaaatattttgggtgtgcgccaccattaggacgcaaaatagcgatattatcattgcttaaagcctctcccttagctatatctttactcacccaaatgcttcgggcaaactgccgccgcttctgcaatgtgtgtgcgggaatgtgcgactgcttctctcctagagccaatgctgtatcgcgtacttgccgcaccatagcgctaaaagattctttatccatactaaaggcactatccacgcccccaagcgatttatcaaggataaaatgcttctctatcatacttgcccccaagcttgtagccacaatcgggcagagcgcaccaaggctatgatcagataagccatatttgatatgatattttttgtagattttggctagagcaggcatagaggctagatttgcgctttctagtggagcggggtattcgcttatgcaatgcaagagtgtaatgtccttgcaatcgtgcttatgacatattttaagggcggttttaatctctttatgtgtggctacaccggtggaaaaaataatgggctttttggttttagcaatagcttctataagctcatagtgcattatttcaaaacttgctaccttatacatagggcattgtaaagattctaaaaatgccacacctttgcttgaaaaaggagagctaaaaatgagtaagcctagctcccttgcgagaaaaaaaagctcctcgtgccattcccaaggcgtttgagcctcttcatagagttcataaaggctgcgattatcccataatgtccctccacgaatgcaaaaagcctccgcattgcttttaagtgtaaggcattcaggcgtataggtttgaagtttcacaccatctgcgccacattccttaattgcataaatagaatctttggcaagttgcaaactttgattgtggtttgcgcttagctctgctatgatgagcggttttttgactttcataatcgctccttatacatcaatatcacatcataatatggcttttgtgggcgttgcttatgtgtcataaaatgatggagtttgccctcttttgtatagccacatttttgatagaatcttatcgcattttcattgcattctaacacttcaagatgcaatgtatgtaactctaacttattaaaggcaaaggattctaaaaaggctaagatagatgctcccttgccttttacttcacaaaatggactagcatatatgccgataaaggcgtgtttatgcacgagattaatgcgtgtgagtgagcctacgccgatatactcaccatcttgcttcacaagccaatatcgccttgagttatcattgcgaagctgcgcgaggaatgttgtatgtgaatctgcgctaatatgcgttgaatacatccattgcgcgacttgcgggtgattacgcattgagaggacaaggcaagattctgtctctgtcaagtcggtgaaagatatagcttttaaggatggagatgggctaaggctaggctttgctatgggagattgtgcggtaatctgtgtggaatcttgtgtaagagcaatttgtgttataagctcatagagagcttggggcaagagattattaagagagagattagcaagggtggatttaatagccgataggctatttgtgtgtgaatcttggcagggatttgtatgccataattgtaaaagtgtaagtgcttctaggggattgtgcgctgtggcaattgccccttcttgttcccattgtgtgatatgtaaatgctgattgggggcagattctataataatgcttggaatctttagtgcgatgagttcgagcatactcccaccgcctgcactaatggcataatcgcattcttgtgctttagagagaaaatataggggcaggagatgattataaatgcttatctttggaatattctctccaccactattgtgagggatatggagattatgcgtatagccattgcctaacacaatatgaaaatgataggaggcaaaattttgcgatgaggcgagtgtggagagctgatttaccaattcttgcgtgagattctcactatctaccccgccaaagctgacaaatacattataatgcgtatgtgatgcttgagggggattaatggggggcattataggtggtatcatatagtctttgccgcaccatagatgatagtgtgaagacgaaaaatgtgcgtttgaatgcggcgtgggattaaggatatagctttgcgggggatatatgtcttggaaggtatcatcaaggcatatcagggctttactatgggattttaacagatagtaaaaccactcttgcgcttcatagctatcgatgatggctaaatcaagcatttcaggctgtgcagagagccattcgtaatgtttgtattctatggatatggaatctgcctctatccctagcaaacttttaagcggcgggggtgtgaaatcgccacgattatgcaaggtaatagtctgcacctgttttgcctttaagcacagggcgagtattttcacacatcgatagaaatgccctaaaccaaacttcgccccgctctcacaaaaaatatcaatacgcatataagccctttttttatttataagctttatagcaaagtgagttccattcaggataaactgataaatatacgtgcgggattttattcatcgataatatcaaaaccacatataataaaatgcttagattctgtgtatggtgcggatacaccgcatatttcttacaagtgaaagaaaagtaagactaatacttgcttatcatacacacgaaatgttcgcaaatacattacctctaggcttgtaaaagcctctgctagcactcaatattgacttgatgatgaacaacatcttaatttcaagtgagttttcaaataagttacatttttaactttgtttgtatatagaaattcttttattaagaatgcttagcgtatgatgcacctaatgcttaacgcctacaagcaggaacgctctaatatttattcttttggattataatatcttttggagcttattatgatagtttttgatttgtgttgtggctattttaataccagttttattgttgcttttcattcacatactcccgtatagcactttcttactcttcatttttcacattttgtcgttttaatctttaataggaacattataaaggagaatctatgaaaaaattgactattactacaaatatggcttgggcgttggtgctttttggtggaatgattgagtgtttttgggtgagcgggttaaaatacgctgatagctttgcactctatatgcttacgggtattgggattattgtctctttttgctgtgcggttatggcgatgaaaaaaatcgaggtaggcgtgtgctatgcggtatttgtaggcattggcacagccggaattgtgctaacagaaatgcttgtatttgatgagccattttctttggcaaagattagccttattattttattgcttataggcgttgtgggcttaaaatttaaagctaaagaagatgacgcccttgcagatgaattggctaaagacttggggcttgatgaaatcagtcaggaggcgaaatgagttggatatttttaatcttagcgggttgtgtggagattttaggaatcattgcgatgaaacaactcatacttactggaaaaaagatttttatcttggctttggctcttatctttatggcaagttttggactactctcacaggcaatgcaagagatttctatggcgacagcctatgcgatatggacaggtataggcgcaggaggtggtgtaatagtagggattttattttttaaagaaggtaagagttttttaaaacttttatttttgagctttattatcgtctctagcattgggctaaaaatactttcatagggagttatagggtttagaagttgggttatgtggataaacagcagagagatatatcctcgagcaaccccccccccacttgtgctttagcgctagcctatacttgcatatttaagccatccaccccttataaagagaaaataaaatagaaaatctaaacctttgagactcacttgataactaaagcgtagctttagttatcaagtatatcctttaggcacacacgagaggctttaccttaagtatgcaagacctttgcagagacttttagtctcaatagtaaaggcatagagattctaaacccaataaaactcacttgataaaattctttttgtttaaggggaggggcttaaatatccctcaccctctacattgctttcaaggtatgcactttggtgtgattttatttttatagaagtgaggatatatctcaattgtggagagactagagaatctaagtctctaatgttgaatatccttgtgggatttcatctagagaagcaaatgcttcactctctatgccttttacaagaataaataaacaaataaacaaaacaaacaaatagataaataggagatagtagatagataggata

SEQ ID NO: 3798 - DNA, 22535 bp, synthetic construct
  source 1..22535: mol_type = other DNA
  misc_feature 1..22535: note = Synthetic
tttttgaaggaaataaatgatattgttgataatttcttgtattttactagcaattgtcttaggttatattaccaagataaatgtgggactttttgctatggttttttcttatattataggtgccttttttatggatctagaagttaaaaaaatcattgctttttggcctatttctatattttttgtgatttttgctgtttcgcttttttacaattttgctgtggttaatgggactcttgaaaaattatccggacatttaatgtatcgttttgctaattatccttatttgttaccttttgttatttttgcaatcagtgcgattatcgctgctttaggtgctggattttatacagttttagcttttatggcaccacttacattcttgctttgtgataaagtgggtttaagcaaaattgcaggagctatggctataaactatggagctttgggtggagctaatttcatgacttctcaaagtgggattatttttcgtactcttatggaaaaatcagggattgatacgagtgtagcttttataaattcgagttttatttttatagcgactattgttttacctatctttgttttatcgtttttcgtattgagtgcttttagaaacaaaacacaggtgagtgtgatagaaaaaccagaagcttttgatacaaagcaaaaaacaactttgattttgatgtttataatgatatttatcgttttggcaggacctatagctcatcttatttttcctcaaatttctataatagagtattttaataaaaaaatagatattgcaatgatagctattatttttgttgccattgctttattcttaaaattagccgatgagaaaaaagttatagcacttattccttggaatactttgattatgatatgtggggtagggatgcttattagtgtagcggttgaagcagggacaattaaatggctttcaactcttgtaaaaaatgaagtgagtgtggtttttatccctttaacaatgtgtgccatagcggcctttatgtcacttttttcaagtactttaggtgtggtaactccagctctttttcctataattccaagcatagctcaaagtagtggtttaagcgaagccttactttttacttgtatagttataggtgctcaagcttctgcgatttctccattttcttcaggaggaagtttgattttaggtgcttgtcctgaaaaatacagagaaaaattatttaaagatttgcttgtaaaagcagtgccgataggttttggtgcagctattatagctaccattattatcagttttattttataggggttttgttatgaaaatagatactcacgcacacatttttttaaaagaattaaaaagtattgaaaatgcgcgttataagcctgattacgatgcgagttttaaggattataaggcaaatttagatcgttatgattttgacaagggtgttttagtccagccaagttttttaggtgtagataatgagtttttgcttgagagtattaaatatgatgaaaacattaaagccattgttgtggtggatgaaaacattaaatttgaagaattggaaaaattaaaaaaaagaaaagcttgcggggtaagattaaatcttattggcaaggagttggatgattttaaaaaacctatttggatggaattttttgaaaatttagctaagcttaaaatgcaagttgaaattcaaagagatttggatgatgatcttgtaaaaatcattaaacaaatccttccttttggttgcgatatagttatagatcatttagctagagcaagtgataaatctaaaaatttagaagaattacttcatcttaaaaatcctaaagtattttttaaaatcagtggattttatagggcaaaaattcattatactaaaaacgaagaagtaataaaatttgctaaaacaatgtatgaaattttaaaagagcattttttacctacaaattttgtttttggaagcgattggccgcatactaattttgaaaaaaatatcaattttctaagtgcttttgaagcttttgaaaaaatcgttacctccaaaaaagaacaagagcaaattttaggagataacgcttgtgctttatttggtttttagtcttactctaaaaatatattttgcaatgtattcaaaatattttcttaaataaggcttgtgaataacaaaaccccctagaagtcctaaaaggcttcctatgataatatcttgcaagcgagcgtgtattaacatatcgacacttaagtttccaaaagaagccgcctcagccaaataagtcacataaggagtaagaaaaattacagttaaggcgtagtttctaactactaaaaactcaattataaaagctaaaaacatcatcaaaaagacaaattctagaggggtaaatttaatctttaaaagccaccatgcaaataagattcccactgtcgtcccaagaatgcgttgaagctgttttatccagactgattttaaattggctccttgcaagataacagttgtactcactgcaacccaataacttctatcgagttctaaaaatgctcctagaaacactgcaaaaccaacaaaaaaagcaataatcatagaatccacaaagatgatatcaaaacccaaatttccattctgtaaaacaggcttgggtggggaatttttaaaaatataaatgacagatatagaatataaaaaagcagctatgttggcaataataccacctatacaaatcaatcccactagaaaaatataatctttggacggaaaaggaaaaaatgaagccaataagcaggaaaaaacaaagaaaaaataccccggtgcacctatgttataatagcgtatcaaaatagagctagccatggctactagaccgattatgagcggagaaaacgtaggaaaaaaatgggtgcaaagtcctattaaaaaagataagcacaaaccaaaagaacagcacattgtaacagccattctgtgatatataggcgtattggttgtataaacaaaagccataattcctatcatagcaattaatcctaagtccatacgctcataatatgcagcaatactaagtgcaaatccaactgccaaggcaaagaaaaaaggcatttgccaaactctttcagttggattaagctgtatgatttctttgcattgttgttttaaaattttccttttgctcattttcttatttgtccttctccactgattaggtatttataagtgcaaatatcttcaacccccataggacctcttgcatgaagtttacttgtggaaattcccacttctccaccaaagccaaattcacccccatcactaaaacgagtcgaggcattgacataaatacaagatgagcgtagaaggcgttgaaatttgcctatgtttaaagcattgtttgagattatggtttcagagtgtaaagagctgtgttggttaatatgctctatagcctcatcacaatcttttaccgattttatactgatagcataatcaagccattcagtatcaaaagtgctctcatcagcatttgaaatttctaattttgagtttttaaaatgctctaagatattttcatgtgcgtgaatttttaccttaaatttttcaaattcagggattaaaagttttataaaatctttagcaattttttcgtggatcaaaagggtttctagagcattgcaaacgcttactctttggcattttgcattaaggatgatttctaaagccatatttaaatttgcactctcatccacaaaagcatgacacaagcctttatcttgtttgatgagtggaatttttgtatgactagcaatttcttgtatcatatttgaacttccacgagggatgatcacatcgactaaatcatcaaaagctaaaatttgcatgatctcatttctttcataaaacatagcaaaacaatcttgcaaattaaactcttctagtactttataaacaagattaaatatagccgaatttgtaaattttgcttcgctgcctcctttaagtacgcaagcattggagctttttatcattaaagcgatgatttcagcgcttagactcggtcttgcttcataaatcacaccgattaatcctatgggaatgctgactttttctatctttaagcccgcataattaacccagcctttggaaattttgcctataggatcttctaaataagcgattttttccaaagcatcgcaaagagaaaaaatgcgtttttcatctagcaaaagtctgtcccgcattgctccgcttttagtaaaattgtctatatctttttcattggcttctagtacggttttgaaattctttcttaaagtgtgagctagttttaatataatattttctttatccttgggtgttaaattaagtagtttttgagaatttttcttaatattttcaagtaaatttcgcatttttaatcctttatttacaaaaaacttgataaattatacaaaaaaatttagaattgaaaggtaaattttcgaatgaaaaaagtagatttaatcgtagtaggtgcagggccaacaggaattggctgtgcagttgaggctaagcttaaaaataaagaagttttagtattggaaaaatcaaacaatatttgccaaactttaatgcagttttataaagatggcaaaagagttgatatggcttataagggttgtgaaggaacaaatcacggacatgttccttttcaagatggaactaaagaaagcaccatagaaacttttcaaaatgctttaaatgagcataatatagaagttgaatttggctctgaggtagagagcgttaaaaatgaaaatggagtatttttagtaagcacaggcaagggtgtttatgagtgtaaaaatatcatcgttgctataggcagaatgggtaagcctaataagcctgattataaacttcctggaactttaacaaagattattaatttcaatgccaactctgttttaggtgatgaaaaaatcctcgttgtgggaggcggaaattcagctgcagagtacgcagtggatttggctagttcaaacaaagtaagcctttgttatcgtaagaaagaatttacaaggctaaatgatatcaatcttaaagatatccacgaagctggaaattcaggtaaagtagaattaaaactcggtatagatatagaagaacttgaggatgataatggcaaagctaaagtgaaatttaacgatggcagcagtgagacttatgatagaatcatttatgctatcggtggttctactcctcttgattttttacaaaaatgcggaatcaatgttgatgataaaggagttcctttaatggatgaaaataaacaaagcaatgtaaaaggcattttcgtagcaggagatattgcaactaaaaatggcgcaagcatagtaacaggtttaaatgacgctgtaaagatacttgccgtaatttaatcaaatttagcccttgggctgaatttgacttattaaactttcaatattataatttcttcattatattttaatttttaaatattattatgcaaacacaagataaaaacaataaaaaaattataccgatagaaacctatcgcttagctttctacatactaggacttcaaacactctattagctccttttaagatatttgtattgttaaatattttaaaggattttttatgtcaaatatttttagcactttaagcccttttaggctttttgttaaatgtgctgtgcctaatgtaataagcatggcatttatttctttttattatattgttgatggaatttttgttggaaaatatctaggaaatgacgctttagcagctttggccttgattattccttttattatgatatcttttgctttggctgatatgatagccattggttcagctgtacaaatttccatgcatttaggacttgggaagaagcatttagctagaaaaatctttagctctagtatgttaattatcttccttatttcatgcttggtaggtattttagaatatcttttgagtcctgttttgattaattttttagatgtaaatgaagatatcaaatcaatggcaaaagagtgtatgcttgtatttgctttgtttgccccctttacaatgtgttcttttgctttggataattatcttagaatttgtggaaaaacaacttatagtatgataatgaatgtgattatagcattgagcaatatagtgcttgattatattttcatcgttgtgttgggttggggattgttttcagcagctcttgcgacttgtttgggacttatgctaggcggtatttttggaatttttccttttttatttcaaaatttagagcttaaattctcaagtttgtatatgaatatgaagattttcaaaaatatagtttacaacggaagcagtgaattttttggcaatatctcgggttctttatatggcatatttgccaatttggttttattaaaaatttcaggtactcaagcggttgctgctttttctatcgtttcatatattgataattttattattatgcttattatcgctatgggtgatgcgatgcagcctgcattaagttataattatgctaaaaaggatttttcaaggattaaagatattttaagggtaatgtttttcgcgggtgcgattttgtctttgctgtctatcgtgatgatatttgtttttggtaaggatttggtgggattgtttactcaagaaggtgatcaagaatttatcgtttttgcttatatggctttgatgttgttttcttttaattatctttttgcgtggtttaatgttttaagcggttcttttttaacagcgagcaataaagcgagtttttctttgattttaagcttgagtcaaaatctttttattcctttgtgttttcttttgatcttatcttctatcatgagcttaaaaggagtgtggcttagtccattttttgctgaactttgcgttttgattttagcttgtatttttattagaaaagtctttaagaaactatcgttttcataatgatagtttctttagattgattttagaatttatatcctacacctgtaagtaagatgtggtatgtttcatcgtaaaaatctatatcgctatttcttttttctagaccataatttgcaaaggcataaagcgagtcatagcctaagaattgattttttacgagcttgagattgagttttgtaatactaccgtcttgttttttgttaaaaataggatctgtgccttctgctttgtattgatttaagcttaagcttggggttaggatatagttttttgcaaaaactagatgtgtgcctattttaaagccatatcttgagtagctttgagcttttccatcggcatcattgtaatcatagtttaagcctaaatttaataaagaataattatagcttaattctaactcatgataatttccctctcgcttaagagaagtaaatgttacgctttctttgtctaatttgttttttgcaaaaacataagaagcattaaattttccaaaatcactttcgtaaagttgcgaaattttaaagccgtatttgctcacatcggtttcttcgcgattacctatagcataaggattagcataggctttttctcttaaagatgaaatgagagaaaaggaagtgctaaagcgttctagataagctctttcatagcccaaagcaataccgcttaaatctcttccattatagtttttaagaaatactctatcattatcgattaaattcccatagtaaagctcaagacctataagagggatagtagaagtatcggaattatcagcattgtatccgcttagataatcgctatttgctagaggtgagatattgcttttaacatctcttgcgcctattcctaggcttaaatttccactaaagccactttgaaattctatagatgaagcttgacttatcatcaaagaagctaaagcaaaagaaagtaaggtttttttcaaaataaactccttgtatagttttataattaaaattataactttattgtaactaatattactttaatttttcataaaaagcttatgtgaatttttagattcttttagataaaatctttcaataatttttactcaaaaaaggaaaatagggtgcagcaagagcattttgatttggatttagaacgcgcgattttaagtagttgtatcatgagcgaggatgcttattctagtatagcaggagatatagaacctaaagattttagtcttaaagctcatcaggatgtttttaaagctattattgcttgcgtgaatgctggagagcctatatcgattagctttttaaaaaaacataaaaaaatagatgaacaaattttaacagagattatcgcaactccttcgataatagatctccccgcttatgtcaatgaacttcgcgaaaagtcgattaaaagacagcttttaagttttgcacatcttttaccaacacggatcaatgataatcgcgcagtcagcgaaatttctgatgaaatcggcaaggaaatttttaacattaccaaccgtgtcaatactaacgatatcaaagatatagaattggttttaagcgagcttttagaagaattcaaaaaacaaaaaagtcttgaaaataaaacggtgataggacttgatacgggttttgaagatctaaatactatgactaagggttttaaaggcggggagcttatcatcatcgcagcgcgcccaggtatgggaaaaacaactttgtgtttaaattttatagagaaggttttaagacaggataggggagtggtaatgttttcgcttgagatgcctgctgctcaaatcatgcaaagaatgcttgcagcaaaaacttctatccctttgcaaaaaattttgacagcggatttaaatgataatgaatgggaacgcattggcgatgcttgtaattattattctaaaaagaaattatttatctatgatagcggttatgcgactatcacagatgtaagagcgattttaaggcgtttaaaggctcaagaagaaagcatagggctttgcgtgatcgattatatagggcttatgatgagtaattctaatttcaatgatagacatttacaagtcagcgaaatttcaagagggcttaagcttttagcaagagagcttgatatgcctatcatcgcactttcacagctcaatcgttctttagaacagcgtgcaaataagcgtcctatgatgagtgatttgcgtgaaagtggggctatagagcaggatgcggatacgattttgtttgtgtatcgtgatgaggtttatagggagcaggatgaaaaagaacgcgaaaataaggctaaagccgaaggcaagccttatcaaagaaattttattcctaatcctatgcaagaaaatgctgaaattttagtcggcaaaaacagaaatggccctgtaggggttgtcgaggttttatttttaaaagaaaaatcttgctttgtggataagccgaaatttgagagtgttgaatttcaggagtagggttaaattgttaaaggtgctttgatacgaaagcaatgtcatttaaaatcaatcataaataccataataaaagtgagaacgaatgaaaattttaggttttgatatagggattaactctataggttgggcttttgttgaagataatcaattacaagattgtggtgtgagattgtttaccaaggctgaagaccctaaaacaagagaatctttagctttacctagacgcaatgcaagaagcaatagaagacgactaggaagaagaagatcaagactgattgctttaaagcatattatttcaaaagaattaaaattaaattatcaagattatatagcaaacgatggagaattgcctaaagcttatgaaggaagacttgtaagtccttatgaactaagatataaagcgcttaatgaaaaaatagaacccaaagatttagcaagagtgattttacacatagcaaaacatcgtggttatatgaaaaaaaaatgaaaaaaaatcaagcgataatgaaaagggtaaaattttaagtgctttaaaaacaaatgctttaaaattggaaaaatatcaaagtgtaggagagtatttttataaagaatttttccaaaaatatagagaaaatacaaaagattttataaatatacgcaataaagaaggtagttatgaaaattgcgttctagcaagtgatttagaaaaagaattaaaactgattttagaaaaacaaaaagaatggggatattcttataatgataattttataaaggaaattctaaaagttgcattttttcaaagacctttgaaagatttttcatatttggtaggagcttgcaccttttttgaagatgaaaaaagagcttgtaaaaattcatatagtgcttgggaattcgtagcattaaccaagattatcaatgagctaaaaagcttagagaaagagagtggagagcttgtatcgaatcagattatcaatgaaattttaaatcatatcttagataaaggaagtatcacttataaaaaatttagagaatacattaaacttcatgaaagtatgaaatttaaaagtctaaagtatgataaggacaatgtagaaagtacaaaactgattgaatttagaaaattagtcgaatttaaaaaagccctaggagagcattccttaagtagggaagaattagatcaaatagcgacttatatcactctaattaaagataatgagaaattaaaaattactttagaaaagtatagtttaaataacgagcaaatcaagaatctgctagaaattgatttcaacgatcatataaatcttagttttaaagcacttaatctaatcttgcctttgatgaaagagggaaaaagatacgatgaagcttgcaagcttttaaatttaaaaacaaaatcaaacaatcaaaaattcgatttcttacctgccttttgcgatagtatttttgcacaagagctcaccaatcctatcgtaaatcgtgctataagcgagtatagaaaagttttaaatgctttgcttaaaaaatatggaaaaatgcataaaattcatatagaattagcaagagatatagggctgagtaaaaagcttagggctaagatcgaaaaagaacaaaaagaaaactatgagaataatatttgggctttaaatgagtgtgaaaattttggacttaaggcaaatactaaaaacatcttaaaattaaaactttggaaagaacaaaaagaattttgtatttatagcggtaaaaaaatatccatagaacacttaagagatgaaaaagctttagaggttgatcatatatatccttattcgcgaagttttgatgattcttttttaaataaggttttggtttttaccaaagaaaatcaagaaaaactcaataaaacaccttttgaagcctttggagcaaatgaagaaagatggagtaaaattcaagctttagctcaaaatcttccctataaaaagaaaaataaaattttagacgaagcttttaaaggcaagcaacagcaagattttatcagtaggaatttaaatgatacaagatatatttcaactcttattgttaaatacacaaaagaatatttagattttttacctttggatgaaaaagaagatataaatctaaaaagtggagaaaaaggaagtaaaatacatgtgcaaacaatcaatggaatgcttacatcagttttaaggcatacttggggatttgctcaaaaagatagaaataaccatcttcatcacgcgcttgatgccacgatagtcgcttatagcacaaatgccattataaaagctttttcggattttaaaaaagaacaagagcttttaaaagcaaaactttatgctaaagaacttacaagtgatagttataaacatcaagctaagttctttgagccttttgagggatttagagagcaaattttaaatcaaataaacaaactttttgtttcaaaacctcctagaaaaagagcaagaggagctttacataaggaaacattttaccctaaagatgaaatgattaaaaaatacaactcgcaagaaggtttagaaatagcactaaattgtggaaaaataagaaaaacaggtacaaaatatgtagaaaatgataccatggtaaggattgatatttttaaaaaacaaaataaaatttatgctatacctatttatactatggattttgctttaggagttttaccaaataaaatagtaattgcaggtaaagataaaaagggcaatccaaaacaatggcaagaaatagatgaaagctatgagttttgtttttctttgcataaagatgatttggttttgatacaaaaaaaagatatgcaagaacccgaatttgcttattataatggttttgatatcagtaactcaagtatttgtgttgaaaaacatgataataaatttgaaaacttaacagacaatcaaaggctattgtttacaaatgcaaaagaaggaagtgtaaaggctgaaaaattaggaattcagggattgagaatttttgaaaaatacattataaccccgcttggagaaaaaattaaggctgattttaaaccaagggaagatattgccttaaagacgagcaaaaaacatggcctatgatgaagcttttaaaagtatattgatattcaatcaagcaaactaagtctaataaaattagacaagctagtttgtttgaattttaacggttttaaagggattgtaaccctgcgtggctaaccgaaaaccacttattttagtctctttttaaatttctcttttaaaatgatagcatatttttatacatttttgtatacaaaaagctctatttttctttatttgttcaaagtccattttaccataaagaaatttaaaaagagactaaaacaatactttcgaagattgaaaaaaacccataattttaccataaagaaatttaaaaagagactaaaacatataaatactatataaaagctatataaatattttaccataaagaaatttaaaaagagactaaaacaagcccaagtggatttaacgcgacaggtgaattttaccataaagaaatttaaaaagagaatcggtttctatttcgatttaaggtgatagtaaacggtatagattatttgtagttaaagttaatttgattcattttttgggattagatatgtacaactaaagtagtggtggatttagcaggactcgaacctgcgaccaaccggttatgagccggttgctctaaccaactgagctataaatccgcctttgatttgtgaagagataattatatcttatctttgcttaaagttattttatttatttttattatctgtccaaaaatatctaaaagtaattaaatgttgtaaaattccaaagaaaatcataaaaattgtaaaagaacttccaccataactaaaaaaaggcagtggtataccgacaaccggtgcaaatcctatagtcatcgaaatattaacccccgcataaataaaaataaacaatgccacgcagtttatggcaactctagcaaaataatcatttttaagtttatgattaagacttagcaagtgaaagatgagcaggatataaagcaggattaaaacaaacccgcctataaatccaaaacgctctataagatatgcaaagataaaatcactcgtagcgataggtaaaaagttaaaatgtgtctgcgtggcttcgtcttcagatttgcctatgagtccgccattgcctatagctatcatcgactgtgcgacttgatagcttggtttttctgagataaaatcatgaattctttgtttttgataaggctttaaaaaatgcgtataaataataggagaacttataccaatagcgatgatgatgctgagccaaattttataattcacacccatgataaaaagcacaccaaaacctacgatcaaaagcaccatagcactacccaaatcaggctcttgggcgatcagtaaaaaaggcaagatgataaaaaaactaagttttagaaattgttttaatttatagccatttttaggcggtggattttgatagatgagataagcaagcattaaaataaagctaggtttaaaaatttcagaaggttgaatggtaaaatgagtaaatggaatttcaagccatcttttggcgcctaacctttcaactccaaaaatatctgtacttaaaagcaaaaagatatttacccaataagctacaggtatgagccacataagtttgcgtatgggtagtaagaaaaatacactaaatgctgcaatccctacacaggcataaacgaattgtttttcagccaaaaaggtattggcttcgtatattaaaaaaaatgaaattgaaatgataggtataaataaaataggttgtatataatcaaaatgtgttaaaattcttctatcgggtataaacaaaatttgccttcaatttgtagtattaaattataattataggataaaactctaaattgtataaaattttataaggaaaaaatgcaaacttttttagttgatgaatcctcaagacttgatatttttttagctaaaaatcttaatcaaagtcgcagtcaaatagctttaatgatagaaaaaaactgcgtttgggttaatgataaaattcaaaataaaaattcattcaagttaaaagtcggagataagcttgttttaaatttgccacttgtagaggaagctaagcttaaatttgatatagattttgatatagaaattttatacgaagatgaggatttgttggttttaaacaagccttcaaatttggtagttcatggagcaaagagcgtgaaaagcgcgactttggtggattggcttatagaaaaacaatacactctttctactttaggcggagaagtgcgagcagggcttgtccataggcttgataaagaaacaagcggagctatactgatcgcgaaaaataattttacccatcaaaagcttagtgagcaacttagcgataaaactatgggaagaatttatcttgcgttaattgatttgccactaaaagaggataaaattatcatagataaagccttgattcgttccagtgcgaatgctattaaaaaaatagttacaaattcccatactaagggttctaaggaagctaagagtgcttttgtcaatttggcaaaaagtgaggaattaagtcttattggggctaaactttttacgggtagaacgcatcaaatcagagcgcatttagctagcataaatcgtcatattttaggagatgaattatacggttataggggaaaatacgagtgcaggatcatgttgcatgcgtattttttatattttgttcaccctagaaatggagaaaagatatttgttcaagctccattgatgaatgattttaagcaaattttagaaaaaaattttattttaggagagcttaatgaaaaaatttcacttgagtctttgcttgggtgctttgactcttttatttagtgcttgtagtgtttcacaactttctagcgtgggttctagtaaagaacttgcagttaatgaaagcttgccaaagattgaaaacttaaaaagcttgagtgatattagcaatatagcgtttgaatgggagcctttgtatgatgataatattaaaggattttatttatatcgttcaagtgatgcaaatcctgactttaagctcatagggacgataaaagataaatttcaaacccattatgtagatgctaaacttgagccaaatacaaaatattattatatgatgagaagttttaacaatcaaggtcatatttcagaagatggaaaggtagttgaagtaaaaactatgccaagattagaggctgtcccttttgcacaagctattacaaatctacctagccgaatcaaattgatttggcgtccgcatccagatccaagagtggcttcttatatcatagaaagagctaaggcggatgagcaagaatttaaaaaaatcgccgagataaaaaatcgcttgaatgctgaatttatagatgaggatttaaaaccaggggagaatttcagctacagaatcatcgctgttggatttgacggagtgcaaagtgagccaagttctgttttaaattctacaagcaaggctttaccacctcaagttgagcatttaaatgcaagtttagatggctctaataaagtgattttgacttgggatgctcctaaatatcaagatttttcatattataaggtttattctacgagttcaagcttgcttccttatactcttttggctaaaactgagcaaaattattatgaagatagggttgagggtgctgcaaaaagcaagtattataaagtaaccatggtggatgtagatgggcttgaaagtcctatgcctgaaaatggagtagagggtaaaaccttaggactcccgtcttctcctactgtgattttagctcaaagtacaagtgagggtatcgatctagaatggatagataatgattctagagcagttgaatacgaagttagacgctatggtggagatcaagatgctatttttaagggtataaaagaaaaaagattaaaagatatcaaagctttgccaggtgtggagtatagttatgaggtgatagcgattgattctgttggtcttcgttcagaaccttcaaaaagagttaaggcagggcaatagtgccaaattttaaagcgagaaaacttaaagaaatcattctaccctttgaaaaagatggggtagaatttgtttggatggcatataatgacaatgtgaatttaatctatacaaaggttaaagaagaaagcttttttctacagattaaaaaaggagaaaatgaatttgtaattaaggtagataagcatactaaaccttctaaaatagcttatttacacaaggctttagatatctttaaacaatatttttgcgaagatattatcagtgaggctttcggcgtaaaaaataatgctttggctgaaaaaactcctttgattgctaatgattttgaagaggtgttagcaagacttggaggcaaaatttacattgaaatcggctttggttcaggaaggcatttgctttatcaagctaaaaacaatccccaagttttaatccttgggatagaaatttataatccagccatcacacaggtagcaaagcttgcaaaagcacagggtattgataatattttattaattcaaagtgatgctaggcttttactaagtgttcttcaatctcattctatagaaaaaattttcttacactttccagttccttgggataaaaagcctcatcgccgtgttatttctaaagcattttgtaaagaatgcgcaagagtgcttacagcacaaggagtttttgaacttagaacggatagttatgagtattttgattttactcttaaggaatttttggaattctcatcgccacaatttagcattagaaaaaatgaaaatttagaaatttctagcaaatacgaagacagatggaaaagacaagaaaaagatatttatgatctttgggtgtggaatttagacaaggaagaaaacgatatctttgtagaagaatttgatttttcagatatacatttaagcagaaatgatttaatgcttttagagaaaaattttaaaaactttaccctgaaaaaagaggatttcttcttgcattttgaaaatatttataagcaaggggaaagtttattgttgaagatagcctttggtgcgtttaataagcctgagcactgttatttacatatagatgagacgattagctttgtttttaaggagccttttaaaatacaagaaaatttaaaagctataaaaatgcttaaggaaagtattaaatttcattttaatacagatcattttcttgaaaattaagtaaaaataaagcataatttacgaattttgaaattcaaagaggatggaatgtcaaatttaattcaagcacataaactttctttaggttatgatgaattagttatcaaagaagctagctttacttttaaagatgatgattttgtatttattacaggtaaaagtggaagtggaaaaagcactctgttaaaatctttttatggggatttagaactcctttcaggtcagcttgaagtatgcggatcttctatgcgaaagatcggaaatttagagcttttaaaattgcgtcagcaaatcggtattatttttcaagattatagacttatacaagaatacagcgtggaaaaaaatgtcatgcttcctcttatgatcaaaggttatagtaagaaagtttgccatgatcaagctagtaagcttttaaagcatgtaaatttgacatttaaagcagataaattgcctaaccagctaagcggaggagagcaacaaagagtcgctatggctagagctttagcgcacaatcctaagcttttgctttgcgatgagcctacgggaaatttggacgagtattcttcggatattatttggacacttttaaaatcagctagagagcttttaggtacttgtgttgtggtggttacgcatagaattccgagcaatttaagactgaattatcgtcgtttcaatatagaaaatggaaatatgaatgaaattttttaaaactcacttatctttgattttgcctttgctttttatgatgtttgcctttgagtttattttacttacaaatgctactttaaaatactacgaagagcttgtcaataaagattataatatcattgttgcaagttctaccgaacttgataagaatgttataaaaaccaaactttcttctttttctagtttggaattattagatcctaaggatttgatagagcgtttaaaaaatgatgtttctgataaaaatttaaaagttttgcgagattctttgcctaaattttatagtattaaacttgattatttgcctacgcaaaatgagcttaatactattaaaaatcagcttttaagtataccaagcattagtaaagttgaaacttttgctaaaacgcatgataaggtttattctttacttgttttgatgaaatttgtattttggctgtttttatttatcattatcttgctttcatttgttttattcttaaagcaaatgagaatttggctttttgaacacaccgagcgcgtagagattatgtgcttgtttggtgcacctttttggtttagatctttcatgctgtataagattgtagtagtggattgttttatcgcttttgttattttgtttatatttttcacacaaatttacgatctttctatagttcaagatagcctaaaggcagttgatattatcttgcctcctattaattttatcgtgcatttgggtgtgatttttttagccactttatttgtatgcttattgtgcgtaaattcggtgatgtttagggtgaagaaatgagaaaaattttaatttttctttgtttttttttactaagcagtgaaatttatgctaatgctattaatgaaaaaaccaagaacttagcagaaaataaacgcattcaagagcaagtaaataaaaagcttgaagatttggcaaatgatatattaaatggagaaaagagtttaaaagaactgagtgctcaaatcgaaactcttaattctcaaacccttaagcttgaagctcgagccaaggcacaaaataaagacttaaatttgcttacaagccaaaatacagatcttttaaaaagcaaagccagtatggaaggcaagcttatagccttaatggctaaagattttgcttatgatttacctataccgcaaggttatgttgaaagcaaggaaagctttatggcttttgaagttttaggcggcttggataaaattttacaagatgaaatttttaagctttctaaggattatgaggatataagcaaactgatcgatagcaagcaaagtcaaattaaaaaaatcaatgaggatttaaaagattacaatgctcaattagcaaaacttcaaaatctaagacaaaagcaagttaaagaaatcaataaacaaaaaaccgatcgtgcgatttatgctaagaaactcgagaatttacaagatcagcaagatgagttaagaaaaactctaaatcagttaaaaattatagaaagtaaacaagaagacaaaaaacaaacccaaaaagttgttagcgatagcaaaatcactaacaatacccaaaaaattcgtcaaattggttctagctatcaaggaagcactactaagcgctatacaggtaaaaaaactatagctcctttagaatcctttactgtaaagcaaaaatttggaaattatatcgatcctgtttataatattaaaattttcaatgaaaatgttgttttaagaagtaaaaaatcagatgctgtggtaaaaagtgttttagatggaaagatagtttttgctaaagatacaagtatgcttgcaagagttgtgatagtcgagcatgataatggaattcatactatttatgcacacttggataagatagcgcctaatatcaaagtgggtaaaaatgtaaaaaaaggtgcggtagtaggcaggataaaaaatgatttaacttttgaagtaacacaaaagaattttcatatcaatcctttagaacttattagcttaaattagctaaatttaatggaattttcaatataatttcgagttgattaaggagaaaaaatgcaagagaaaaaaagagttttagtaaaattttcaggtgaagctttagccggagaaaatggctttggtattgaaaattctattttaaaattcatagcgaatgagattaaagaactagttaaaaataatatagaagtaggtatagttataggtggtggaaatatcattcgcggtgtttcagcagcaaaaggtggtcttatcaaacgcacaagtggtgatcacatgggaatgcttgcgaccgttattaatgctatcgctatccaagaagctttagaaagttacggacttgatgtgagagtacaaagtgcgatccaaatggaagctttttgtgaaacttatatcatgagaagagctcaaagacatttagaaaaaggcagagttgtgatctttgctgcaggcacaggaaacccttattttacaacagatacaacagctattttaagagcagttgaaatcgatgcgcatatggttatcaaagcaacaaaagtaaatggggtttatgataaagatcctaataaatttgatgatgcagtatttttacaaaccctaagttatgatgaggcaatgcaagataatattaaagttatggatgatactgcaatcgctctagctaaggataattctttacctatcgttgtatgcaatatgtttgaagaaggaaatttattgaaaattatacaaggcgataacagtctttgttctatagttaaaaattaatcaaggagaaacaatggaaaatagaatagaagaaatagcagctaaagcactagaaagaatgggagatgatcgttaccgtctttctttggttgttgcaaaaagagcagagcaattggctgatggtgcagcacctttagtagatgttgataaaaataaatttaaatttgctgatattgctttatacgagatagcagaaaataaaatcactttagagggtctagttgaaaacagtcgatgaggaattattgctcgaaaaactcattgaagatattaaaaattgtagagatttaacaagagcaaaagaacttctttttagcatttgtcaagaggatgctattgtagaaaaggctgtggattattgcataaagtctcacgaaggtcagataagaaaaagtggagaaccttatgcagttcatcctatcctagtcgcatgcttagttgcttttctaagtgaaaataaagcttcgattttagctgcacttttgcatgatgtgatcgaagatacacaatgtaccgaagaagaacttagagatcagtttggatccgaagttttaaaacttgttttaggtcttacaaaaatcgtagaaatcagagaagataatctcattccttcaaaatcaaagaaaagtttaaccaaatctgctcttacatttagaaatatgcttttggcaagtattgaagatgttggggttttggtggtaaaactttgcgacagacttcacaatatgttaaccctagacgccttaagaccggataagcaaaagcgtatcagcgaagaaactttagtcgtttatgcacccatagcacacagacttggaatttctagcattaagaattatttggaagatttgagttttaaatatttaatgcctgatgagtataggcttatcgataattatatcaattcaaacgatcagcaaatgcaactagggcttaatgaatttatttcaaaaatcgaacttttatttcttagcaatggctttagacaaggaagttttcagattcaaaaacgcatcaagcacagttattctatctatcttaaaatgcaaagaaaaggcgtgggtatagaagaagtgctagatctacttggtgtgcggattttggttgaaaatgtgagcgattgttatttggctttaggggttttgcatacaaattttaatcctttggtttcgcgttttaaagattatatagctttgccaaagcaaaatggttaccaaacgatacacaccactctttttgatacgaaaaatattatcgaagcacaaattcgtacttttgatatgcataaaattgctgaatttggtatcgctgcgcat

SEQ ID NO: 3799 - DNA, 22508 bp, synthetic construct
  misc_feature 1..22508: note = Synthetic
  source 1..22508: mol_type = other DNA
gacatacttatgtagtttatgggcctttagcatgtggggcaacgactataatgcatgaaggaactcctacttatccaaattctgggcgttggtggagaatgatagaagagtatcaaataagcaaattctacacttcgccaactgccataagaatgcttcatgctgatgcacctaatgagccaagaaaatatgatttaagtacgcttgaagtgcttggaacggttggagagcctatcaatcctagtgcttggaagtggttttatgatgaaatagggggaactaaaagtcctatagtcgatacttggtggcaaacagaaacaggtgggcatatgatcacgcctttaccaggcgccactcctttaaaaccaggttgtgccaccttgcctttgccagggatttttgcggaagttattgatgaagaaggcaataaaaaagatgaaggtgaagatgggttgctttgtataactaaaccttggccttcgatgattcgtggaatttggggcaatgatgaacgctatatagaaagttatttttctcaagctaaaaaagatggaaaagctgtatattttagtggcgatggtgctttttatgataaaaatggttatattaccatcacaggaagaacagatgatgtggttaatgttgcaggacatcgtataggaacggctgaaattgaaagcgctattgctaaacatccaagtgtagcagaatcagctgtagtgagtattttggatacgattaagggcgagtcattgtttgcttttgtggttttaagtcctgcatccagttgtgatcttggcggagctatagaaactttaaaagaacttaatgacattttaagagtagaaataggacctatagctaaaatagaaaaaattctttatactccaggtttgccaaaaactagaagtggtaaaataatgagaagaattttaagaactatagcaagaggcgaagaaatcaaacaggatatttcaacacttgaagattctaaagtagtagaaaccattgttaaattagctaaggcagagtttgaataacaaggcaaaaagaactttgccttgttgcatgaaaattcataaaaataagctataatgataaaaaaataaaaggaaatttttatgcttcaaacttgtattttccctgcggcaggttatgggacgagatttttacctgcaacaaaaactttacctaaagagatgttacctatcttaaccaagcctttgatccattatggagttgatgaagctttagaagcaggaatggaaaatatgggatttgtcacagggcgtggaaaaagagctttggaggattattttgatatttcttatgaacttgaacatcaaatttcaggtacaaaaaaagaatacttacttgatgaaattcgctctttgatcaatcgttgtacctttacttttacaagacaaaatcaaatgaaaggcttaggtgatgcggttttaaaaggtagacctttggttggcgatgaagcttttggcgtaattttggctgatgatttgtgtgttaatgaagaaggcttaaatgttatggctcaaatggtaaaaatttatgaaaaatatcgctgcaccatcatagctgtgatggaagtaccaaaagagcaagtttcaaactatggagtaatttctggaaattttgtagaagaaaatcttatcatggttaattctatgatagaaaaaccaagtcctgatgaagctccaagtaatcttgctatcataggaagatatattttaactcctgatatttttggaattttagaaaatactaaagcaggaaaaaatggtgaaattcaacttaccgacgcgcttttaactcaagcaaccaatggtatggttttagcttataaatttcaagggaaacgctttgattgtggaagtgtagaaggctttgtagaggcgacaaattatttttacgagaaaagtaaatgttaaacaatacgcttttttttaaacaaagtgaaattcacactataagttcttatgcaaatcgtattaatgatgaggtaaaaagtggagatatagggtattatcatcttattgacacaagtttgaatttaatcgatgagagcttgcaatttattcaagataaagagtatgtaaaaaatatcgttttagtgggaatgggaggttcaagttgtggtgtaaaagccttgcgtgatatgctttttaatgaaaaaagcaaccaaagagagctttttatactcgataacacaagctcgcattcttttaataagactttagaaaaaatcaagcttgaagaaagtttgtttttaatcatcagcaaaacaggtagtactatagaagttgtatcgctttttaaacttcttattgaacattttaaacttgatatgcaagaattaaaaaaatactttgtttttattaccgataaggattcaaaacttcatcaagaaggtgaaaatttaggtattaaatgcttttttatccctgcaaatgtaggaggtcgttttagcatactttcagccgtaggtatagttccactttgtttttgtggctataatgccaaagctcttttagaaggagctaaagcttgttttgaagatttttttactcacaaaaaagatgaaattttacaaaaagcctatcattattgtacacacaaaaatgccaatatcaatgtacttttttcatatagcgatgcttttaaaggctttaatgaatggtatatccagcttattgctgaaagtttaggtaaaaagcaaggctataaacgcataggtttaactcctattgcactcattggcgcaagagatcaacatagttttttacaactcatcatggatggacctaaaaataaaactgtaacttttttaaaaatcaaagacgctcaaaaagcacctattatccctgatattcattttaaatttttagattctttaagtaataaagtcaatcttcacgaacttttaaacgctcaatgtgatgcaactatgcacgctttaatcgctgaaaatttgagtgttgatgtgatagaacttgaaaaacttgacgcttggcatgcgggatatttgatgtattattatgaactttttacttcaacttgcggtgttatgctagggattaacacttatgatcaacctggtgtggaagttggaaagttgatcttaaaaaatatattaaattcttaatcaaaattcattaaaaaagagtataatgattttaagttaaaattataataaaaatttttaattaataataataattattatttaagaattttatgttataattttaaaaattaaaaaaaggagtcaatcatgtcagttacaaaacaattattacaaatgcaagcagatgctcatcatttatgggttaaatttcataattatcactggaatgtaaaaggtttgcaatttttttctatacacgagtacacagaaaaagcttatgaagaaatggcagaactttttgatagttgtgctgaaagagttttacaacttggcgaaaaagctatcacttgccaaaaagttttaatggaaaatgcaaaaagtccaaaagttgcaaaagattgctttactccgcttgaagtcatagaactgatcaaacaagattatgaatatcttttagcagaatttaaaaaactcaatgaagcagcagaaaaagaaagtgatactacaacagctgcttttgcacaagaaaatatcgcaaaatatgaaaaaagtctttggatgataggcgctactttacaaggtgcttgcaaaatgtaatttaaggggctttatgccccaattatacaaactaggttataatatccttttttaaaggataaaattgaaagtacttaattttttttatgaaaaccaccctaaatttgaagtaagttatgaaagaaaaaatcaaatttcaaaaccaaatattatcataaaaggcccacgattttgtggtaaaaaaacacttatttttaattttttatctcaatttaaagcaagtgaaattttgtttttagatttatatgatacacgctttgaaaaacaaagtttagaaagacttgctgattttctgaatgaaaatttacaaattaaaattctttgcctttataatttggattttatccctaatttagaaaaaattaacattcccatcatcttaagtacaaatataaaagatttaaatgtaaatgggtttgaagagcttgaacttgattattttgattttgaagaatttattagtgtaagtaagaaaaatttacctataaataatttagtaggtctttttttgcaaagtggacgcagtaaatttggagaaaaaaacatacttctaagacaaagcttcactcttttagaattagaaattttaaagtatttagctttaaatttgggtcagcaaatcagtatttctaagatatttatagaactcaaaaaaagattaaaaacttcaaaagatagtgtttatcaagctataaaaaaattagaaaatacttatgtgatttataccttaaaacatgatgaaaaaaaacttcaaaagatttattttaaagattttggcctaagaaataatctttgtatttcaaaggatttttcacatttatttgaaaatttagttttaagcgagttgtttaaatttaaagaagaatttttttataacaaatactttaacttttatagccaaatatctaaaattgcttatatttcaagtccaactttagatattgatttgatcaagctacgtgctaagaaaattttaccaaaggctttagaacttggaatttttcatgtgatttttatcactctttcaagcgaggataatttttttgaacaaggggttaaatttgaagtcatatcttttgataaattttcacttggattttaggtgttgtttgagtttgtatcgtatttttcaaggttgtatcgtttgatgatttttgtaataagattgatataatatcccttgcgttcagaataagaatctaaagttttaatagcctctagccctgttatctctttgccttcgctttcaaatttagctcttgcatcgcgaaacttttcataagcaaaatgacgatttaaatttaaaacataagagtcaacactatcttgcagactatcaaaaattttaattttgtgttttttatctggatgtcttaaatcaggaattaaacctttctcaccccaagtccattctccaaaaagattgtttgcttctcttgcgaagcgactggtacctgtagcactttcaactaaagcttgggctatacccatggattttggaattttttgaatacgttttttatattctgcaaaatcataaagattttcaatgcgatatttgttttttatcgtgataagtttttcaagatttatttggtttgaagtcctaaagcctgttttgtaagcatctttaaaaaaggcttcgataaaagctctttcttgttcaatttttttaaagctttgatcaaacatttcattcatttttataaaaaaaatttgtcttttttgatctatatcaagtttgtaatattcttctccaaatccactctttagatcatcagcaaaaagtgggattagaaaaagactaaaaaaaattataattggcttcaaaacaatactttacctttccttcaaaaaacaattcttcatttttatatgcaaaccctacctcttcaccacttttaggagttattttaactttattttgtacttttttatttaaaaatgccagataaaaacaagcccccattcctgtgccacaagctaaggtttcatcttcaactccgcgttcataggtgcgaacttttaaatgattttcatctaaaatttttacaaaattaacattggcattatatttttgtctcattttttgacaaagcattgtatcaaattcatctaaattttgacaaaaatgtactagatgtggaactccagtgttgcaaagttgccaagtttttcctaattcttcaaaagtattttgcacgctttttattttgcctaaagatacttcaactttatcttgatttacctttgcttttattactcctgcaccggttaaaaaactcatgttaggatttattttgttaatatgatgtgcaaaatgtgccgcagcccttgagccattgccacacatagcagcccttgagccatcgttattataaaattcccattcaaagtcgtatttttcatgaggcaatatcacgataaagccatccgcacctataccctcataacgattacaaagttctttagctaaagcacttctatcttcttttctatcagcatttgttatgacaaaatcattcccacttgcacaatatttataaaatttcacatttttcctttagaaatttcttgtattactttaacacattcttgcctaaaatcggcataagaattagtatttttaatgataaaatctgcttttttaagtttttcttcaatatctatttgagaatcaagtcttgcttttgcagcttctaagctgagcttatctctttgcatgattcttttaaggcttaattctttaggtgtgtaaattacaatgactttgcctaaattttcataagcaccgctttcaaaaaaaagaggaatttctacaaaaaaagctttattttctttatctagaatttgtatttgttctaaaattttagctcgaattttaggatgagtgaaattttctaagatttttttagcttctttattgttaaaaacaatttttccaaggatttttctatcgattttcttttcttttgtgagtaaattttttaaactaaagggagaaaaaatcttttcaagttctaaagcattttcatctaaaattttatgagcgattttgtctgcgctaatgcttttaaagtctaaagaattcgctatttctataaaagtgcttttaccacaagcaattgaagcggttacaaaaaaagcatttttcatcttatgccttattaaaacttttttcgttaaaatacctttttagttcttaaaggaaaataaatgaaaatttcatatgaagatgcaggcgtaagtatagataatggaaatacctttgtagaggctataaaacctttggttaaagaaacttttaatgataatgttgtaggtggaattggttcttttgctggtgcttttagaatgccaagtggttttaaaaagcctgtgattttaggtgcaacagatggggttggtaccaagcttcgcttggcaattgatgctaaaaaatatgatactatagggcaagatttagtagcaatgtgcgtgaatgatttgatttgtaattttgctacgcctttgtttttcctagattattatgctacagccaagctcgaagtagaagtagcaaaggctgttgtatcaggcattgccaagggatgtaagatggcaaattgtgcattaattggcggagaaactgctgaaatgcctggaatgtatgcaaaagatgattttgatcttgcgggttttgcagtgggtatggctgaagaagatgagattgatagaagtaaatttgttaaaaatggtgatattttattggcactttctagttcaggacttcattcaaatggttattctttagctagaaaagtactttttgaaagtttaaaattaaaatttgatgacaagatagagggtaaaaatttaattgatattttgttagaacctacaaggatttatgtgcgtgattttcttacactaaagccttatatcagtgctctagctcatattacagggggtggtttagtagaaaatttaccacgcgttttacctcgtggtatgggtgcaactatacgcaaacatcatcttaaaactcctgaaattttttatactataggacaggctgtagaagaaagcgaaatgtatagaagctttaacatgggagtgggtttagtaatggttgtagatccttctaatgtaagtaaggttttagaaaattcagatgcctttattatcggcgaaatttgcattaatgaaggtattgttttagaatgaaaataaagcgttaatacgctttatttttgtattttaagttctatttttgtagtgttttgttcttttggcaaaggattggtttgtgctagataaaaggctacaagcacatttacaagcatagcgataagtaaaagaggagtggttcgttttataatatccattggagctacttttgcaaatccagctaaagctatgatttcgcctgctattggtgaagctgcacgacctaaacaagatgcaatttctataggtaaaactagagtaataggtgcaacgcctaattttgtagctatatcaggagctagttttccaaaagtattaaaagcggcaattccacttcccataatcactgtggcaaaataaactaaaaagcttaaaatagctatactcaaaagaattccaaaccatgcaaaatttcctgttccaagatttgaaaccgcgttagcaaggatattaactccaccaagtgctttaatgccttcagcaaatactccagcggcgatgattatgcttacgactgagataaaaatttcagccatagccttttaaaatcaccatcatatcttcgcctaattttctagcatttctgtgtcttgcaaattcaacaagaaaaactaaagaaattcttacaaaatttgctatcacaacatcgagcttgatagtaaaaaaatacgctataaataaaaatacaacaggtaaccaaggaaagagtatgtaaaaagtagggcatttaggatcaatgatttgcggaatttcaacttcatcatttaaaacacctttttctttatctcttttatcaatccaagcaaaataaaaaggaatcaagatggcaataattacaacataggtaatcacactataaatttggtaatttaaaaaaagccttacgacattatcactttgtcctaccatatctgccatattgattgaatttccatcttttggatcataatcaagtgcaattaaagaaagcgcacatacagttgtaataggacggattttaagtgagattaaaacaggataaatatatgctaacaaaagcaaaagcaattcagcatagctagaaatgacgatttttaaagccattccaacaacaaaagttccacttaaaattaagtatttattttttgatttttcctgagggtttatttgctaaaaaagcaagttttgccgaagcattgatatgtttcatgtaagcagtaaagcctgccacactcatgataataagccctgctccagaaagctgacttttaaaagtcgctgtgataaaagataactatcaggtaaaacatttaaaagcttgtatactctctgcttggagtttttggtataggtgttcctgtgatataaaaagcaaaaataagcaagataatacctgaaagaaaaaatacaaaaataggattgtattttttaagtatataataagcaacaacaattaccgctaaaagtgtagaacatatcataaaaattggcatgatttctcctaaagttattattagcttttattttattttagctaaaatttaactaataaatatttttcatttaaaattttacttattttttgcattataaaattaataatatgtatagtttggttactgaaaagtttatgtttgtttaaaaaaatgatttttgtattataattatacacaaatcataaatattaaaaaggatctagtgtggcaagaattttggcatttgatataggaataagctctattggctgggcatttagtgaaaatgatgagttaaaagattgtggagttaggatttttacaaaggctgaaaatcccaaaacaggagaatccttagccttgccaagacgccttgcaagaagtgccagaaaacgccttgctagacgcaaagcaaggctaaatcacttaaaacatttaatcgcaaatgaatttaagttaaattatgaagattatcaaagctttgatgaaagtttagctaaggcttataaaggctctttaattagcccttatgagttaagatttagagctttaaacgagcttttaagtaagcaagattttgcaagagtgattttacatattgcaaaaaggcggtggctatgatgatattaaaaataatggtgatgaagaaaagagcgagattttaaaagctatcaagcaaaatgaagaaaaactagtaaattatcaaagtgtgggagagtatctttataaagagtattttcaaaaattcaaagaaaattccaaagaatttataaatgttagaaataaaaaagaaagttatgaacgctgcatagcgcaaagttttttaaaagatgaattaaagcttatttttcaaaaacaaagagaatttggcttttctttttcaaagaaatttgaagaagaagtgcttagtgtagcattttataaaagggctttaaaagatttttctcatttagtgggaaattgtagtttttttactgatgaaaaaagagcgccaaaaaattcgcctttagcttttatgtttgtagcacttacaagaattatcaatcttttaaacaatcttaaaaatactgaaggaattttatatacaaaagatgatttaaacacccttttaaatgaagttttaaaaaacggcactctaacttataaacaaacaaaaaagcttttgggcttaagcgatgattatgaatttaaaggagaaaaaggaacttattttattgagtttaaaaaatacaaagaatttataaaagccctaggtgagcataatttaagccaagataatttaaatgaaatagcaaaagatattactcttataaaagatgagattaaacttaaaaaggctttagcaaaatatgatttaaatcaaaatcaaattgatagtttaagcaaattggaatttaaagaccatttaaatataagttttaaagccttaaaacttatcactcctttaatgcttgaaggtaaaaaatacgatgaagcttacaatgagcttaatttaaaagtagcaatcaatgaagataaaaaagactttttacccgcatttaatgaaacttattacaaagatgaagtaactaatcctgtggttttaagggcgattaaagaatatagaaaggtcttaaatgccttacttaaaaaatacggtaaagtgcataaaataaacattgaattagcaagagaagtaggtaaaaatcacagccaaagagctaaaatagaaaaagagcaaaacgaaaactacaaggccaaaaaagacgccgaacttgaatgtgaaaaactaggcttaaaaataaatagcaaaaatattttaaaattaagattatttaaagaacaaaaagaattttgtgcttatagtggagaaaagattaaaattagtgatttgcaagatgaaaaaatgcttgaaattgatcacatttacccttattctagaagtttcgatgattcttatatgaataaagttttagtttttaccaagcaaaatcaagaaaaacttaatcaaaccccctttgaagcctttggcaatgatagtgcaaaatggcagaaaattgaagttttagcaaaaaatttacctactaaaaagcaaaaaagaattttagataaaaattacaaagacaaagagcaaaaagactttaaagatagaaatctaaacgatactcgctacatcgcaaggcttgttttaaactacactaaagattatttagattttttacctttaagcgatgatgaaaatacaaagttaaacgacacacaaaaaggctcaaaagtgcatgtagaagcaaaaagcggtatgcttacatcggctttaagacacacttggggctttagcgctaaggatagaaataaccatcttcatcacgccatcgatgcagtaattattgcttatgcaaacaactctatcgtaaaggctttttcagattttaaaaaagagcaagaaagcaacagtgcagaactttatgcaaaaaaaattagtgaattagattataaaaacaaaaggaagttttttgagccttttagtggttttaggcaaaaggttttagataaaattgatgaaatttttgtctcaaaacctgagagaaaaaagccaagtggagctttacatgaagaaacatttagaaaagaagaagaattctatcaatcatacggcggaaaagaaggagttttaaaagccctagagcttggtaaaatccgcaaagtaaatggtaaaatagttaaaaatggcgatatgtttagagtggatatttttaaacacaaaaagacaaataaattttatgccgtgccaatttatactatggattttgctttaaaagtattaccaaataaagccgtggtgcaaggtaaagataaaaagtcaggtcttataaaagattggattttaatggatgaaaattatgagttttgcttttctttatacaaagatagtttgattttaattcaaactaaagatatgcaagagccagaacttgtttattttaatgcttttacaagctctactgttagtttgattgtttcaaaacacgataataaatttgaaacgctaagcaaaaatcaaaaaatattgtttaaaaatgcaaatgaaaaagaagtaatcgcaaaaagcataggattcaaaatctaaaagtatttgaaaaatacatagtttcagcacttggagaagtgacaaaggctgagtttagacaaagagaagattttaaaaaatgagttacgatgaagcttttaaaacactgcttattagctctaatgccaagctaaatttagagttaaatcatcttgtgattaagcaagatgaaaatatagccaaattgtttttaaaagatataaatatcatcgttttagaaagcttacaagtaagcctgagttccgcactttttaacgcttttgcaaggcataaaatcatcttactaacctgcgatgaaactcatagtataaatggtgtttttactccttttttagggcattttcaaagtgcaaaaatcgcaaaagagcaaatgaatgtaagtgctcaaaaaaaggctattttatggcaaaaaatcattaaaaataaaatcctaaatcaagcctttgttttgaaaaaacacaataaaatagagcaaagcaatgagcttataaatttggctaaaaaagtaagcttaaatgatagtaaaaatatcgaagctgttgcggcggcgctttattttaaaactttgtttggcgtttctttttcaagagatgagctttgctttgaaaattctgctttaaattatggctatgcaatcattagagcttgtattattagagcagtttgtataagtgggcttttgccttggcttggcataaagcacgataatatttataattcttttgcgctttgcgatgatttgatagaagtgtttagggctagtgttgatgattgtgttttaaagcttaagggtgaaagtgagtttttaagcaaagatgataaaagagcgttgattggcaatttacaaagcaaaatcaattttgatgggcaaaattatcctttaaacagagcgataaatcattatgtggcaaattttaaaaatgctttattgtatgaagatgagctaaagatagtaaaatttgatgattgaagataaatttatgcgtgtgcttttgatgtttgatgtgccaactaaaagtaaaaaagaacaaaaactagcaagtaaatttagaaacaatcttataaaattgggttattttatgctacaatttagcgtttatatgcgtatttgcaagggtttaagttctgcaaaaagttctattgaaaatgtaaaaaagattttgccaccttatggaaatgtaagggctttaatcatcactgaaaagcagtttgataaaatggagcttttgcttggtggcatagtttttaacgaaaaagttaataacgaaaccaatgtaacgctttttgatatagatagtcatggagaatttaaatacaaaaattcaaataatgaagaaattcaaataaacaaaaaacaagaaaaatatcatcagcaaaatttatttgaattttaaaagcggttttaggggattgtaaccccgcagagtcccgcaaactctttattttagtccctttttaaatttcttatgagattatagcatgatttttgctattttttatcaaaaaatcccgaaattttcattatctggtaaatatctattttaccataaagaaatttaaaaagggactaaaactcttaatttcaacaataccacttattaaatattttaccataaagaaatttaaaaagggactaaaacttcccaatcgcaaagcaaaatccttttaacattttaccataaagaaatttaaaaagggactaaaacttcactccacccctgcttaagcattccaacattttaccataaagaaatttaaaaagggactaaaaccagtgtttcttattttattcttagctactaattttaccataaagaaatttaaaaagggactaaaactgaaaggttataaatgaaattagaaattatattttaccataaagaaatttaaaaagggactaaaataaaccctagtggattgaaactccgctagggctaattactccactaaaaggaggttgcgaatttgaaacttattgaaatttagggttgattaaaatcgaaataaaattatttaaataattttaaggcataaagataatatctactaaactttcattttctaacatttcacattcttttggcaccaccataagggcagctttattgttaagattgtttataatcgcactagagccttcttttttgccttcaagattggctaaaatgcgtccatttttaaactctatattgcaagcgacaaattccaaataaggtgtttttttcttgtaacttccttgtaaaaaggctttgcaaatatagtctttaggttgaagtaaccaagagtttaaaatctctcttgtgtaaagattaaacattaccatagccgagtaaggaaaacctggtaaggcgatgatgaatttttcattagccttagctattttgatatgtctacctggttttatgtcggctttatcgatgatgatttcgtattctttgatggctttttttaaaaagtcaaaatctcccatagaaaccccgcccgttgtaaccaaaatatcacaactttgcaaagcactttcaagggtggaaaaagtggctttctcatcatcttttaaaagaggaaaaacccttgtatcgcaatttaaatttttagctaaattagctatggcgatatgatttgaagagcggatttgagcaggattttccaaggcttctcctagatctttgatctcacttccactacttaaaacccctacaataggctttataaacacactaatgtgaaaaaatccaagttcagctaaaagagctatctcgctataatttaaccttgtgccttttttgagtaaaatttcatcttttttatagttttctcctaccgcacgcacggcaaaagcttggggaacttttttttctataaaaagagtattattttctatgcgtatattttcaacagggactaaagtatcgcttccttcgctcatgagtgagcctgtaaaggtttttacacaagtgccattttgtacgctaaattgtggcatagtacccgcaggtgtgaggcctaaaatttttaaaggcttgtcttgatcttcaaatttgatcgcataaccatccatagccgaggttggaaattcaggctgatttttaggggcttttatatcttgagctaaaatgcgtcctaaacactctgtaagagctattttttcaatcttttcataagttttgatatgagaatgtaaaatttttaaactttcttcataagacattagcattttttatccttttaaaagtcctgcaccgcaaagcttggttgatctttctttggcataaattctttctttgtttatcacatcatacttccaaatgggcgcacttgctttaaaatcttcaacaaattcattaagaagtttaagtcctaattttctttgtttgcttaaaattcctgcaaaatacgagctttcatgtatcgctacatcgcctatagagtgagcaaaaagcaagctaataccatcaaaatctactcttttttgccactcatcaaaccatttttttaaaagcgattcataaatatcaaaactaagtgcctcaatacctccttcttcacgcacaataccacaaaaagtcagtaaagcaccgcagtttttatccttggaaaattcataccattggctataaattttaggaatatctaaagagccttgataaagtgtaaaatgtttcatttagcctccacaaactggcggtaaaagtgctattttatcaccatcttttaacttggtgttttcatcaaaaatgatttcatcatttaaagatacagcacaaagttctagccattcttttaaactctcatctttttgcaaaatttcttttaattcttttaaattttttacttcaagttctaaattttctttatttatagggcctaaaaattccacttttaccattttattcctttacttctaaatttcccatcattcctaaatcttcatgttctaaaatatggcaatgatacattctaagtcctttaaaatcttgtttcattctaagtcttaactcttcattaggacgcacatttatagtatctctgaaggctctaaattcggctttttgaactttgccattgagttttgatgagatgagttcaaattgcgtgccgtgtatgtggaaaggatgatccatgtgagatttgtttatcactatccagtcttcaactactccaagcttggagcttaaatcaatgcgttttaaatcatagcttttgccattgattaaaaacatagacgcaagagcgatttttaattcattttcactttttcccatcattccatgcatttgcatatgatcttcactcatgattatttctttaaattccttaggttcttctaaaggtttgaaaatttttaaattttttggaagttctaatttttctttttttaggctaatactagctaaaaatagggtattagattcttcttttaccatcattttgtccctatcataataagcactttctagcttaaaattcccatcttttggagcgtcgattaaaacttctacacgagaagcaggacttaagaaaagttcttctttataaatagctttttctataagtccaccatcagtaccaacaagtataaacttagctccttgtatgcgtaaatttaaatatcttgctgcagtagcattataaatgcgtatgcgttcgtttgtggcgagtttgattttaggtttaaattgtccattgatgagtacaaattctccttctctaccatttagccaatcatttaggttgttgtttggaatttgagcgttttcatcaagacgcaaatcgctaatcatcaaatctttttcttttaaatgacttaaagcatctttttttgctttgatcacaaaagcccctgctaaacccataaaaacttgtttagaagccgtataatgaggatgtggatgataccagtaagttcctgcgctatcttgaggaatttcaaaacgatatattctttcttctcctgctaagataggatcatgtgggcttccatcttgatcaggtggcacaggaacgccatgccaatgtatagttgtagcttctttgagtttgtttttgactaaaatttcaagtttatctccttcaaaaacttctatttttggagcaggcacgaggccattgtaagtataaaataaggtttttttacctttgataagctctatatgattttctttgatttctagggtagcacgaaaaatatttttttctttactttcatttttgagtaaaggcaaggcttttaaaatttctccttgggggaattgttttggatctaaaagctttaaattttttggagcaaagtttataaaagaagtatctaagtcatgatttatagaatgatttttatgcatggagtgcatatcatgcataggatttgcataggctacacccatacttgctagagtgagtgcattaaattttaaaaaatttcttctattcattagtttttccttttgcttgattttttgtattatagtcattatttttttaactttagtaaatatttattttgaaaatttggtttaattttgttatgattttagcaatttaatcaaggaaaaataatgttttatgaaaaaattcaaaccccagcttatattttagaagaagataaattaagaaaaaattgtgagcttttagcaagtgttggcgaaaaaagtggtgctaaagtgcttttagctttaaaaggttttgctttttcaggagcgatgaaaattgttggagaatacttaaaaggttgtacttgtagcggactttgggaagcaaaatttgctaaagaatacatggataaagaaattcatacttattcgcctgcttttaaagaagatgaaataggtgaaatagccagcttatctcatcatatagtgtttaactctttagctcaatttcataaatttcaagctaaaacacaaaaaaattccttaggtcttcgttgtaatgttgaattttctctagccccaaaagaactttacaatccttgtggaagatactcaagacttggaattcgtgctaaagattttgaaaatgtggatttaagtaccatagaaggacttcattttcacgcactttgcgaagaaagtgctggtgctttagaagctgttttaaaggtttttgaagagaaatttggcaaatggatagggcaaatgaaatgggtgaattttggaggaggacatcacatcactaaaaaaggctatgatgttgaaaagcttattgctttgtgtaaaaatttcagtgataaatacggtgtgcaagtttatcttgaaccaggcgaagcggtgggttggcaaacaggaaatttggtggctagtgtagtagatatcatagaaaatgaaaaacaaattgctattttagatacttcaagcgaagcgcatatgccagatactatcatcatgccttatacaagtgaagttttaaatgctagaattttagccacaagagaaaatgaaaaaatttcagacttaaaagaaagcgaattttcctatttgcttactggaaatacttgtttagcgggtgatgtaatgggagaatacgcctttgataaaaagcttaaaatcggcgataaaattgtttttttagatcaaattcattacaccattgtgaaaaacacaacttttaatggtataagacttccaaatctcatgcttttaaatgcaaaaaatgaacttcaaatgataagagaattttcttataaggattattctttaagaaattagtattatttataatttgcataaaatgttaattttactcggaagagaatcaaagatgtaaattttatgcaaagtattttattttttcaaatataaaatcaactcaaatatctaattttcaatactttggtatgattttttaatattttaaatccttgtggaattttattgaaattcagtgatttttaaatcaaatagtattaagataaatcgatttaaaaatcggctttaaaatgaatattaggtatattttgcataatattcattcaagcaaaatttaaagctatttttgaaaattttgaatgcatggaagctttaatggatttggaaaaattaagattagctagaagtctttattatcaatgtctaggagagctttttgttttttcattttctgaagaaagattgtcaaaattacaagagtatttaaagacaatgcaagaatgtttatttgatgaaaatttaaaatcaaattttgatatcttgcttaagcatttagatgatgaaaattctatacaagcattttttaaagaatatgatttgctttttttaagtcttaaaaatagcattccaacgactttttcttacatagaagaaggttttgaaaattcaaatcctttactttgcgtgcgtcaaattttagtcaaaagtaaaataagacgcaatgaaaaattttttaaagaaagtgaagatagtgttggattttgtttattgttgatgagtgaatttttaaggcaaaatgaagatgatttagccaaagagctttttgaaaaagtgatcaataaaagcattgatgagtttttaggcgatgttttcatgaataaaaatgcgaatttatataaggaaattgcaagtattgcatcggcttttatggaatttgaaagactttgctttgaagtggaaaaacctgcaaaaataaattctaaaaaagtgcaaaacgatctatcgcgttcagaatttttaagaagagaagcaaataaacaaaggaggactcgtgaaaaatcgcagggaatttcttaaaaaatccgcttttgccttaggggctgctggagtgcttggtagcacaactttagctctagctaaagatgaagaaagaaaagatttagttaaaggtaaaagtaagaaaaaagaagtgctttttcaaagaagtgctaattgggaaaattattatataaaggctgagtaatgtcaagtgtaggtgaaaatatcaagcttacgcgtcgttcttttcttaaaatggcagcactttcaagcctagcaacaccgttgcttgctagaagtgaaactttaagagaagcgagtgctgatgagcttaaagaagcttatgaaggtagtaaaaaagtaaaaacagtttgtacagcctgttctgtaggctgtgggattattgcagaagtgcaaaatggtgtttgggtgcgtcaagaaatcgctcaagatcatcctgtgagttcaggtggacattgctgcaagggatctgatatgatcgatatggtgcgttcacatgtgcgtttaaaatatcctatgaaaaaagaaaatggagaatggaaacgcataagttatgagcaagctttaagtgagatcggagaaaaactagctgcttatcgtaaagaaaatcctgaaagtgttatgtttttaggttctgcaaaacttaataatgaacaagcttattatataagaaaatttgcagcattttttggaacgaacaatgtagatcatcaagctagaatttgacacagcgcaacagtcgccggtgtggcgaatacatttggttatggcgctatgacaaaccatcttggagacatccaaagaagtaaatgtatcattatcattggagcaaatccagcggtaaatcaccctgtgggttttagacatttcttaaaagcaaaagaaaaaggtgcaaagcttatcgttgtagatcctagatttacaaaaagtgcagcaaaagcggatatttatgcaagaattcgtccaggaactgacattgctttcatgtatggaatgttaaaaatcatttttgatgaaggcttggaagatacaaaatatcttgatgaaagagtttttggaattgataaaattcgtgaagaagcagcaaaatggacagttgaagaagtggaaaatgttacagggatctctaaagaacttttggtgcaaatcactcacgaagtagctaaaaacaaaccaactacgcttatttgggctatgggtttaactcaacatactgtaggaacttcaaatacacgtttagcacctattgtgcaaatggtacttggaaatataggtaaatttggtggtggagttaatatcttacgcggacacgataatgttcaaggtgcttcagatatggcttgtttgagcgaaaatttaccaggttattatcctttaaatgaagcgacttggagatactatgccaaaatttggggtgtggattatgagtggcttttaggaaattttgtaagcaaagattggatgcataaaactgggctttcacttgctagatggtgggcagcggctttaaatggaaaagatggaaatgatgctatcgataatgcaggaacgcctttaaaagctttagtagttatgggaaatggtattacttcgactgcacaacaagtaaaagttaaagaaggtttggaagctttagagcttttagttttagccgatccttttgtaaatgaagcagggattattgcagaaagaaaagatggaatttatcttttacctgcagcaacacagtttgaaacaagcggaagtgtaacagcaacaaatcgtagcggacaatggagatttaaagttgtagatccactttatgaaagcatggaagatcaagaaattttatttgagcttgctaaaaaattaggtttttatgaagactttaccaagactttacgcgatgaaaaaggtgagattgtttggcctgaaaatgcaacaagagaaattgcaaaagcagttagaagtatagggcttaatggttggagtcctgaaaggcttaaaaagcatactttatactgggataaatttgatgaggtaactttagaaggaaaagacgaagttgctggcgagtattacgggcttccttggccttgttggagtgataagcacccaggttctcctgtgctttataataccgacattgaagtagcaaaaggtggtatgggctttagaaacaattttggacttgaatatgaaggagagagtttacttgctaagaatgcacctttaaattcacctattgatacaggttatccacaaattactaaagataatatagaaaaagttttaggtattactttaagtgctcaagaaaa

SEQ ID NO: 3800 - DNA, 22481 bp, synthetic construct
  source 1..22481: mol_type = other DNA
  misc_feature 1..22481: note = Synthetic
aataccattttatggaacttctatagctcttatggaaaaagatcaggcaaaaagtgcttttgtttgcaatcttgtcagtcaagaaatttttgcttttaataacaaacaagcttttaaatccaatctttccgatccaaaatactcacccttaacacctaatctattttctaaaataggtatagttgaaaaaatttcactttatccagaacttctcgattttttaacaaaaaatcaattaaaatttcgctctttgggtacaacagccttaagtcttgcttatgcttcgtattttagttttgtattaattcttggaaaaacacgaatttttgatacaacagctgctttagcaattcatcaaaatttatatatagaaaaaaatgaaaatttccttctcctaagccaagacaaaaaaatttttgatataatcttagaatttttaaaaaataattaggtgaatatatgaattttgcagatattttttcaaaaataagaagacaacaacctagcgttaaagaagcgccaaatcactgggtaaagtgccaaagttgtcatgctttgatgtattataaagaaatagaatcttgttttaatgtttgtcctaaatgcaattatcacatgagaatttcagctgatgaacgtattaaacttttaagcgatgaaggcagttttattgagtatgatgcaaatttagaagctatagatcctttaaaatttgttgatagcaaatcctataaaaaacgccttagcgaaggtgaaagtaaaacaggtagaaaaagttctgtcatcagtggagaatgtgaaatcaatggtttaaaaacccaacttgttgtatttgatttttcttttatgggcggatctttaggttctgttgaaggagaaaaaattgttagagctatacaaagagctatcacaagcaaaacttctcttgtcatcgtaagtgcaagcggtggagctagaatgcaagaaagtacttattctttgatgcaaatgagcaaaactagtgctgcacttaaacttcttagcaaagaaaaacttccttatattagcattttaaccgatcctactatgggtggagtaagtgcttcttttgcttggcttggagatttaatcatcgctgaacctgaagctttagtaggttttgctggtgcaagagttattaaacaaactataggagcagatttacctgaaggttttcaaaaagcagagttcttgttagaacatggacttatagatgccatagttgaaagaggagaacaaaaacaatatcttagcgatgtactaaaattttttagtggaaaataatttgcaagttaatatcttttgtattcaaaaaagtgatgaatttaaaacttgtagtgagaaatactctaaactcatctccaaatacgccactttaaaagaaataaatgtttttaataaaaaaatagccttagctcaaaatttaaatgccatagaagcaaaaaaaagctatgaagaagcttttatgccttataaaaaaggctattgtatcgctcttgatgaaaaagggaaagatcttacaagtatagaatttgcaaaactcatccaagataaaaatgaattaagtttttttataggaggtgcttatggtttaagagaagaatttaatcaaagtttggattttagactatcattaagcaaacttactttagcacatcaatttgttaaaaccttacttttagaacaaatttatcgtgcattttgcatcaacaacaatcacccttatcacaaatagaaagttttaaaatgaaaaaaaatgaaatacaaaatttcaaaaatattttagaagaaagaaaaaaagctatcttagaaaatttgcaaagcaattcaaatgaaatcgaagctcttcacaatagcgtcccaagcgatagtgtagatttttctgtcatagaaacaggctctcaaattgactttgctatcagcaccaatctcaaagaagaacttatagaaatcgaagattctttagataaaatcaaaaacggcacttatggaatttgcgaatcttgcgatgatgaaatcgactctcaaagactaaaagtcaaacctcacgcaagatattgtatcacttgccgtcaaattgcagaacaaggaaaaaaacatgaaaattaaactcttcttacttgcaagttttatttatatagcacttatttttgcctttgcttggcatctagaactaggaagctatactctaaatatcagcacttatacctttgaactacctattatgatatggcttgttattcctttatttatttatatgattttagccgttttacacatagcattttatggatttttgcgttatttaaaatttaagcatttttttaaagacgcagctaaatttgaagcttatactcaagatttacttcttgaaaaagatcttaaaaccacttttcaaacaaaagaatttagatctgtagcacaactttttaaaaccataaaaacacatgaaaaaattccacactcaaataaaatcaatgaaattttagatcttattgatggtttaaataaaaacgaattttttaaccttagcaaatttaaactcgaaaataacaatgttttatatttgcaaaatgaaaaaaatcatctcaaaaatgatgcaaattatgcctataacaaacttaaaaaccttaatgaaatcaaagatgaatttgaagaaattgcttttaacactcttatagaaaaagctagttatgagcaaattaaaaatgtaaaaatccctaaaaagccttctgaagttctcacacttatcaagcgttttaaagaaggaaatttagaacttagtgtagcagaatatgaagttttactttcacacaacatattaagcgaaaaagactatcttaatgcagcaaaactaagtactaaacttttaaatcctgatgctattttaggaatttttaacaaaattaaaaatgaaaaaagcgaagctttaagagcatatttatatcttttggctgaatttggacttttagatgagttaagagaacaaattcacaatgatgataaaaaatttaatgattttaaagcctttttagccttgcgtgaaaaaaatatcaaaatcgatctaaatcaactcatacaatgatagattttagcaaaaaacccctgtttttagcccctatggcaggtttttcagatctgccttttcgtaatgtagtaaaaaaatttggtgctgatattaccataagtgaaatgataagttctaatgccttagtttatgaaagttctaaaactttacatatgctagaaagagctgaattagaaaatccctatatagtccaaattgcaggtggagataaagaagtgctaaaaaaagcagtgcaaatgctaaatgaaatggattttgtagatgggatcgattttaattgcggttgccctgtaaataaagttgttaaacaatgtgctggcagtgctttgctagaaaatttagagctttttaaaaatcttgtaggagtgattaaagaaaacaataaaaaaagccttacaagtgtgaaatttcgactaggatttaatgaaaaatatcctgaaaaaatggctaaaatttgtgaaagcttgggggtggattttgtaagtattcatggacgcacaagaaaacagctttatagcggaaaagccgattatgaatccattgctagtgctaaagcgagcgtgaaaattcctgtgattgcaaatggcgatattaacgcacaaaacgctaaagaagtttataaaatcacaaaatgtgatggactcatgatagggcgtgcaagcgtaggaaatccttggatattttatgaaatcaaaagcggtaaaagtgtagatgaaaaactcaaaaaagaaatcatactcactcattttgatgaaatgataaaacactacaaagatcaaggcgtaagtatatttcgcaagcatttacacgagtattctaaagggcataaagacgcttcagcctttagagataccgttaatcgtatcgacaatgtcgaagaaatgcgaaaaaaaatagaagaattttttagtttaacttgattgatttttataatttaaaaaatcttaagccttaatatctataatttttgctgaagtgttttgagaaagaattttattaaattcccctgcattatcattgctaaaattcataccaaaaagaatttctagctcatcgcttgtgccaaatttagtttctagtagttttcttaaaagctcattcattttattatcatctttgtaggtttcgcttttactttctacttgtataggtttgaaagcttttttgtcttcttctgaagtttcttgcaattttttctgcgatgaatcaatattgttaaaatcaacaaaatattttttttgaagctcaagatatttttctttaaattcatctatacttttgcttgtgtgaaaaattttaacataagcttcatcataactcacgccatcaatatgcatccaacgagggtgtttagcattttcatccatccattgaaataaatttttaacttctgattctggtaattcattgtttctaagcttatcttctattgaaccctcgactaattctattttatcgctgaattttttagaaatcttatacaaatctatcaaatcattacctaattcttctctttgtttttttgtaagctcgggatttccattttcaatactttcatctcttattttggtaagtgtttgcaaaggattgtttccaaaatatctattaaaagagcttagaggaaatactatcatctttatcaccttggaataaattttattctaaagtaaatcggcaaaaatgatttttttaatatttttactcatatatttaaaatataaagcgcaagtcttctagcccttgaaaaaaatcttacttaatcttccaaagtccttacaatcaaacttttaggtaaattaaaatgctctataagttctttctctttttctctcatttctccattatcattttcatgatcaaaacctaacaaatgaagcatagcgtggataaaaagcaagcttatttcttcttcatagctatgccctaactctttagccttttcttttgccaaatctacattgatcacaacagaacccaaaggcaaactctcatcgatattttcaagcggaaaagaaagtacatcagtagttttatcttgttttctttgctctaagttaatttcttgcatttctttactatccacaaagacaagctccacatctttaggacttaaaaaacttgctatagattctaaaaaatcacatttttcatcacttaatatcataaaccttccttaatcaaatgatataaattttctatttcttcatcatcaaaaatcgcacaatttttactgctataaaattgttttagttttttctcttcaaactcaaatcctaaagcacattgagaatgcgaaggtaaaaaagcccttagcagtgtaatggaattttggattttctcatcacaggcaaaacaaaaaaaatccttatgcaatcttccttcaaattccaaaatttttaaataagcatcaacaataacacgctttggattttgtttttcaaaccttttcacacactcatcaagtaaatcaaaataaaaactatcaagctcttctacatcttttaagtgcctatataaaagacggataaattcttgccaaataagcattttatccctttgcataatccataaaaatcccaaatgcaatacatctttaagtcttggtaaaaaactaggattttcttctaaagcaaagtcgattttatagccgcttaaaatactagaatgtctaagtccataaaaacgataagccttaataagcattttaggacttaaaatataaacaatcaaatcctcatctttaactttttgagtatgaagtataaagccttgcattaaacaatttcaataccataagccctaagtatatcaaaagcggatttttctaaattttcatcaaaacttgcacttaaattttggtgtaaaattatccttgcattaggcttagcaccaaaagctaaaataatattacaaaacacacaaatatgagaaacaagccctgcaaaatgaagttcttcataatcacttttttgtatgaaattagctaattctaagctaccaaaagtatttttataaaaaattttatgagctttttgtaaaaaaggttcaaattcctttggcatttgccaacccaaactctctttaatgcaatgttttacaggtaaatttaaaccttctttactttgtagataatgctcatcatgcgtatcataggttaaaagcaaatgcgtgttattaaaatcgatttgatttaaggctttaagaatattttctttgatttttaaagccttatcaaaacctaaacttccatcaataaaatcattttgataatccactaaaacaaaagcttttttcatgcttttatgccttttgaagccaaaaactttctgtgtgtaaatttgtaaaagcagtttttaagcttgtaaaaagcttaggatgatctttttctaaatttgctaaaagctgtttagcttcttctctagcgtgtggaaatttcacatttttttcgctgagtttcataccaggacaaaattcatttcctatcacgctaagttcattttgcgtagcattatccctaagctgtctttctcgcacaaaaatcaaagggcgtatcacagttataccgcgtttgctttgataaataggcgctaaggttcttaaagctccattatgaataaaattcataaaaaagctttctgctgcatcatctaaatgatgagctatagcaagcttgttaaaacctttttcaagagcgtaagtatataaagctccacgacgcattctcgaaaaataactacaaaaacttgaattttctcttatggtatcgcctgaaacttcataaatatttgaatcaagcacgctatgtttaatgccgtgttcttcacaatgtgcatgaagatgagaataatcctcgcccataccataactcaaagttaccgcttcaagttcaaatttaaaaggagcgtgagcttgcatacgatttaaaagatgggctaaagccaaagaatctttcccgccactaagccctaaaagaaccctatctccatctttaataagtccaaatttagcattagcttgtgcaacttggcgtatgagttttttgctaagatttatcataatttctcgcacattttaagcacaaaattggctgaaattttagctgaattgatcacaaactcatcaaaatcaaattcagccttttcccctgctttatcactcatagctcttaagataaaacaaggcacctttaaagcatcacaaaccaaagccacacttgcgccttccatttcacaagcatccgcattgaaaatttctctaatttttgctttttttgcttcatcgcaaataaactcatcacccgttgcaataatgcctgcacgaagtttgatatttaattccttagcaacttctaaagcaagattgtttaatttctcatcggttttgataaaaatttcattacctggaacaaaacccaaaggatgtccaaaagcagtaatatcaagatcgtattgagctaattttgttgcataaagcaaatcgccaatttcaagttcaggattaaaagcacctgcaactcctgtaaaaagcaaagcttgtgcgccaaatttttctatcatcacactagcactaagagtagaatttaccttgccaattttagaatacgctaaaacaagttcatggtttttatactttgcaaaataataagtattattagcgtgttctattttcgtataatctttaagtgtttcaagtaaaggagtgatttcttcactcatggctcctaaaattgctattttcatcatacaacctttaaaaattcatcaatatcattcatatttgttaaagcataagtttcttttgaagtgatttttttattcaaacccttaagcacacttgcgccaaattctatgaaataatctacttcattttcacatgccttaatgctttgtttataaagcacaggagagataagttgtacttttaaaagctcaagggcttcttctttgcttgtataaattttggcatttgcattagaaattacggctttaaaatttggttttaacaccttttcaagctccacacaaagcttagctgaagcattttccaaaagaggacaatgacttgccacgctcatatttaaaagcatagctcttttagctcctgcttctttaaatacactttcataacttgctaaatcaggttttaaacctgctacaacgatttgtccatcgcagttataatttgcagcgaaaatttgcttgttttctttttgtgctttttgacaaagctcttcaaccttttcatcatcaagccccaaaaccaccatcatacctgcttcaacttttgcacaatcttcttgcatgaaaagccctcttttattgaccaaagaaagagcctctaaaaaatcaaaagcaccattgacagctaaggctgaaaattctcccaaagaatgccctaaagcaaatttcgaacttaaatcaggttttttttcaagtaaaacactataagccattaaggaatttaaaacgatggcgggttgagtaaattcactttgattgagtttttcgttttcttcaaaaagcaaatgtttaaaatcaatcttacaaaaatcacttgcgttttgaaggagttctttggcttttatagagttttcataaaaatcttttcccatgccaagactttgagagccttgacctggaaatataaacgcagcattcattaatgacaaccgcaaccgccgccaccacagcaaccgccgccaccatgtccatgtccgtgatgatgatcgtgtccatgtccgcttccacaaccacaactatgacttcctgcgataatacctgtaagaatttcatcttcactcgcagctctagcatctacgatatttaaagaaaaaagcaaatcacgacctgcataaggatgattataatcaattgtcacatcattttcaccaatttcttttacagttacacgaacggtttcgccattttcaccttcgccaaaaagctccatacctacttttaaatcaatacctgcaaattgctcttttggtaaagtttgaacggcattttcatcgtattcgcctaaacctttttcttttttaattaccacatcagcattgctagggcaatcaagcttcatcacttcttcttctaagctttctaaaatctgacctttgcctaaaataaaagaaataggttgagaatataaatttgattctaaaacttcatttgtatttgcatcttttaactcataaaacattgaaactacactatttttttctatagccattttatctccttaatttattttctattaggtgaagcttttgcttcgggtgaatttggataattagtttttaaagctttataaaaaccatttgctgtttttgtatcacctgttttatccaatgaaatggcagtatgatataaaagttttgggaaataatctccttttgtactcaaagaagaactttttttataataaacaatagcattgttataatttttttgtttatactcgatctcccctaaccaaaaatttgctcttgcaggtttatactgctttgttatgagaaaatttaattttgctttggaatcttcaaaagcatttttatcaacatcttttatcgctaattctaaaatttcattattttttttctttttccaagattcatcaatttgttttgctttatcatcttgggtattttgagtattattgttttcaatggtactatttgaatctgtagttgaaacaacaacactaggtgtaatagttttaacgcttaaatttgcatcatttaattcgtttttagaaacataatttgcattaatagcatctactaaagaaccaaaaaggcgtggctatgatgatattaaaaataatggtgatgaagaaaagagcgagattttaaaagctatcaagcaaaatgaagaaaaactagtaaattatcaaagtgtgggagagtatctttataaagagtattttcaaaaattcaaagaaaattccaaagaatttataaatgttagaaataaaaaagaaagttatgaacgctgcatagcgcaaagttttttaaaagatgaattaaagcttatttttcaaaaacaaagagaatttggcttttctttttcaaagaaatttgaagaagaagtgcttagtgtagcattttataaaagggctttaaaagatttttctcatttagtgggaaattgtagtttttttactgatgaaaaaagagcgccaaaaaattcgcctttagcttttatgtttgtagcacttacaagaattatcaatcttttaaacaatcttaaaaatactgaaggaattttatatacaaaagatgatttaaacacccttttaaatgaagttttaaaaaacggcactctaacttataaacaaacaaaaaagcttttgggcttaagcgatgattatgaatttaaaggagaaaaaggaacttattttattgagtttaaaaaatacaaagaatttataaaagccctaggtgagcataatttaagccaagataatttaaatgaaatagcaaaagatattactcttataaaagatgagattaaacttaaaaaggctttagcaaaatatgatttaaatcaaaatcaaattgatagtttaagcaaattggaatttaaagaccatttaaatataagttttaaagccttaaaacttatcactcctttaatgcttgaaggtaaaaaatacgatgaagcttacaatgagcttaatttaaaagtagcaatcaatgaagataaaaaagactttttacccgcatttaatgaaacttattacaaagatgaagtaactaatcctgtggttttaagggcgattaaagaatatagaaaggtcttaaatgccttacttaaaaaatacggtaaagtgcataaaataaacattgaattagcaagagaagtaggtaaaaatcacagccaaagagctaaaatagaaaaagagcaaaacgaaaactacaaggccaaaaaagacgccgaacttgaatgtgaaaaactaggcttaaaaataaatagcaaaaatattttaaaattaagattatttaaagaacaaaaagaattttgtgcttatagtggagaaaagattaaaattagtgatttgcaagatgaaaaaatgcttgaaattgatcacatttacccttattctagaagttttgatgattcttatatgaataaagttttagtttttaccaagcaaaatcaagaaaaacttaatcaaaccccctttgaagcctttggcaatgatagtgcaaaatggcagaaaattgaagttttagcaaaaaatttacctactaaaaagcaaaaaagaattttagataaaaattacaaagacaaagagcaaaaagactttaaagatagaaatctaaacgatactcgctacatcgcaaggcttgttttaaactacactaaagattatttagattttttacctttaagcgatgatgaaaatacaaagttaaacgacacacaaaaaggctcaaaagtgcatgtagaagcaaaaagcggtatgcttacatcggctttaagacacacttggggctttagcgctaaggatagaaataaccatcttcatcacgccatcgatgcagtaattattgcttatgcaaacaactctatcgtaaaggctttttcagattttaaaaaagagcaagaaagcaacagtgcagaactttatgcaaaaaaaattagtgaattagattataaaaacaaaaggaagttttttgagccttttagtggttttaggcaaaaggttttagataaaattgatgaaatttttgtctcaaaacctgagagaaaaaagccaagtggagctttacatgaagaaacatttagaaaagaagaagaattctatcaatcatacggcggaaaagaaggagttttaaaagccctagagcttggtaaaatccgcaaagtaaatggtaaaatagttaaaaatggcgatatgtttagagtggatatttttaaacacaaaaagacaaataaattttatgccgtgccaatttatactatggattttgctttaaaagtattaccaaataaagccgtggtgcaaggtaaagataaaaagtcaggtcttataaaagattggattttaatggatgaaaattatgagttttgcttttctttatacaaagatagtttgattttaattcaaactaaagatatgcaagagccagaatttgtttattttaatgcttttacaagctctactgttagtttgattgtttcaaaacacgataataaatttgaaacgctaagcaaaaatcaaaaaatattgtttaaaaatgcaaatgaaaaagaagtaatcgcaaaaagcataggaattcaaaatctaaaagtatttgaaaaatacatagtttcagcacttggagaagtgacaaaggctgagtttagacaaagagaagattttaaaaaatgagttacgatgaagcttttaaaacactgcttattagctctaatgccaagctaaatttagagttaaatcatcttgtgattaagcaagatgaaaatatagccaaattgtttttaaaagatataaatatcatcgttttagaaagcttacaagtaagcctgagttccgcactttttaacgcttttgcaaggcataaaatcatcttactaacctgcgatgaaactcatagtataaatggtgtttttactccttttttagggcattttcaaagtgcaaaaatcgcaaaagagcaaatgaatgtaagtgctcaaaaaaaggctattttatggcaaaaaatcattaaaaataaaatcctaaatcaagcctttgttttgaaaaaacacaataaaatagagcaaagcaatgagcttataaatttggctaaaaaagtaagcttaaatgatagtaaaaatatcgaagctgttgcggcggcgctttattttaaaactttgtttggcgtttctttttcaagagatgagctttgctttgaaaattctgctttaaattatggctatgcaatcattagagcttgtattattagagcagtttgtataagtgggcttttgccttggcttggcataaagcacgataatatttataattcttttgcgctttgcgatgatttgatagaagtgtttagggctagtgttgatgattgtgttttaaagcttaagggtgaaagtgagtttttaagcaaagatgataaaagagcgttgattggcaatttacaaagcaaaatcaattttgatgggcaaaattatcctttaaacagagcgataaatcattatgtggcaaattttaaaaatgctttattgtatgaagatgagctaaagatagtaaaatttgatgattgaagataaatttatgcgtgtgcttttgatgtttgatgtgccaactaaaagtaaaaaagaacaaaaactagcaagtaaatttagaaacaatcttataaaattgggttattttatgctacaatttagcgtttatatgcgtatttgcaagggtttaagttctgcaaaaagttctattgaaaatgtaaaaaagattttgccaccttatggaaatgtaagggctttaatcatcactgaaaagcagtttgataaaatggagcttttgcttggtggcatagtttttaacgaaaaagttaataacgaaaccaatgtaacgctttttgatatagatagtcatggagaatttaaatacaaaaattcaaataatgaagaaattcaaataaacaaaaaacaagaaaaatatcatcagcaaaatttatttgaattttaaaagcggttttaggggattgtaaccccgcagagtcccgcaaactctttattttagtccctttttaaatttcttatgagattatagcatgatttttgctattttttatcaaaaaatcccgaaattttcattatctggtaaatatctattttaccataaagaaatttaaaaagggactaaaacaaaccctagtggattgaaactccgctagggctaattactccactaaaaggaggttgcgaatttgaaacttattgaaatttagggttgattaaaatcgaaataaaattatttaaataattttaaggcataaagataatatctactaaactttcattttctaacatttcacattcttttggcaccaccataagggcagctttattgttaagattgtttataatcgcactagagccttcttttttgccttcaagattggctaaaatgcgtccatttttaaactctatattgcaagcgacaaattccaaataaggtgtttttttcttgtaacttccttgtaaaaaggctttgcaaatatagtctttaggttgaagtaaccaagagtttaaaatctctcttgtgtaaagattaaacattaccatagccgagtaaggaaaacctggtaaggcgatgatgaatttttcattagccttagctattttgatatgtctacctggttttatgtcggctttatcgatgatgatttcgtattctttgatggctttttttaaaaagtcaaaatctcccatagaaaccccgcccgttgtaaccaaaatatcacaactttgcaaagcactttcaagggtggaaaaagtggctttctcatcatcttttaaaagaggaaaaacccttgtatcgcaatttaaatttttagctaaattagctatggcgatatgatttgaagagcggatttgagcaggattttccaaggcttctcctagatctttgatctcacttccactacttaaaacccctacaataggctttataaacacactaatgtgaaaaaatccaagttcagctaaaagagctatctcgctataatttaaccttgtgccttttttgagtaaaatttcatcttttttatagttttctcctaccgcacgcacggcaaaagcttggggaacttttttttctataaaaagagtattattttctatgcgtatattttcaacagggactaaagtatcgcttccttcgctcatgagtgagcctgtaaaggtttttacacaagtgccattttgtacgctaaattgtggcatagtacccgcaggtgtgaggcctaaaatttttaaaggcttgtcttgatcttcaaatttgatcgcataaccatccatagccgaggttggaaattcaggctgatttttaggggcttttatatcttgagctaaaatgcgtcctaaacactctgtaagagctattttttcaatcttttcataagttttgatatgagaatgtaaaatttttaaactttcttcataagacattagcattttttatccttttaaaagtcctgcaccgcaaagcttggttgatctttctttggcataaattctttctttgtttatcacatcatacttccaaatgggcgcacttgctttaaaatcttcaacaaattcattaagaagtttaagtcctaattttctttgtttgcttaaaattcctgcaaaatacgagctttcatgtatcgctacatcgcctatagagtgagcaaaaagcaagctaataccatcaaaatctactcttttttgccactcatcaaaccatttttttaaaagcgattcataaatatcaaaactaagtgcctcaatacctccttcttcacgcacaataccacaaaaagtcagtaaagcaccgcagtttttatccttggaaaattcataccattggctataaattttaggaatatctaaagagccttgataaagtgtaaaatgtttcatttagcctccacaaactggcggtaaaagtgctattttatcaccatcttttaacttggtgttttcatcaaaaatgatttcatcatttaaagatacagcacaaagttctagccattcttttaaactctcatctttttgcaaaatttcttttaattcttttaaattttttacttcaagttctaaattttctttatttatagggcctaaaaattccacttttaccattttattcctttacttctaaatttcccatcattcctaaatcttcatgttctaaaatatggcaatgatacattctaagtcctttaaaatcttgtttcattctaagtcttaactcttcattaggacgcacatttatagtatctctgaaggctctaaattcggctttttgaactttgccattgagttttgatgagatgagttcaaattgcgtgccgtgtatgtggaaaggatgatccatgtgagatttgtttatcactatccagtcttcaactactccaagcttggagcttaaatcaatgcgttttaaatcatagcttttgccattgattaaaaacatagacgcaagagcgatttttaattcattttcactttttcccatcattccatgcatttgcatatgatcttcactcatgattatttctttaaattccttaggttcttctaaaggtttgaaaatttttaaattttttggaagttctaatttttctttttttaggctaatactagctaaaaatagggtattagattcttcttttaccatcattttgtccctatcataataagcactttctagcttaaaattcccatcttttggagcgtcgattaaaacttctacacgagaagcaggacttaagaaaagttcttctttataaatagctttttctataagtccaccatcagtaccaacaagtataaacttagctccttgtatgcgtaaatttaaatatcttgctgcagtagcattataaatgcgtatgcgttcgtttgtggcgagtttgattttaggtttaaattgtccattgatgagtacaaattctccttctctaccatttagccaatcatttaggttgttgtttggaatttgagcgttttcatcaagacgcaaatcgctaatcatcaaatctttttcttttaaatgacttaaagcatctttttttgctttgatcacaaaagcccctgctaaacccataaaaacttgtttagaagccgtataatgaggatgtggatgataccagtaagttcctgcgctatcttgaggaatttcaaaacgatatattctttcttctcctgctaagataggatcatgtgggcttccatcttgatcaggtggcacaggaacgccatgccaatgtatagttgtagcttctttgagtttgtttttgactaaaatttcaagtttatctccttcaaaaacttctatttttggagcaggcacgaggccattgtaagtataaaataaggtttttttacctttgataagctctatatgattttctttgatttctagggtagcacgaaaaatatttttttctttactttcatttttgagtaaaggcaaggcttttaaaatttctccttgggggaattgttttggatctaaaagctttaaattttttggagcaaagtttataaaagaagtatctaagtcatgatttatagaatgatttttatgcatggagtgcatatcatgcataggatttgcataggctacacccatacttgctagagtgagtgcattaaattttaaaaaatttcttctattcattagtttttccttttgcttgattttttgtattatagtcattatttttttaactttagtaaatatttattttgaaaatttggtttaattttgttatgattttagcaatttaatcaaggaaaaataatgttttatgaaaaaattcaaaccccagcttatattttagaagaagataaattaagaaaaaattgtgagcttttagcaagtgttggcgaaaaaagtggtgctaaagtgcttttagctttaaaaggttttgctttttcaggagcgatgaaaattgttggagaatacttaaaaggttgtacttgtagcggactttgggaagcaaaatttgctaaagaatacatggataaagaaattcatacttattcgcctgcttttaaagaagatgaaataggtgaaatagccagcttatctcatcatatagtgtttaactctttagctcaatttcataaatttcaagctaaaacacaaaaaaattccttaggtcttcgttgtaatgttgaattttctctagccccaaaagaactttacaatccttgtggaagatactcaagacttggaattcgtgctaaagattttgaaaatgtggatttaagtaccatagaaggacttcattttcacgcactttgcgaagaaagtgctggtgctttagaagctgttttaaaggtttttgaagagaaatttggcaaatggatagggcaaatgaaatgggtgaattttggaggaggacatcacatcactaaaaaaggctatgatgttgaaaagcttattgctttgtgtaaaaatttcagtgataaatacggtgtgcaagtttatcttgaaccaggcgaagcggtgggttggcaaacaggaaatttggtggctagtgtagtagatatcatagaaaatgaaaaacaaattgctattttagatacttcaagcgaagcgcatatgccagatactatcatcatgccttatacaagtgaagttttaaatgctagaattttagccacaagagaaaatgaaaaaatttcagacttaaaagaaagcgaattttcctatttgcttactggaaatacttgtttagcgggtgatgtaatgggagaatacgcctttgataaaaagcttaaaatcggcgataaaattgtttttttagatcaaattcattacaccattgtgaaaaacacaacttttaatggtataagacttccaaatctcatgcttttaaatgcaaaaaatgaacttcaaatgataagagaattttcttataaggattattctttaagaaattagtattatttataatttgcataaaatgttaattttactcggaagagaatcaaagatgtaaattttatgcaaagtattttattttttcaaatataaaatcaactcaaatatctaattttcaatactttggtatgattttttaatattttaaatccttgtggaattttattgaaattcagtgatttttaaatcaaatagtattaagataaatcgatttaaaaatcggctttaaaatgaatattaggtatattttgcataatattcattcaagcaaaatttaaagctatttttgaaaattttgaatgcatggaagctttaatggatttggaaaaattaagattagctagaagtctttattatcaatgtctaggagagctttttgttttttcattttctgaagaaagattgtcaaaattacaagagtatttaaagacaatgcaagaatgtttatttgatgaaaatttaaaatcaaattttgatatcttgcttaagcatttagatgatgaaaattctatacaagcattttttaaagaatatgatttgctttttttaagtcttaaaaatagcattccaacgactttttcttacatagaagaaggttttgaaaattcaaatcctttactttgcgtgcgtcaaattttagtcaaaagtaaaataagacgcaatgaaaaattttttaaagaaagtgaagatagtgttggattttgtttattgttgatgagtgaatttttaaggcaaaatgaagatgatttagccaaagagctttttgaaaaagtgatcaataaaagcattgatgagtttttaggcgatgttttcatgaataaaaatgcgaatttatataaggaaattgcaagtattgcatcggcttttatggaatttgaaagactttgctttgaagtggaaaaacctgcaaaaataaattctaaaaaagtgcaaaacgatctatcgcgttcagaatttttaagaagagaagcaaataaacaaaggaggactcgtgaaaaatcgcagggaatttcttaaaaaatccgcttttgccttaggggctgctggagtgcttggtagcacaactttagctctagctaaagatgaagaaagaaaagatttagttaaaggtaaaagtaagaaaaaagaagtgctttttcaaagaagtgctaattgggaaaattattatataaaggctgagtaatgtcaagtgtaggtgaaaatatcaagcttacgcgtcgttcttttcttaaaatggcagcactttcaagcctagcaacaccgttgcttgctagaagtgaaactttaagagaagcgagtgctgatgagcttaaagaagcttatgaaggtagtaaaaaagtaaaaacagtttgtacagcctgttctgtaggctgtgggattattgcagaagtgcaaaatggtgtttgggtgcgtcaagaaatcgctcaagatcatcctgtgagttcaggtggacattgctgcaagggatctgatatgatcgatatggtgcgttcacatgtgcgtttaaaatatcctatgaaaaaagaaaatggagaatggaaacgcataagttatgagcaagctttaagtgagatcggagaaaaactagctgcttatcgtaaagaaaatcctgaaagtgttatgtttttaggttctgcaaaacttaataatgaacaagcttattatataagaaaatttgcagcattttttggaacgaacaatgtagatcatcaagctagaatttgacacagcgcaacagtcgccggtgtggcgaatacatttggttatggcgctatgacaaaccatcttggagacatccaaagaagtaaatgtatcattatcattggagcaaatccagcggtaaatcaccctgtgggttttagacatttcttaaaagcaaaagaaaaaggtgcaaagcttatcgttgtagatcctagatttacaaaaagtgcagcaaaagcggatatttatgcaagaattcgtccaggaactgacattgctttcatgtatggaatgttaaaaatcatttttgatgaaggcttggaagatacaaaatatcttgatgaaagagtttttggaattgataaaattcgtgaagaagcagcaaaatggacagttgaagaagtggaaaatgttacagggatctctaaagaacttttggtgcaaatcactcacgaagtagctaaaaacaaaccaactacgcttatttgggctatgggtttaactcaacatactgtaggaacttcaaatacacgtttagcacctattgtgcaaatggtacttggaaatataggtaaatttggtggtggagttaatatcttacgcggacacgataatgttcaaggtgcttcagatatggcttgtttgagcgaaaatttaccaggttattatcctttaaatgaagcgacttggagatactatgccaaaatttggggtgtggattatgagtggcttttaggaaattttgtaagcaaagattggatgcataaaactgggctttcacttgctagatggtgggcagcggctttaaatggaaaagatggaaatgatgctatcgataatgcaggaacgcctttaaaagctttagtagttatgggaaatggtattacttcgactgcacaacaagtaaaagttaaagaaggtttggaagctttagagcttttagttttagccgatccttttgtaaatgaagcagggattattgcagaaagaaaagatggaatttatcttttacctgcagcaacacagtttgaaacaagcggaagtgtaacagcaacaaatcgtagcggacaatggagatttaaagttgtagatccactttatgaaagcatggaagatcaagaaattttatttgagcttgctaaaaaattaggtttttatgaagactttaccaagactttacgcgatgaaaaaggtgagattgtttggcctgaaaatgcaacaagagaaattgcaaaagcagttagaagtatagggcttaatggttggagtcctgaaaggcttaaaaagcatactttatactgggataaatttgatgaggtaactttagaaggaaaagacgaagttgctggcgagtattacgggcttccttggccttgttggagtgataagcacccaggttctcctgtgctttataataccgacattgaagtagcaaaaggtggtatgggctttagaaacaattttggacttgaatatgaaggagagagtttacttgctaagaatgcacctttaaattcacctattgatacaggttatccacaaattactaaagataatatagaaaaagttttaggtattactttaagtgctcaagaaaaagaaaaaatgggatcaacttggtcttatgatgatagcaatatcatagcaactaaatgtatagaaaaaggcatagttccttatggaaatgctaaagctagagctgtagtttggacttttaaagataaaattccactccaccgtgagcctttacattctccaagaaacgatttggtgcaaaaatatccaagttttgaagatcaaaaagcgctttaccgcgtggatactaaatttgtttctgtgcaacaagctaaggattattctaaagaattcccgcttaatcttgttactgcaagacttgtgaatttaaatggtgcaggtatggaaaatagagcatctatgtatctaacgcgtttaacacctgaaatgttttgtgagatcaatcctgaattagcaaaagagcaagacattaaag

SEQ ID NO: 3801 - DNA, 22463 bp, synthetic construct
  misc_feature 1..22463: note = Synthetic
  source 1..22463: mol_type = other DNA
aatttagcaatttcttgagctgaactcatatctgtatcgctatgttctatgccataaagatttttaagatctgcccaagtatccttccaatttgcccaagtatcaggcatagctaaagaatttaccctaccttctgcttgcgcagctttaatcaaattctcatcaatagcttgtgaatttgaaaacaataaggcaacaagacctaaacttaagaaaaatttcttactcatttttttcctttcaaaaaatattttgaaaatttaatgagttttagaaacattttagaaacaagttaatttttaagcaaacaaggttataattttaaagtcataaacaaggagcgatcatgctttatatttatatcaaaactcaaaatgctttagttcaaagaatcaattttaatctcgatagtcaagaactaccacaaaatattttatggattgatttacttcatccaagtgcagcagaaattgcttttatatcaagtgaatttaatcttgagtttcctacaaaagaagaaagggaagaaatagagcttagcgcaaaatattgggaagataatgcaacaataaccatcaatgctcattttttagtaagagatcttaaaagtgatgaagaagatagaaatttaatcaagcttcgcacagaaattgttacttttgctaccgctaaaaatatcttatttactataagatataacgaatttagcacttttgaagaaattcaagcaaggattttagctagtccgaagaattttgaagatggttttgatattattgataaaatgtttgaagtacgcgttgaaaaagatgcggatttactagaatggatagataaagaagcaagacgcttaagaacaagtgttttagaaaaaaaagatgaatatagttatgatgaaatgctaaaggatatttcaagtttgcaagagcttaatatgcgcgtaagagattctttatttgataagcgtcgcgctatgacttctttgttaaaaagcgataaaatcgataaagacataaaacaaaatctcactatagttttaaaagacttaaattctttggttgaatttagcgtttcgcaacttaatatcttagataatatccaaaccattttagccagtcaaatcaacatagaacaaaacaaaatcattaaaattttcaccgttgcaactgttgccatgatgccacctactttaataggaactgtttatggtatgaattttaaattcatgcccgaacttgaacttcactatgcttatcccatagtgcttggcgtgatggtaatttctatcattttacctttggttgttttcaagaaaaaaggatggttataaaaatttattaaggagaaacaatggatacaataaacataggaattttaaccctaagcgatagagcaagtagtggtatatacgaagataaagccactgctgaaattgaaagagtgttaaattcatatataaaaaatgatattatttatcataaagaattaatccctgatgattatgatttgatcattaaaaaattactttatctagcagatgaaaaaaaatgcgatttgattgttacaagcggaggtacaggtccagcacttcgtgatgtaaccccagaagccacggaagccgtgtgtgataaaatgatgccaggttttggagaacttatgcgcttagaaagtttaaaatatgtcccaacagctatactttcaagacagagtgcaggaattcgcaataaatcttttatcattaatttaccaggaaatcctaaggctataaaagaatgcctagagcctgtttttccggctataccttactgtatcgatttgatagaaggtgcttatatagaagcaaatgatgaagttattaaggtttttcgccctaagaaaaaatgtcaaaattaaaatttattagctctgataagtctgcttaattgtctagcaagcagacttgccgaagcttcatctttgcttatcttttgcactttatttttaaacttacaaagtctgtcatctaaaatcacatcattgattggaattttaggcttttctttttgtttttgtgaaatctttttcttaaaaaacattctttaatccttttttataaatatataccaacttagttgaaaagaatattattttagattttaaactattaactttatttcattattttaagctagaattcgcaaaaaactaatcaaggaaaaataatgactttaattgcaattttatgtctttacacagcacttttatcttggatttcctatgctcaaattcgtttcttagaaagagaaaaagacaaacaagctcaaattttaagcgaaaaagactatcaaaatgcagcagatattgccatcgaaaatgaaaaatttaaactattttccaatttttataatttaatcatcagtattgcatggataggttttggatttttataccttaaagaattacttatcttaaacaacactcgttttgaaaatactttatttttattatcttttttaataatcacaagtattttaaatctacctttaagtatttatgaaagttttatcaaagataaagcccatggtttttcaaatatgactgtaaaactttttatcaaagatactatgaaaagtcttattttaactttaatatttggatttttaatcctttatactttgcttttttgctatgatttttttggaactttttggtggattgcggcctttatttttgccttttgtattatagtgattataaatctcatctaccctaccttaatagcacctatttttaataaaatgaaaaaactagacgatgaaaatttgctgaaaaaaatcagctctttgatgaaacaatgtgggtttagtgcaaatggggtttatgttattgatgcaagcaaaagagataagcgtttaaatgcttattttggtggactttttaaaagcaaaagagtggtgctttttgatacattattaaaagccttaaatgaaagagaacttttagctgttttaggacatgagcttggacattttgttcataaggatattatcaaagctttatttaacggcgctataactatgtttttacttttttttgtttttgcaaatttacctgaatttgtttacttagaaagtcatctagaaggagtaaatggtggcgtgtttgctcttttgtttatcttggcgaatatttttagctttttaatctctcctatgcttaatgccttaagtagaaaaaatgaatttgcagctgatcaacacggagctaaagttacaagcaaagaagatatgaaaaatgcattgatagctctagcaagagaaaataaagcttttatcaaaacaagtaaaatatatacatttttttatctcagtcatccaagtattagtgatagaatcaaggctctttcttgactataaaaaatgctcttatggaagctaaatctagcttaaaaggttatgaaaatgaagcggtatttatactttgcgaatatctaaaaaaagataaagcttggttatttttaaaccaagatataaaaatagatcatgaaccttattttgagcttataaagcgttttaaatctggagaaccttttgaatatatatttgaaaaagtggatttttggggcttagaatttaagataaaaaaaggcattctaatccctcgctacgatagtgaaattttactttttcaaattttaaatttatgcaaaaaaaatacttttaatgggattttagaaataggatttggaagcggaattttaagcattgttttagccaaagaacttgggttaaaaatcacagcctgtgatatcaatcccaaagccttagaattagctttagagaatgcccaattacacaaagtcgatcacttgattgactttaaactttgtaattttaagcaaattaaagaaaattatgattttattttttcaaatccaccttatattaaaaattcatatcctatagatatttgggtgcaaaaagaacccaaagaggctttatttggcggagaaaaaggatatgaaattctagaagaaatcatacatttttcccttgataaaaaagttaaatttttagcttgcgaatttggctatgatcaaaaagaaattttggaaaaaattttatatcaaaataatttcattgttgattttttcaaagatgaacaaggttataatcgtgcttttatagctaaatttacaaatatgcgttatgataaaaaataaaaggagaaactcttgaaagctgttaatttatttttacttgcctccatcataggggttgaactcatactaggaatagttgttgcaccaacaattttttttcctcaaaatcttataggagaaggagtgttgagccattttcaaagtggcttaatgatgacgcaaatttttattaagatgggatatttgctgatttttgtttcagtggttaattttttatatgaaatttattctcttataaaagatgaaatgaaatttcaaataaaattttcaaaatttatgctgagtttgcttattttgattttaagcttaatatttgttttttattttactaataccataattgaactccaaaacttaggcgaaaacgctacaaaaactcaagaatttatcagtatccataatgcaagtgaagtggtgattaaaatcatcttgataatgcaagtttttttatatttcttaagctttaaaatagcaaaaaaatgataaaatattaaataaatccaaaagagaaggagtaggccatgatgatctctgatgcaactatgatgcaacaaaattattatttaaataatgcacaaaaagctagcgataaagctttagaaaatattgcagctgttcgcgcaataagtggagttgatagtgctaatttagctattgctgattctttaagatctcaatcaagcactatagatcaaggtgtcgcaaatgcttatgatgctataggggttttacaaattgcagatgctagccttaccaatatctctcaaagcgcagatagacttaatgaactttcagtaaaaatgaacaatgctgcacttaatgattctcaaaaaggaatgctaagaacagaagcaacacgcatacaagaatccatcaatgattcttttaataatgcaacttataatggaaaaaatgtctttcaaactatgaattttgtagtaggtagcggaactgaaactacaaatttaaatccattagcaacagatggattaagcatagatagtcaagatagtattacaaattttatggatcaacttggaagtttaagaagtgaaataggctcaggtatcaatgccatcacatcaaatattaatgcaagtgttcaaaatagcatcaactcaaaagcagctgaaaataatttactaaataatgacatggcaaaaaatgtcaatgattttaatgccaattatctaaaagaaaatgctgctgcttttgttgctgcgcaatccaacatgcagcttcaaagcaaaattgctaatttattacaataaaataagccctaaatagggcttattttttatcaaaatgactttagagcaaattttagaaaaaaccaaaaacgttcgtcttgtagccgcaagcaagtatgtcgatgcaagtataattgaaaagctttttgatcaaggtatagtagaatttggagaaaatcaagtccaagctctagcacaaaaaaaagaaaatcttgatgaaaaaaaactagacataaagtggcattttataggaacgctacaaagcaacaaaatcaatctcttaatcaaacaaaaacctatattatggcactcttgcaatggtattaaaatagctaaagctatggacaaaagacttgattataaattaaatactttattagaaatcaatagtgcaaatgaaaatagcaaaagcggtctagatccaaatcaagccgtagaagaatatttacaaatacaagaagaatgctctaatttaaatctttgtggcgtaatgagcataggatcacacagccaagataaagaaaatattataaaaagctttgaaactacatttaaaatttatgaaattcttcaaaaacatggggctaagatttgctctatggggatgagtaatgattttgaaattgctataaaatgcggatccaacttggtaagactcggaagcattttatttaaaaatcttaagtaaaacaatcttacttaagcatatttattagaaatttcctctacattttatattataattctgtcaaacaatattttgacttagaggggtttttaccccaaagctaaattaatttagcttccttcctaacttttatatttatgagggatattgaaaaatatccctctaagtcaaaaattaatataactttattaattctttataattatacaagccttgtttaagcttgtataatattgttatttttttaaagtagctttttaaactgttctagagcatcaagtttttcccaaggatagtccttttgtcctacttgcccacgagctgctacatccgcataaagaaaagtttctttacttggtttatccagatgaaatttatcacggatccaatttggcgttaaagagaaattttgcattacaaaatcacttaaaacatcgtcatttacactggtatttgtgcccatacaatccacgcttaccgaagtaggttttgcaacacctatagcataactaagttgaactatacattttttagcaagccctgctgcaactatgtttttagctaaccatctacctgcataaagtccacttctatcaactttagtataatctttgctcgattgtgcgccaccacctattggagaataacctccaaaactatctactataagttttcttcctgttaaaccactatcatgtaaagaagaatgattaacatatttaccagttggattgattaaaattctagtcttattaggatcaaaaagttcttttggtaaattactatctaagataagtttcatcactaaagatcttaaatcttctattttcatactttcaacacaaggtgcagaaactactatagtatgaatactttgcggtttacaattttcaaaattcgccttagtgccataatctatagtcacttgagttttaatatccactccaagttcatgtggatttgcttttgcataagcataaactctatcacatagcattcttgcataactaatagctgctggcatatattcctcagcttcacaacttgcaaaaccaaacataatgccttgatcacctgctcctgtttcgccatcttcttgatcgacaccttggttgatatcagggctttgttcatttaaaaacaccataacatcaacctcatcaggatgtaaacactgctctttgctaaaatggcctgctccgtcataaccaatgttttttaaaacatctttaactaaattatcgtaatcagctttactaagtttgtgatttgacttaacttcgcctcctatcacaaccttatttcctgcgacaaaaacctcactcgccacccttgaatttttgtcatttttcaagagtatatccactatcgtatcagcgattatatcagcgcacttgtctggatgacctgcacttacgacttctgaagtgaatagatacataaaaagtcctttcatttaaaatgaaccacaattatatccaaataaacttatcaaagcttgataaattaaaaattctctaaaattaagcaaaagttagttaaaatcaacttttgatataaaaaatatttaaaaggtttttatgttttctaaaatcattcaaagctacgctaaaggcaacctcatagttcaaatttgcataggtatagcactaggaatacttataggcattagctctaaagaaatatctgaaattgcaaatttacttggaatactttttacaagtgccttaaaagctatcgctcctatgcttgtttttattttaattttaacctcaatttgcactaaagatttttctcaaagtggtgctaagatcaaaaatattatcattttatatatagtaggcaccttttttgcttcagcttgtgcagttcttgctaattttttcttccctgtaaagcttgttttagatggagttcaaactgccacaaactcatctccaacccacatgagtgatattttcaaagatcttttatttaaaattgtcgataatcccataaatgctctttcaagcggaaattatttaggaattttaacttgggcaatagctggaggtatagcattaaaacactgttctaacgaagcaaaacaagtttttatagatatcaatgaaggggttttaaaaatcgttaaatttgtagtaaaacttgccccttttggaatttttggacttgtggctaattctgtagcacaaacaggagcacaaggtttgctaagttatgtaaaacttttaattttacttgtagctactatgctttttgttacttttgttatcaatgccttaatagtctttttttatacaagaaaaaatccttttcctttaatttttatctgcttaaggcacagtgcattttttgccttttttacaagaagttcagcggcaaatattcctgtaaatatggcactttgcgctaaacttggcatagataaagaattttatggcatttctatacctttaggagctactatcaacatggcaggagcagcagttactatagctattttaagtcttactgcagccaataccgttggtatagaaatcagtcttttacaagcctttttattaagcattattgccacctttgcagcttgtggggctagcggagttgcgggcggatctttactgcttatacctttggcttgttctttatttaatatagactatgatattgctatgaaggtagttgccataggttttattataggggttattcaagatagtgttgaaactgctttaaatagttctacagatgttctttttacagcaatttgttctaaaaatgaattaaattacaatatcaaataaggtaaaaacatgcgtcatctcatcactacaaaggattttaataaagtcgaaattatggagctttttaaagaagcaagtgatttcttagatgaaaaacctaggacttttcttgaaggaaaaagcatcacgacaattttttttgaaaactctacacgcaccctttcatcttttgaaagtgctgcaagaagattaggtgctagggttttacgccttgatgtttcaagatcaagctctagcaaaggagaaactctttatgatactgctgctaatttagatgccatgagtcctaatgctattgttgtaagacacgcaaactcaggagttcctttgatattagcaaagcatatgcattgtccagttgttaatggaggagatggaaaacacgcccatcctacccaagctttactcgatttgtttacgatttataatcattttcaaggtaatgttgaaggtaagaaaatttgcatcgtaggtgatattaaaaactctcgtgtagcagcgtccaatatagagcttttaagtagatttaatcttgatattaccctagtagctccaccacattttatgcctaatacccatcttaaaaaacattataagcttgatgagaatatcatagcaaattcagatattatcatgagtcttagaacacaaacagaaagacataataaaaccgtttatgcttcacttaaagactatgcaaatgatttttgcattcaaaaaagcttagtaaaggataaaaagcttattttactacatccaggccctgtaaatcgcaatattgacataagcgatgaaatgatgagcaatgaaaggactttagttttaaaacaagttaaaaatggagtggctattagaatggctgttcttaaaaaactcatactagaaaatgaaggataaaaaatgttagaatgggatttaagtgctttatttcacgataaagaagcattgcaaaattttacacaagaccaaatccaacaaagtttaaattttaaaaaaaactatgaaaataaactttatacattaaatgctaatgagtttttacaagctttaaaagattatgaattataaagagtattttcaaaaattcaaagaaaattccaaagaatttacaaatgttagaaataaaaaagaaagttatgaacgctgcatagcgcaaagttttttaaaagatgaattaaagcttatttttaaaaaacaaagagaatttggcttttctttttcaaaaaaatttgaagaagaggtgcttagtgtagcattttataaaagggctttaaaagatttttctcatttggtgggaaattgtagtttttttaccgatgaaaaaagagcgccaaaaaattcgcccttagcttttatgtttgtaacacttacaagaattatcaatcttttaaacaatcttaaaaatactgaaggaattttatatacaaaagatgatttaaacgcccttttaaatgaagttttaaaaaacggcactctaacttataaacaaacaaaaaagcttttgggcttaagcgatgattatgaatttaaaggagaaaaaggaacttattttattgagtttaaaaaatacaaagaatttataaaagccctaggtgagcataatttaagccaagatgatttaaatgaaatagcaaaagatattacccttataaaagatgagattaaacttaaaaaggctttagcaaaatatgatttaaatcaaaatcaaattgatagtttaagcaaattggaatttaaagaccatttaaatataagttttaaagccttaaaacttatcactcctttaatgcttgaaggtaaaaaatacgatgaagcttgcaatgagcttaatttaaaagtagcaatcaatgaagataaaaaagactttttacccgcatttaatgaaacttattacaaagatgaagtaactaatcctgtggttttaagggcgattaaagaatatagaaaggtcttaaatgccttacttaaaaaatacggtaaagtgcataaaataaacattgaattagcaagagaagtaggtaaaaatcacagccaaagagctaaaatagaaaaagagcaaaacgaaaactacaaggccaaaaaagacgccgaacttgaatgtgaaaaactaggcttaaaaataaatagcaaaaatattttaaaattaagattatttaaagaacaaaaagaattttgtgcttatagtggagaaaagattaaaattagtgatttgcaagatgaaaaaatgcttgaaattgatcacatttacccttattctagaagttttgatgattcttatatgaataaagttttagtttttaccaagcaaaatcaagaaaaacttaataaaaccccctttgaagcctttggcaatgatagtgcaaaatggcagaaaattgaagttttagcaaaaaatttacctactaaaaagcaaaaaagaattttagataaaaattacaaagacaaagagcaaaaagactttaaagatagaaatctaaacgatactcgctacatcgcaaggcttgttttaaactacactaaagattatttagattttttacctttaagcgatgatgaaaatacaaagttaaacgacacacaaaaaggctcaaaagtgcatgtagaagcaaaaagcggtatgcttacatcggctttaagacacacttggggctttagcactaaggatagaaataaccatcttcatcacgccatcgatgcagtaattattgcttatgcaaacaactctatcgtaaaggctttttcagattttaaaaaagagcaagaaagcaacagtgcagaactttatgcaaaaaaaattagtgaattagattataaaaacaaaaggaagttttttgagccttttagtggttttaggcaaaaggttttagataaaattgatgaaatttttgtctcaaaacctgagagaaaaaagccaagtggagctttacatgaagaaacatttagaaaagaagaagaattctatcaatcatacggcggaaaagaaggagttttaaaagccctagagcttggtaaaatccgcaaagtaaatggtaaaatagttaaaaatggcgatatgtttagagtggatatttttaaacacaaaaagacaaataaattttatgctgtgccaatttatactatggattttgctttaaaagtattaccaaataaagctgtagcacgaagtaaaaaaggtgagataaaagactggattttaatggatgaaaattatgagttttgcttttctttatacaaagatagtttgattttaattcaaactaaagatatgcaagagccagaatttgtttattataatgcttttacaagctctactgttagtttgattgtttcaaaacacgataataaatttgaaacgctaagcaaaaatcaaaaaatattgtttaaaaatgcaaatgaaaaagaagtaatcgcaaaaagcataggaattcaaaatctaaaagtatttgaaaaatacatagtttcagcacttggagaagtgacaaaggctgagtttagacaaagagaagattttaaaaaatgagttacgatgaagcttttaaaacactgcttattagctctaatgccaagctaaatttagagctaaatcatcttgtgattaagcaagatgaaaatatagccaaattgtttttaaaagatataaatatcatcgttttagaaagcttacaaataagcattagttccgcactttttaatgcctttgcaaagtataaaattatcttattaacctgcgatgaaactcatagtataaatggcgtttttactccttttttagggcattttcaaagtgcaaaaatcgcaaaagagcaaatgaatgtaagtgctcaaaaaaaggctattttatggcaaaaaatcattaaaaataaaatcctaaatcaagcctttatcttaaaaaaacacaataaaatagagcaaagcaatgagcttataaatttggctaaaaaagtaagcttaaatgatagtaaaaatattgaagctgttgcggcggcgctttattttaaaactttgtttgggacttctttttcaagagatgagctttgctttgaaaattctgctttaaattatggctatgcaatcattagggcttgtattattagagcagtttgcataagtgggcttttgccttggcttggcataaagcacgataatatttataattcttttgcgctttgtgatgatttgatagaagtgtttagggctagtgttgatgattgtgttttaaagcttaagggtgaaagtgagtttttaagcaaagatgacaaaagagcgttgattggcaatttacaaagtaaaatcaattttgatgggcaaaattatcctttaaacagagcgataaatcattatgtggcaaattttaaaaatgctttattgtatgaagatgaactaaagatagtgaaatttgatgattgaagataaatttatgcgtgtgcttttgatgtttgatgtgccaactaaaagtaaaaaagagcaaaaactagcaagtaaatttagaaataatcttataaaattaggttattttatgctgcaatttagtgtttatatgcgtatttgcaagggtttaagttctgcaaaaagttctattgaaaatgtaaaaaagattttgccaccttatggaaatgtaagggctttaatcatcactgaaaagcaatttgataaaatggagcttttgcttggtggcatagtttttaacgaaaaagttaataacgaaaccaatttaacgctttttgatatagatagtcatggagaatttaaatataaaaattcaaataatgaagaaattcaaataaacaaaaaacaagaaaaatatcatcagcaaaatttatttgaattttaaaagcggttttaggggattgtaaccccgcagagtcccgcaaactctttattttagtccctttttaaatttcttatgagattatagcataatttttgctatttttcatgaaaaaaccccgaaattttcattatctggtaaatatctattttacatttaaaaagggactaaaataaaccctagtggattgaaactccactagggctaattactccactaaaaggaggttgcgaatttgaaacttattgaaatttagggttgattaaaatcgaaataaaattatttaaataattttaaggcataaagataatatctactaaactttcattttctaacatttcacattcttttggcaccaccataagggcagctttattgttaagattgtttataatcgcactagagccttcttttttgccttcaagattggctaaaatgcgtccatttttaaactctatattgcaagcgacaaattccaaataaggtgtttttttcttgtaacttccttgtaaaaaggctttgcaaatatagtctttaggttgaagtaaccaagagtttaaaatctctcttgtgtaaagattaaacattaccatagccgagtaaggaaaacctggtaaggcgatgatgaatttttcattagccttagctattttgatatgtctacctggttttatgtcggctttatcgatgatgatttcgtattctttgatggctttttttaaaaagtcaaaatctcccatagaaaccccgcccgttgtaaccaaaatatcacaactttgcaaagcactttcaagggtggaaaaagtggctttctcatcatcttttaaaagaggaaaaacccttgtatcgcaatttaaatttttagctaaattagctatggcgatatgatttgaagagcggatttgagcaggattttccaaggcttctcctagatctttgatctcacttccactacttaaaacccctacaataggttttataaacacactaatgtgaaaaaatccaagttcagctaaaagagctatctcgctataatttaaccttgtgccttttttgagtaaaatttcatcttttttatagttttctcctaccgcacgcacggcaaaagcttggggaacttttttttctataaaaagagtattattttctatgcgtatattttcaacagggactaaagtatcgcttccttcgctcatgagtgagcctgtaaaggtttttacacaagtgccattttgtacgctaaattgtggcatagtacccgcaggtgtgaggcctaaaatttttaaaggcttgtcttgatcttcaaatttgatcgcataaccatccatagccgaggttggaaattcaggttggtttttaggggcttttatgtcttgagctaaaatgcgtcctaaacactctgtaagagctattttttcaatcttttcataggttttgatatgagaatgtaaaatttttaaactttcttcataagacattaacattttttatccttttaaaagtcctgcaccgcaaagtttggttgatctttctttggcataaattctttctttgtttattacatcatacttccaaatgggtgcacttgctttaaaatcttcaacaaattcattaagaagtttaagtcctaattttctttgtttgcttaaaattcctgcaaaataagagctttcatgaaccgctacatcacctatagagtgagcaaaaagcaaggtaataccatcaaaatctactcttttttgccactcattaaaccatttttttaaaagcggttcataaatatcaaaactaagtgcctcaatgcctccttcttcacgcacaataccacaaaaagtcagcaaagcaccgcagtttttatccttggcaaattcataccattggctataaattttaggaatatctaaagaatcttgatagagtgtaaaatgttccatttaacccccgcaaactggcggtaaaagtgctattttatcaccagtttttaacttagtgttttcatcaaaaatgatttcatcatttaaagataccgcacaaagttctagccattcttttaaactctcatctttttgcaaaatttcttttaattcttttaaattttttacctcaagttctaaattttctttatttatggggcctaaaaattccacttttaccattttattcctttacttctaaatttcccatcattcctaaatcttcatgttctaaaatatgacaatgatacattctaagtcctttaaaatcttgtttcattctaagtcttaactcttcattaggacgcacatttatagtatctcttaaggctctaaattcggctttttgaactttgccattgagttttgatgagatgagttcaaattgcgtgccatgtatatggaaaggatgatccatgtgagatttgtttatcactatccagtcttcaactactccaagtttggagcttaaatcaatgcgttttaaatcatagcttttgccattgattaaaaacatagacgcaagagcgatttttaattcattttcactttttcccatcattccatgcatttgcatatgatcttcactcatgattatttctttaaattccttaggttcttctaaaggtttgaaaatttttaaattttttggaagttctaatttttctttttttaggttaatattggctagaaatagggtattagattcttcttttaccatcattttatccctatcataataagcactttctagcttaaaattcccatcttttggagcgtcgattaaaacttctacacgagaagcaggacttaagaaaagttcttctttataaatagctttttctataagtccaccatcagtaccaacaagtataaacttagctccttgtatgcgtaaatttaaatatcttgctgcagtagcattataaatgcgtatgcgttcgtttgtggcgagtttgattttaggtttaaattgtccattgatgagtacaaattctccttctctaccatttagccaatcatttaggttgttgtttggaatttgagcgttttcatcaagacgcaaatcgctaatcatcaaatctttttcttttaaatgacttaaagcatctttttttgctttgatcacaaaagcccctgctaaacccataaaaacttgtttagaagccgtataatgaggatgtggatgataccagtaagttcctgcgctatcttgaggaatttcaaaacgatatattctttcttctcctgctaagataggatcatgtgggcttccatcttgatcaggtggcacaggaacgccatgccaatgtatagttgtagcttctttgagtttgtttttgactaaaatttcaagtttatctccttcaaaaacttctatttttggagcaggcacgaggccattgtaagtataaaataaggtttttttacctttgataagctctatatgattttctttgatttctagggtagcacgaaaaatatttttttctttactttcatttttgagtaaaggcaaggcttttaaaatttctccttgggggaattgttttggatctaaaagctttaaattttttggagcaaagtttataaaagaagtatctaagtcatgatttatagaatgatttttatgcatggagtgcatatcatgcataggatttgcataggctacacccatacttgctagagtgagtgcattaaattttaaaaaatttcttctattcattagtttttccttttgcttgattttttgtattatagtcattatttttttaactttagtaaatatttattttgaaaatttggtttaattttgttatgattttagcaatttaatcaaggaaaaataatgttttatgaaaaaattcaaaccccagcttatattttagaagaagataaattaagaaaaaattgtgagcttttagcaagtgttggcgaaaaaagtggtgctaaagtgcttttagctttaaaaggttttgctttttcaggagcgatgaaaattgttggagaatacttaaaaggttgtacttgtagcggactttgggaagcaaaatttgctaaagaatacatggataaagaaattcatacttattcgcctgcttttaaagaagatgaaataggtgaaatagccagcttatctcatcatatagtgtttaactctttagctcaatttcataaatttcaagctaaaacacaaaaaaattccttaggtcttcgttgtaatgttgaattttctctagccccaaaagaactttacaatccttgtggaagatactcaagacttggaattcgtgctaaagattttgaaaatgtggatttaagtaccatagaaggacttcattttcacgcactttgcgaagaaagtgctggtgctttagaagctgttttaaaggtttttgaagagaaatttggcaaatggatagggcaaatgaaatgggtgaattttggaggaggacatcacatcactaaaaaaggctatgatgttgaaaagcttattgctttgtgtaaaaatttcagtgataaatacggtgtgcaagtttatcttgaaccaggtgaagcggtaggttggcaaacaggaaatttggtggctagtgtagtagatatcatagaaaatgaaaaacaaattgctattttagatacttcaagcgaagcacatatgccagatactatcatcatgccttatacaagtgaagttttaaatgctagaattttggccacaagagaaaatgaaaaaatttcagacttaaaagaaagcgaattttcctatttgcttactggaaatacttgtttagcaggtgatgtaatgggagaatacgcctttgataaaaagcttaaaatcggcgataaaattgtttttttagatcaaattcattacaccattgtgaaaaacacaacttttaatggtataagacttccaaatctcatgcttttagaccgtaaaaatgaacttcaaatgataagagaattttcttataaggattattctttaagaaattagtattatttataatttgcataaaatgttaattttactcggaagagaatcaaagatgtaaattttatgcaaagtattttattttttcaaatataaaatcaactcaaatatctaattttcaatactttagtatgattttttaatattttaaatccttgtggaattttattgaaattcagtgatttttaaatcaaatagtattaagataaatcgatttaaaaatcggctttaaaatgaatattaggtatattttgcataatattcattcaagcaaaatttaaagctatttttgaaaattttgaatgcatgggagctttaatggatttggaaaaattaagattagctagaagtctttattatcaatgtctaggagagctttttgttttttcattttctgaagaaagattgtcaaaattacaagagtatttaaagacaatgcaagaatgtttatttgatgaaaatttaaaatcaaattttgatatcttgcttaagcatttagatgatgaaaattctatacaagcattttttaaagaatatgatttgctttttttaagtcttaaaaatagcattccaacgactttttcttacatagaagaaggttttgaaaattcaaatcctttactttgcgtgcgtcaaattttagtcaaaagtaaaataagacgcaatgaaaaattttttaaagaaagtgaagatagtgttggattttgtttattgttgatgagtgaatttttaaggcaaaatgaagatgatttagccaaagagctttttgaaaaagtgatcaataaaagcattgatgagtttttaggcgatgttttcatgaataaaaatgcgaatttatataaggaaattgcaagtattgcatcggcttttatggaatttgaaagactttgctttgaagtggaaaaacctgcaaaaataaattctaaaaaagtgcaaaacgatctatcgcgttcagaatttttaagaagagaagcaaataaacaaaggaggactcgtgaaaaatcgcagggaatttcttaaaaaatccgcttttgccttaggggctgctggagtgcttggtagcacgactttagctctagctaaagatgaagaaagaaaagatttggttaaaggtaaaagtaagaaaaaagaagtgctttttcaaagaagtgctaattgggaaaaatattatataaaggctgagtaatgtcaagtgtaggtgaaaatatcaagcttacgcgtcgttcttttcttaaaatggcagcactttcaagcctagcaacaccgttgcttgctagaagtgaaactttaagagaagcgagtgctgatgagcttaaagaagcgtatgaaggtagtaaaaaagtaaaaacagtttgtacagcctgttctgtaggctgtgggattattgcagaagtgcaaaatggtgtttgggtgcgtcaagaaattgctcaagatcatcctgtgagttcaggtggacattgctgcaagggatctgatatgatcgatatggtgcgttcacatgtgcgtttaaaatatcccatgaaaaaagaaaatggagaatggaaacgcataagttatgagcaagctttaagtgagatcggagaaaaactagctgcttatcgtaaagaaaatcctgaaagtgttatgtttttaggttctgcaaaacttaataatgaacaagcttattatataagaaaatttgcagcattttttggaacgaacaatgtagatcatcaagctagaatttgacacagcgcaacagtcgccggtgtggcgaatacatttggttatggcgctatgacaaaccatcttggagacattcaaagaagtaaatgtatcattatcattggagcaaatccagcggtaaatcaccctgtgggttttagacatttcttaaaagcaaaagaaaaaggtgcaaagcttattgttgtagatcctagatttacaaaaagtgcagcaaaagcggatatttatgcaagaattcgtccaggaactgacattgctttcatgtatggaatgttaaaaatcatttttgatgaaggcttggaagatacaaaatatcttgatgaaagagtttttggaattgataaaattcgtgaagaagcagcaaaatggacagctgaagaagtggaaaatgttacagggatctctaaagaacttttggtgcaaatcactcacgaagtagctaaaaacaaaccaactacgcttatttgggctatgggtttaactcaacatactgtaggaacttcaaatacacgtttagcacctattgtgcaaatggtacttggaaatataggtaaatttggtggtggagttaatatcttacgcggacacgataatgttcaaggtgcttcagatatggcttgtttgagcgaaaatttaccaggttattatcctttaaatgaagcgacttggagatactatgccaaaatttggggtgtggattatgagtggcttttaggaaattttgtaagcaaagattggatgcataaaactgggctttcacttgctagatggtgggcagcggctttaaatggaaaagatggaaatgatgctatcgataatgcaggaacgcctttaaaagctttagtagttatgggaaatggtattacttcgactgcacaacaagtaaaagttaaagaaggtttggaagctttagagcttttagttttagccgatccttttgtaaatgaagcagggattattgcagaaagaaaagatggaatttatcttttacctgcagcaacacagtttgaaacaagcggaagtgtaacagcaacaaatcgtagcggacaatggagatttaaagttgtagatccactttatgaaagcatggaagatcaagaaattttatttgagcttgctaaaaaattaggtttttatgaagactttaccaagactttacgcgatgaaaaaggtgagattgtttggcctgaaaatgcaacaagagaaattgcaaaagcagttagaagtatagggcttaatggttggagtcctgaaaggcttaaaaagcatactttatactgggataaatttgatgaggtaactttagaaggaaaagacgaagttgctggcgagtattacgggcttccttggccttgttggagtgataagcacccaggttctcctgtgctttataataccgacattgaagtagcaaaaggtggtatgggctttagaaacaattttggacttgaatatgaaggagagagtttacttgctaaaaatgcacctttaaattcgcctattgatacaggttatccacaaattactaaagataatatagaaaaagttttaggcattactttaagtgcccaagaaaaagctaaaatgggatcaacttggtcttatgatgatagtaatatcatagcaactaaatgtatagaaaaaggcatagttccttatggaaacgctaaagctagagctgtagtttggacttttaaagataaaattccactccaccgtgagcctttacattctccaagaaacgatttggtgcaaaaatatccaagttttgaagatcaaaaagcgctttaccgcgtggatactaaatttgtttctgtgcaacaagctaaggattattctaaagaattcccgcttaatcttgttactgcaagacttgtgaatttaaatggtgcaggtatggaaaatagagcatctatgtatctaacgcgtttaacacctgaaatgttttgtgagatcaatcctgaattagcaaaagagcaagacattaaagcaggagata

SEQ ID NO: 3802 - DNA, 22409 bp, synthetic construct
  source 1..22409: mol_type = other DNA
  misc_feature 1..22409: note = Synthetic
gtaacggctgatggtgcttttcgtcgtggcaaaccttatatgttaaaacctgcagtagataaggctttaagtgaagggtgtgaaagtgtagaaaaagtacttatagttatacgcaataatgagcctatagaatatattaaaggaagggactatgtttataacgaacttgtgaaaaatgagtcttataagtgtgaacccgaaattatggatagtgaggatttgttgtttttgctttacacttcaggatcaacgggcaagccaaaaggagttatgcatgcaagtgcaggatatatactttgggcacaaatgactatggaatgggtttttgatattaaagattatgataattattggtgtagtgctgatgtgggttggattacaggacatacttatgtagtttatgggcctttagcatgtggagcaacgactataatgcatgaaggaactcctaattctgggcgttggtggagaatgatagaagagtatcaaataagcaaattctacacttcgccaactgccataagaatgcttcatgctgatgcacctaatgagccaagaaaatatgatttaagtacgcttgaagtgcttggaacggttggagagcctatcaatcctagtgcttggaagtggttttatgatgaaatagggggaactaaaagtcctatagtcgatacttggtggcaaacagaaacaggtgggcatatgatcacgcctttaccaggtgctactcctttaaaaccaggttgtgccaccttgcctttgccagggatttttgcggaagttattgatgaagaaggcaataaaaaagatgaaggtgaagatgggttgctttgtataactaaaccttggccttcgatgattcgtggaatttggggcaatgatgaacgctatatagaaagttatttttctcaagctaaaaaagatggaaaagctgtatattttagtggcgatggtgctttttatgataaaaatggttatattaccatcacaggaagaacagatgatgtggttaatgttgcaggacatcgtataggaacggctgaaattgaaagcgctattgctaaacatccaagtgtagcagaatcagctgtagtgagtattttggatacgattaagggcgagtcattgtttgcttttgtggttttaagtcctgcatccagttgtgatcttggcggagctatagaaactttaaaagaacttaatgacattttaagagtagaaataggacctatagctaaaatagaaaaaattctttatactccaggtttgccaaaaactagaagtggtaaaataatgagaagaattttaagaactatagcaagaggcgaagaaatcaaacaggatatttcaacacttgaagattctaaagtagtagaaaccattgttaaattagctaaggcagagtttgaataacaaggcaaaaagaactttgccttgttgcatgaaaattcataaaaataagctataatgataaaaaaataaaaggaaatttttatgcttcaaacttgtattttccctgcggcaggttatgggacgagatttttacctgcaacaaaaactttacctaaagagatgttacctatcttaaccaagcctttgatccattatggagttgatgaagctttagaagcaggaatggaaaatatgggatttgtcacagggcgtggaaaaagagctttggaggattattttgatatttcttatgaacttgaacatcaaatttcaggtacaaaaaaagaatacttacttgatgaaattcgctctttgatcaatcgttgtacctttacttttacaagacaaaatcaaatgaaaggcttaggtgatgcggttttaaaaggtagacctttggttggcgatgaagcttttggcgtaattttggctgatgatttgtgtgttaatgaagaaggcttaaatgttatggctcaaatggtaaaaatttatgaaaaatatcgctgtaccatcatagctgtgatggaagtaccaaaagagcaagtttcaaactatggagtaatttctggaaattttgtagaagaaaatcttatcatggttaattctatgatagaaaaaccaagccctgatgaagctccaagtaatcttgctatcataggaagatatattttaactcctgatatttttggaattttagaaaatactaaagcaggaaaaaatggtgaaattcaacttaccgacgcgcttttaactcaagcaaccaatggtatggttttagcttataaatttcaaggaaaacgctttgattgtggaagtgtagaaggctttgtagaagcgacaaattatttttacgagaaaagtaaatgttaaacaatacacttttttttaagcaaagtgaaattcacactataagttcttatgcaaatcgtattaatgatgaggtaaaaagtggagatatagggtattatcatcttattgatacaagtttgaatttaatcgatgagggtttggcttttatcaaagacaaagaacacataaaaaatatcgttttagtgggaatgggtggttcaagttgcggtgtaaaagccttgcgtgatatgctttttaatgaaaaaagtaatcaaagagaactttttatactcgataacacaagttcacattcttttaataagactttagaaaaaatcaagcttgaagaaagtttgtttttaatcatcagtaaaacaggtagcactatagaagttgtatcgctttttaaacttcttattgaacattttaaacttgatatgcaagaattaaaaaaatactttgtttttattaccgataaggattcaaaacttcatcaagaaggtgaaaatttaggtattaaatgcttttttatccctgcaaatgtaggaggtcgttttagcatactttcagccgtaggtatagttccactttgtttttgtggctataatgccaaagctcttttagaaggagctaaagcttgttttgaagatttttttactcacaaaaaagatgaaattttacaaaaagcctatcattattgtacacacaaaaatgccaatatcaatgtacttttttcatatagcgatgcttttaaaggctttaatgaatggtatatccagcttattgctgaaagtttaggtaaaaagcaaggctataaacgcataggtttaactcctattgcgctcattggcgcaagagatcagcatagttttttacaactcatcatggatggacctaaaaataaaactgtaacttttttaaaaatcaaagacgctcaaaaagcacctattatccctgatattcattttaaatttttagattctttaagtaataaagtcaatcttcacgaacttttaaacgctcaatgtgatgcaactatgcacgctttaatcgctgaaaatttgagtgttgatgtgatagaacttgaaaaacttgacgcttggcatgcgggatatttgatgtattattatgaactttttacttcaacttgcggtgttatgctagggattaacacttatgatcaacctggtgtggaagttggaaagttgatcttaaaaaatatattaaattcttaatcaaaattcattaaaaaagagtataatgattttaagttaaaattataataaaaatttttaattaataataataattattatttaagaattttatgttataattttaaaaattaaaaaaaaggagtcaatcatgtcagttacaaaacaattattacaaatgcaagcagatgctcatcatctatgggttaaatttcataattatcactggaatgtaaaaggtttgcaatttttttctatacacgagtacacagaaaaagcttatgaagaaatggcagaactttttgatagttgtgctgaaagagttttacaacttggcgaaaaagctatcacttgccaaaaagttttaatggaaaatgcaaaaagtccaaaagttgcaaaagattgctttactccgcttgaagtcatagaactgatcaaacaagattatgaatatcttttagcagaatttaaaaaactcaatgaagcagcagaaaaagaaagtgatactacaacagctgcttttgcacaagaaaatatcgcaaaatatgaaaaaagtctttggatgataggcgctactttacaaggtgcttgcaaaatgtaatttaaggggctttatgccccaattatacaaactaggttataatatccttttttaaaggataaaattgaaagtacttaattttttttatgaaaaccaccctaaatttgaagtaagttatgaaagaaaaaatcaaatttcaaaaccaaatattatcataaaaggcccacgattttgtggtaaaaaaacacttatttttaattttttatctcaatttaaagcaagtgaaattttgtttttagatttatatgatacacgctttgaaaaacaaagtttagaaagacttgctgattttctgaatgaaaatttacaaattaaaattctttgcctttataatttggattttatccctaatttagaaaaaattaacattcccatcatcttaagtacaaatataaaagatttaaatgtaaatgggtttgaagagcttgaacttgattattttgattttgaagaatttattagtgtaagtaagaaaaatttacctataaataatttagtaggtctttttttgcaaagtggacgcagtaaatttggagaaaaaaacatacttctaagacaaagctttactcttttagaattagaaattttaaagtatttagctttaaatttgggtcagcaaatcagtatttctaagatatttatagaactcaaaaaaagattaaaaacttcaaaagatagtgtttatcaagctatcaaaaaattagaaaatacttatgtgatttataccttaaaacatgatgaaaaaaaacttcaaaagatttattttaaagattttggcctaagaaataatctttgtatttcaaaggatttttcacatttatttgaaaatttagttttaagcgagttgtttaaatttaaagaagaatttttttataacaaatactttaacttttatagccaaatatctaaaattgcttatatttcaagtccaactttagatattgatttgattaaattacgtgctaagaaaattttaccaaaggctttagaacttggaatttttcatgtgatttttatcactctttcaagcgaggatagtttttttgagcaaggggttaaatttgaagtcatatcttttgataaattttcacttggattttaggtgttgtttgagtttgtatcgtatttttcaaggttgtatcgtttgatgatttttgtaataagattgatataatatcccttgcgttcagaataagaatctaaagttttaatagcctctagtcctgttatctctttgccttcgcttgcaaatttagctcttgcatcgcgaaacttttcataagcaaaatgacgatttaaatttaaaacataagagtaaacactatcttgcagactatcaaaaatcttaattttatgttttttatctggatgtcttaaatcaggaattaaacctttctcaccccaagtccattctccaaaaagattgtttgcttctcttgcgaagcgactggtacctgtagcactttcaactaaagcttgggctatacccatggattttggaattttttgaatacgttttttatattctgcaaaatcataaagattttcaatacgatatttgttttttatcatgataagtttttcaagatttatttggtttgaagtcctaaagcctgttttgtaagcatctttaaaaaaggcttcgataaaagctctttcttgttcaatttttttaaagctttgatcaaacatttcattcatttttataaaaaaaatttgtcttttttgatctatatcaagtttgtaatattcttctccaaatccactctttagatcatcagcaaaaagtgggattagaaaaagactaagaaaaattataattggcttcaaaacaatactttacctttccttcaaaaaacaattcttcatttttatatgcaaaccctacctcttcaccacttttaggagttattttaactttattttgtacttttttatttaaaaatgccagataaaaacaagcccccattcctgtgccgcaagctaaggtttcatcttcaactccgcgttcataggtgcgaacttttaaatgattttcatctaaaatttttacaaaattaacattggcattatatttttgtctcattttttgacaaagcattgtatcaaattcatctaaattttgacaaaaatgtactagatgtggaactccagtgttgcaaagttgccaagtttttcctaattcttcaaaagtattttgcacgctttttattttgcctaaagatacttcaactttatcttgatttacctttgcttttattactcctgcaccggttaaaaaactcatgttaggatttattttgttaatatgatgtgcaaaatgtgccgcagcccttgagccatttccacacatagcagcccttgagccatcgttattataaaattcccattcaaagtcgtatttttcatgaggcaatatcacgataaagccatccgcacctataccctcataacgattacaaagttctttagctaaagcacttctatcttcttttctatcagcatttgttatgacaaaatcattcccacttgcacaatatttataaaatttcacatttttcctttagaaatttcttgtattactttaacacattcttgcctaaaatcggcataagaattagtatttttaatgataaaatctgcttttttaagtttttcttcaatatctatttgagaatcaagtcttgcttttgcagcttctaagctgagcttatctctttgcatgattcttttaaggcttaattctttaggtgtgtaaattacaatgactttgcctaaattttcataagcaccgctttcaaaaaaaagaggaatttctacaaaaaaagctttattttccttatctagaatttgcatttgttctaaaattttagctcgaattttaggatgagtgaaattttctaaggtttttttagcttctttgttgttaaaaacaatttttccaaggatttttctatcgattttcttttcttttgtgagtaaattttttaagctaaagggagaaaaaatcttttcaagttctaaagcattttcatctaaaatttcatgagcgattttatctgcactaatgcttttaaagcctaaagaattcgctatttctataaaggtgcttttaccacaagcaattgaagcggttacaaagaaagcatttttcatcttatgccttattaaaacttttttcgttaaaatacctttttagttcttaaaggaaaataaatgaaaatttcatatgaagatgcaggcgtaagtatagataatggaaatgcctttgtagaggctataaaacctttggttaaagaaacttttaatgataatgttgtaggtggaattggttcttttgctggtgcttttagaatgccaagtggttttaaaaagcctgtgattttaggtgcaacagatggggttggtaccaagcttcgcttggcaattgatgctaaaaaatatgatactatagggcaagatttagtagcaatgtgtgtgaatgatttgatttgtaattttgctacgcctttgtttttcctagattattatgctacagccaagctcgaagtagaagtagcaaaggctgttgtatcaggcattgccaagggatgtaagatggcaaattgtgcattaattggcggagaaactgctgaaatgcctggaatgtatgcaaaagatgattttgatcttgcgggttttgcagtgggtatggctgaagaagatgagattgatagaagtaaatttgttaaaaatggtgatattttattggcacttcctagttcaggacttcattcaaatggttattctttagctagaaaagtactttttgaaagtttaaaattaaaatttgatgacaagatagagggtaaaaatttaattgatattttattagaacctacaaggatttatgtgcgtgattttcttacactaaagccttatatcagtgctctagcacatattacagggggtggtttagtagaaaatttaccacgcgttttacctcgtggtatgggtgcaactatacgcaaacatcatcttaaaactcctgaaattttttatactataggacaggctgtagaagaaagcgaaatgtatagaagctttaacatgggagtgggtttagtaatggttgtagatccttctaatgtaagtaaggttttagaaaattcagatgcctttattattggcgaaatttgcattaatgaaggtattgttttagagtgaaaataaagcgtcaatacgctttatttttgtattttaagttctatttttgtagtgttttgttcttttggcaaaggattggtttgtgctagataaaaggctacgagtacatttacaagcatagcgataagtaaaagaggagtggttcgttttataatatccattggagctacttttgcaaatccagctaaagctatgattccgcctgctattggtgaagctgcacgacctaaacaagatgcaatttctataggtaaaactagagtaataggtgcaacgtctaattttgtagctatatcaggagctagtttgccaaaagcattaaaagcagcaattccacttcccataatcactgtggcaaaataaactaaaaagcttaaaatagctatactcaaaagaattccaaaccatgcaaaatttcctgttccaagatttgaaaccgcgttagcaaggatattaactccaccaagtgctttaatgccttcagcaaatactccagcggcgatgattatgcttacgactgagataaaaatttcagccatagcttttaaaatcaccatcatatcttcgcctaattttctagcatttctatgtcttgcaaattcaacaagaaaaactaaagaaatgcttacaaaatttgctgttacaacatcgagcttgatagtaaaaaaatacgctgtaaataaaaatacaacaggtaaccaaggaaagagtatgtaaaaagtagggcatttaggatcaatgatttgcggaatttcaacttcatcatttaaaacacctttttctttatctcttttatcaatccaagcaaaataaaaaggaatcaagatggcaataactacaacataggcaatcacactataaatttggtaatttaaaaaaagccctacgacattatcactttgtcctaccatatctgccatattgattgaatttccatcttttggaccataatcaagcgcaattaaagaaagcacacatacagctgtaataggacggattttaagtgagattaaaacaggataaatacatgctaacaaaagcaaaagcaatccagcatagctagaaatgacgatttttaaagccattccaacaacaaaagttccacttaaaatcaagtatttatttttgatttttcctaagggtttatttgctaaaaaagcaagttttgctgaagcattgatatgtttcatataagcagcaaaacctgccacactcatgataataagtcctactccagaaagctgacttttaaaagtcgctgtgataaaagcataactatcaagtaaaacattcaaaaagcttgcatgttctctgctcggggcttttggtataggtgttcctgtgatgtaaaaagcaaaaataagcaagataatacctgaaagaaaaaatacaaaaataggattgtattttttaagtatataataagtaacgacaattaccgctaaaagtgtagaacatatcataaaaattggcatgatttctcctaaagttattattagcttttattttattttagctaaaatttaactaataaatatttttcatttaaaattttacttattttttgcattataaaattaataatatgtatagtttggttactgaaaagtttatgtttgtataaaaaatgatttttatattataattataaacaaattataaatatcaaaaaggatctagtgtggcaagaattttggcatttgatataggtataagctctattggctgggcgtttagcgaaaatgatgagttaaaagattgcggagttaggatttttacaaaggctgaaaatccaaaaacaggagaatccctagccttaccaagacgccttgcaagaagtgccagaaaacgccttgctagacgcaaagcaaggctaaatcacttaaaacatttaatcgcaaatgaatttaagttaaattacgaagattatcaaagctttgatgaaagtttagctaaggcttataaaggctctttaattagcccttatgagttaagatttagagctttaaacgcccttttaaatgaagttttaaaaaacggcactctaacttataaacaaacaaaaaagcttttgggcttaagcgatgattatgaatttaaaggagaaaaaggaacttattttattgagtttaaaaaatacaaagaatttataaaagccctaggtgagcataatttaagccaagatgatttaaatgaaatagcaaaagatatcactcttataaaagatgagattaaacttaaaaaggctttagcaaaatacgatttaaatcaaaatcaaattgatagcttaagcaaattggaatttaaagaccatttaaatataagttttaaagccttaaaacttatcactcctttaatgcttgaaggtaaaaaatacgatgaagcttgcaatgagcttaatttaaaagtagcaatcaatgaagataaaaaagactttttacccgcatttaatgaaacttattacaaagatgaagtaactaatcctgtggttttaagggcgattaaagaatatagaaaaatcttaaatgccttacttaaaaaatacggtaaagtgcataaaataaacattgaattagcaagagaagtaggtaaaaatcacagccaaagagctaaaatagaaaaagagcaaaacgaaaactacaaggccaaaaaagacgccgaaattgaatgtgaaaaactaggcttaaaaataaatagcaaaaatattttaaaattaagattatttaaagaacaaaaagaattttgtgcttatagtggagaaaagattaaacttagtgatttgcaagatgaaaaaatgcttgaaattgaccatatttacccttattctagaagttttgatgattcttatatgaataaagttttagtttttaccaagcaaaatcaagaaaagcttaataaaaccccctttgaagcctttggcaatgatagtacaaaatggcagaaaattgaagttttggcaaaaaatttacctgaaaaaaagcaaaaaagaattttagataaaaattacaaagacaaagagcaaaaagactttaaagatagaaatctaaacgatactcgctacatcgcaaggcttgttttaaactacactaaagattatttagattttttacctttaagcgatgatgaaaatacaaaattaaacgatacgcaaaaaggctcaaaagtgcatgtagaagcaaaaagcggtatgctaacatcggctttaaggcacacttggggctttagcgctaaggatagaaacaaccatcttcatcacgccatcgatgcagcaattattgcttatgcaaacaattctatcgtaaaggctttttcagattttaaaaaagagcaagaaagcaacagtgtagaactttatgcaaaaaaaattagtgaattagattataaaaacaaaaggaagttttttgagccttttagtggttttaggcaaaaggttttagataaaattgatgaaatttttgtctcaaaacctgagagaaaaaagccaagtggagctttacatgaagaaacatttagaaaagaagaagaattctatcaatcatacggcggaaaagaaggagttttaaaagccctagagcttggtaaaatccgcaaagtaaatggtaaaattgttaaaaatggcgatatgtttagagtggatatttttaaacacaaaaagacaaataaattttatgctgtgccaatttatactatggattttgctttaaaagtattaccaaataaagctgtagcgcgaagtaaaaaaggtgagataaaagactggattttaatggatgaaaattatgagttttgcttttctttatacaaagatagtttgattttaattcaaactaaagatatgcaagagccagaacttgtttattttaatgcttttacaagctctactgttagtttgattgtttcaaaacacgataataaatttgaaacgctaagcaaaaatcaaaaaatattgtttaaaaatgcaaatgaaaaagaagtaatcgcaaaaagcataggaattcaaaatctaaaagtatttgaaaaatacatagtttcagcacttggagaagtgacaaaggctgagtttagacaaagagaagattttaaaaaatgagttacgatgaagcttttaaaacactgcttattagctctaatgccaagctaaatttagagctaaatcatcttgtgattaagcaagatgaaaatatagccaaattgtttttaaaggatataaacatcattgttttagaaagcttacaagtaagccttagttccgcactttttaatgcctttgcaaggcataaaattatcttattaacctgcgatgaaactcatagtataaatggtgtttttactccttttttagggcattttcaaagtgcaaaaatcgcaaaagagcaaatgaatgtaagtgctcaaaaaaaggctattttatggcaaaaaatcattaaaaacaaaatcctaaatcaagcctttgttttgaaaaaacacaataaaatagggcaaagcaatgagcttataaatttggctaaaaaagtaagcttaaatgatagtaaaaatatcgaagctgttgcagcggcgctttattttaaaactttgtttggcgtttctttttcaagagatgagctttgctttgaaaattctgctttaaattatggctatgcaatcattagggcttgtattattagagcagtttgtataagtgggcttttgccttggcttggcataaagcacgataatatttataattcttttgcactttgtgatgatttgatagaagtgtttagggctagtgttgatgattgtgttttaaagcttaagggtgaaagtgagtttttaagcaaagatgacaaaagagcgttgattggcaatttacaaagcaaaatcaattttgatgggcaaaattatcctttaaacagagcgataaatcattatgtggcgaattttaaaaatgctttattgtatgaagatgagctaaagatagtgaaatttgatgattgaagataaatttatgcgcgtgcttttgatgtttgatgtacctactaaaagtaaaaaagagcaaaaactagcaagtaaatttagaaacaatcttataaaattaggttattttatgctgcaatttagcgtttatatgcgtatttgcaagggtttaagttctgcaaaaagttctattgaaaatgtaaaaaagattttgccaccttatggaaatgtaagggctttaatcatcactgaaaagcaatttgataaaatggagcttttgcttggtggcatagtttttaatgaaaaagttaataacgaaactaatttaacgctttttgatatagatagtcatggagaatttaaatacaaaaattcaaataatgaagaaatacaactaaacaaaaaacaagaaaaatatcatcagcaaaatttatttgaattttaaaagcggttttaggggattgtaaccccgcagagtcccgcaaactctttattttagtccctttttaaatttcttattgagattatagcataatttttgctatttttcatgaaaaaacccccgaaattttcattatctggtaaatatctattttaccataaagaaatttaaaaagggactaaaaccacttgattatcgttatactctaaaggctcattttaccataaagaaatttaaaaagggactaaaacgacaataaaacagctatagaagccttagaaattttaccataaagaaatttaaaaagggactaaaactataataccatttttaatttaaaaggaatgattttaccataaagaaatttaaaaagggactaaaactggtgggctatgtctcgctataataaaactattttaccataaagaaatttaaaaagggactaaaacaaatactttaacaggggattcttcaaaattattttaccataaagaaatttaaaaagggactaaaactctatcatagtgaattctttcacaccaaaaattttaccataaagaaatttaaaaagggactaaaactagttgtaagtaagtatgatagtgctgaaaattttaccataaagaaatttaaaaagggactaaaaccttttcattagttgttataaaataataaaattttaccataaagaaatttaaaaagggactaaaaaaccctagtggattgaaactctgctagggctaattacttcactaaaaggaggtgcaaatttgaaacttattgaaatttagggttgattaaaatcgaaataaaattatttaaataattttaaggcataaagataatatctactaaactttcattttctaaaatttcacattcttttggtactaccataagggcagctttattgttaagattgtttataatcgcactagagccttctttcttaccttcaagattggctaaaatgcgtccatttttaaattccacattacaagcgacaaattccaaataaggtgtttttttcttgtagcttccttgtaaaaaggctttgcaaatatagtctttaggctgaagtaaccaagagtttaaaatctctcttgcgtaaagattaaacattaccatagccgagtaaggaaaacctggtaaggcgatgatgaatttttcattagccttggctattttgatatgtctacctggttttatgtcggctttatcgatgatgatttcgtattcttttacagctttttttaaaaagtcaaaatctcccatagaaactccgcctgttgtaatcaaaatatcacaactttgcaaagcactttcaagggtagaaaaagtggctttttcatcatcttttaaaagtggaaaaacccttgtatcgcaatttaaatttttagctaaattagctatggcgatatgatttgaagagcggatttgagcaggattttccaaggcttctcctagatctttgatctcacttccactacttaaaacccctacaataggctttataaacacactaatgtgaaaaaatccaagttcagccaaaagagctatttcgctataatttaactttgtgccttttttgagtaaaatttcatcttttttatagttttctcctactgcacgcacggcaaaagcttggggaacttttttttctataaaaagagtatcattttctacgcgtacattttcaacagggactaaagtatcacttccttcactcataagtgaacctgtaaaggtttttacacaagtaccattttgcacgctaaattgtggcatagtgcctgcaggtgtgaggcctaaaatttttaaaggcttatcttgatcttcaaatttgatcgcataaccatccatagccgaagttggaaattcaggctgatttttaggggcttttatgtcttgagctaaaatgcgtcctaaacactctgtaagagctattttttcaatcttttcataagttttgatatgagagtgtaaaatttttaaactttcttcataagacattaacattttttatccttttaaaagtcctgcaccgcaaagtttggttgatctttctttggcataaattctttctttgtttatcacatcatacttccaaataggtgcacttgctttaaaatcttcaacaaattcattaagaagtttaagtcctaattttctttgtttgcttaaaattcctgcaaaataagagctttcatgaaccgccacatcgcctatagagtgagcaaaaagcaagctaataccatcaaaatctactcttttttgccactcatcaaaccatttttttaaaagcggttcataaatatcaaaactaagtgcctcaatgcctccttcttcacgcacaataccacaaaaagtcagcaaagcaccgcagtttttatccttggcaaattcataccattggctataaattttaggaatatctaaagaaccttgatagagtgtaaaatgtttcatttaacccccacaaactggcggtaaaagtgctattttatcaccatcttttaacttagtgttttcatcaaaaatgatttcatcgtttaaagatacggcacaaagttctagccattcttttaaactctcatctttttgcaaaatttcttttaattcttttaaattttttacctcaagctctaaattttctttatttatggggcctaaaaattccacttttatcattttattcctttacttctaaatttcccatcattcctaaatcttcatgttctaaaatatgacaatgatacattctaagtcctttaaaatcttgtttcattctaagtcttaactcttcattaggacgcacatttatagtatctcttaaggctctaaattcggctttttgaactttgccattgagttttgatgagatgagttcaaattgcgtgccgtgtatgtggaaaggatgatccatgtgagatttgtttatcactatccagtcttcaactactccaagtttggagcttaaatcaatgcgttttaaatcatagcttttgccattgattaaaaacatagacgcaagagcgatttttaattcgctttcactttttcccatcataccatgcatttgcatatgatcttcactcatgattatttctttaaattccttaggttcttctgaaggtttgaaaatttttaaattttttggaagttctacattttctttttttagactaatattagctaaaaatagggtattaggttcttcttttaccatcattttatccctatcataataagcactttctagcttaaaattcccatcttttggagcgtcgattaaaacttctacgcgagaagcaggacttaagaaaagttcttctttataaatagctttttctataagtccaccatcagtaccaacaagtataaacttagctccttgtatgcgtaaatttaaatatcttgctgcagtagcattataaatgcgtatgcgttcgtttgtggcgagtttgattttaggtttaaattgtccattaatgagtacaaattctccttctctaccatttagccaatcatttaggttgttgttcggaatttgagcgttttcatcaagacgcaaatcgctaatcatcaaatctttttcttttaaatgacttaaagcatctttttttgctttgatcacaaaagcccctgctaaacccataaaaacttgtttagaagtggtataatgagggtgtggatgataccagtaagttcctgcgctatcttgaggaatttcaaaacgatatattctttcttttcctgctaagataggatcatgtgggcttccatcttgatcaggtggcacaggaacgccatgccaatgtatagttgtagcttccttgagtttgtttttgactaaaatttcaagtttatctccttcaaaaacttctatttttggagcaggtactagaccattgtaagtataaaataaggtttttttacctttgataagctctatatgattttctttgatttctagggtagcacgaaaaatatttttttctttactttcatttttgagcaaaggcaaggcttttaaaatttctccttgggggaattgttttggatctaaaagttttaaattttttggagcaaagttgataaaagaagtatctaagtcatgatttatagaatgatttttatgcatggagtgcatatcgtgcataggatttgcataggctacacccatacttgctagagtaagtgcattaaattttaaaaaatttcttctattcattagtttttccttttgcttgattttttgtattatagtcattatttttttagttttagtaaatatttattttgaaaatttggtttaattttgttatgattttagcaatttaatcaaggaaaaataatgttttatgaaaaaattcaaactccagcttatattttagaagaagataaattaagaaaaaactgtgagcttttagcaagtgttggtgaaaaaagtggtgctaaagtgcttttagctttaaaaggttttgctttttcaggagcgatgaaaattgttggagaatacctaaaaggttgtacttgtagcggactttgggaagcaaaatttgctaaagaatacatggataaagaaattcatacttattcacctgcttttaaagaagatgaaataggtgaaatagccagtttatctcatcatatagtgtttaattctttagctcaatttcataaatttcaaagcaaaacacaaaaaaattccttaggtcttcgttgcaatgttgaattttctctagccccaaaagaactttacaatccttgtggaagatactcaagacttggaattcgtgctaaagattttgaaaatgtggatttaaatgctatagaaggacttcattttcacgcactttgtgaagaaagtgctgacgctttagaagctgttttaaaggtctttgaagagaaatttggtaaatggatagggcaaatgaaatgggtgaattttggaggaggacatcacatcaccaaaaaaggctatgatgttgaaaaacttattgctttgtgtaaaaatttcagcgataaatatggtgtacaagtttatcttgaaccaggtgaagcggtaggttggcaaacaggaaatttggttgctagtgtagtagatatcatagaaaatgaaaaacaaattgccattttagatacttcaagcgaagcacatatgccagatactatcatcatgccttatacaagtgaagttttaaatgctagaattttagccacaagagaaaatgaaaaaatttcagacttaaaagaaaacgaatttgcctatttacttactggaaatacttgtttagcgggtgatgtaatgggagagtacgcttttgataaaaagcttaaaatcggcgataaaattgtttttttagatcaaattcattacaccattgtgaaaaacacaacttttaatggtataagacttccaaatctcatgcttttagaccataaaaatgaacttcaaatgataagagaattttcttataaggattattctttaagaaattagtattatttataatttgcataaaatattaattttactcggaagagaatcaaagatataaattttatgcaaagtattttattttttcaaatataaaatcaactcaaatatctaattttcaatactttgatatgattttttaagattttaaatccttgtggaattttattgaaattcagtgatttttaaatcaaatagtattaagataaatcgatttaaaaatcggctttaaaatgaatattaggtatattttgcataatattcattcaagcaaaatttaaagctatttttgaaaattttgaatgcatggaggctttaatggatttggaaaaattaagattagctagaagtctttattatcaatgtctaggagagctttttgttttttcattttctgaagaaagattgtcaaaattacaagagtatttaaagacaatgcaagaatgtttatttgatgaaaatttaaaatcaaattttgatatcttgcttaagcatttagatgatgaaaattctatacaagcattttttaaagaatacgatttgctttttttaagtcttaaaaacagcattccaacgactttttcttacatagaagaaggttttgaaaattcaaatcctttactttgcgtgcgtcaaattttagtcaaaagtaaaataagacgcaatgaaaaattttttaaagaaagtgaagatagtgttggattttgtttattgttgatgagtgaatttttaaggcaaaatgaagatgatttagctaaagagctttttgaaaaagtgatcaataaaagcattgatgagtttttaggcgatgttttcatgaataaaaatgcgaatttatataaggaaattgcaagtattgcgatggcttttatggaatttgaaagactttgctttgaagtggaaaaacctgcaaaaataaattctaaaaaagtgcaaaatgatctatcgcgttcggaatttttaagaagagaagcaaataaacaaaggaggactcgtgaaaaatcgcagggaatttcttaaaaaatccgcttttgccttaggggctgctggagtgcttggtagcacaactttagctctagctaaagatgaagaaagaaaagatttggttaaaggtaaaagcaagaaaaaagaagtgctttttcaaagaagtgctaattgggaaaattattatataaaggctgagtaatgtcaagtgtaggtgaaaatatcaagcttacgcgtcgttcttttcttaaaatggcagcactttcaagtctagcaacaccgttgcttgctagaagtgaaactttaagagaagcgagtgctgatgagcttaaagaagcttatgaaggtagtaaaaaagtaaaaacagtttgtacagcctgttctgtaggctgtgggattattgcagaagtgcaaaatggtgtttgggtgcgtcaagaaatcgctcaagatcatcctgtgagttcaggtggacattgctgcaagggatctgatatgatcgatatggtgcgttcacatgtgcgtttaaaatatcctatgaaaaaagaaaatggagaatggaaacgcataagttatgagcaagctttaagtgagatcggagaaaaactagctgcttatcgtaaagaaaatcctgaaagtgttatgtttttaggttctgcaaaaatgagcaatgaacaagcttattatgtacgtaaatttgcagcgttttttggaacaaacaatgtagatcatcaagctagaatttgacacagcgcaacagtcgccggtgtggcgaatacatttggttatggcgctatgacaaaccatcttggagacattcaaagaagtaaatgtatcattatcattggggcaaatccagcggtaaatcatcctgtgggttttagacatttcttaaaagcaaaagaaaaaggtgcaaagcttatcgttgtagatcctagatttacaaaaagtgcagcaaaagcggatatttatgcaagaattcgtccaggaactgacattgctttcatgtatggaatgctaaaaatcatctttgatgaaggtttagaagatacaaaatatcttgatgaaagagtttttggaatcgataaaattcgtgaagaagcggcaaaatggacagctgaagaggtggaaaatgttacaggaatttctaaagaacttttggtgcaaatcactcacgaagtagctaaaaacaaaccaactacgcttatttgggctatgggtttaactcaacacactgtaggaacttcaaatacacgtttagcacctattgtgcaaatggtacttggaaatataggtaaatttggtggtggagttaatatcttacgcggacatgataatgttcaaggtgcttcagatatggcttgtttgagcgaaaatttaccaggttattatcctttaaatgaagcgacttggagatactatgccaaaatttggggtgtggattatgagtggcttttaggaaattttgtaagcaaagattggatgcataaaaccggactttcacttgctagatggtgggcagcggctttaaatggaaaagatggaaatgatgctatcgataacgcaggaacgcctttaaaagctttagtagttatgggaaatggtatcacttcgactgcacaacaagtaaaagttaaagaaggtttggaagctttagagcttttagttttagccgatccttttgtaaatgaagcaggcattattgcagaaagaaaagatggaatttatcttttacctgcagcaacacagtttgaaacaagcggaagtgtaacagcaacaaatcgtagcggacaatggagatttaaagttgtagatccactttatgaaagcatggaagatcaagaaattttatttgagcttgctaaaaaattaggtttttatgaagactttaccaagactttacgcgatgaaaaaggtgagattgtttggcctgaaaatgcaacaagagaaattgcaaaagcagttagaagtatagggcttaatggttggagtcctgaaaggcttaaaaagcatactttatactgggataaatttgatgaggtaactttagaaggaaaagatgaagttgctggtgagtattacgggcttccttggccttgttggagtgataagcacccaggttctcctgtactttataataccgacattgaagtcgcaaaaggtggtatgggctttagaaataattttggacttgagtatgaaggagag

SEQ ID NO: 3803 - DNA, 22316 bp, synthetic construct
  source 1..22316: mol_type = other DNA
  misc_feature 1..22316: note = Synthetic
tcgttttagtgggtatgggtggttcaagttgcggtgtaaaagccttgcgtgatatgctttttgatgaaaaaaataatcaaagagaactttttatacttgataataccagttcgcactcctttagcaagactttagagaaaatcaagctcgaagaaagtttgtttttaatcatcagtaaaacaggtagcaccatagaagtagtatcgctttttaagcttcttattgaacattttaagcttgatatgcaagagttaaaaaaatactttgttttcatcacagataaggattctaaactgcataaagagggtgagaatttaggcatcaaatgcttttttatccctgcaaatgtaggaggtcgttttagcatactttcagccgtaggtatagttccgctttgtttttgtggctataatgccaaggctcttttagaaggagctaaagcttgttttgaagatttttttactcacaaaaaagatgaaattttgcaaaaagcttatcattattgcacgcataaaaatgccaatatcaatgtacttttttcttatagtgatgcttttaagggttttaatgaatggtatatccagcttattgctgaaagtttgggtaaaaaacaaggttataaacgcataggtttaacccctatcgctcttataggagcaagggatcagcatagttttttgcaactcatcatggatggacctaaaaataaaactgtaacttttttaaaaatcaaagacgctcaaaaagcgcctattatccctgatattcattttaaatttttagattctttaagcaataaagtcaatttacacgatcttttaaatgctcaatgcgatgcgacaatgcacgctttgatcgctgaaaatttgagtgtggatatgatagaacttgaaaaacttgacgcttggcatgcgggatatttgatgtattattatgagctttttacttcaacttgcggggtaatgttaggaattaatacttatgatcagcctggagttgaggttgggaaattgattttaaaaaatattttaagatcgcagtaattttgttaaagaaaaagagtataatagaaataagtaaaattaataataaaaatttttaactaataataattattatttaagaattttttgttataattttaaaaattaaaaaaaggagttaacatgtcagtaacaaaacaattattacaaatgcaagcagatgctcatcatttatgggttaaatttcataattatcactggaatgtaaaaggtttgcaatttttttctatacacgaatacacagaaaaagcttatgaagaaatggcagaactttttgatagttgtgctgaaagagttttacaacttggcgaaaaagccatcacttgccaaaaaactttaatggaaaatgcaaaaagtccaaaagtagaaaaagattgtttcactccagctgaagtgatggagttgatcaaaaaagattatgaatatcttttggcagaattcaaaaaattaaacgaggaagctgaaaaagttagcgatactactacagctgcttttgcgcaagaaaatatcgcaaaatatgaaaaaagtctttggatgcttgcttcagctttacaaaatacttgtcaaatgtaatttcaaggggctttttgcccctttatgatttaaatcaatttttagaactttctcataaaaaaacttaaattctcaagagtcaaatttaaagaaaaatttatattttgattttaagcaaaataaaaatactctaatacatttatatcattacgccttactttctcatgctgcttatcttaatttaaatacaacagatatttttttaaatatagatagaaaaacattgtttaaggttttaactcataatatttttcaaaaagaatgcgttacaataggaaaatttgaacctttgatggcatttgattttatcaagagatttgatttacttgctcacattaatgaagaatgtcttgattcaaagggtggatttagagcaagcttatttcaaaacaaggaaaatcaagaatttattttagctatcgcaggaagtgatttaagacctttaaaatttgatattggagatttgatcagtgattttatacttctaaatggaaaaattcctaaaaaacaattcaattctttattgaaattttatacgctaataaaaaaagaattttgctttgataaaattaatttagtgggacactctttaggtggacatttagcacagctttttgttttggattttgcctcagaagttcaaaatctttacacttttcaagccccaggtattgctaaaaaaatactaaaggatgttaaaaataaagcttatatccaaaaaatttcttatcattttcatacttgtgatgattttaaaaaaaatacatggtataaatttaattttgttcaaaatttacattctaaaataggatatccaatttggttaaatataggaaataaattccatcatcctaagctttgtcccaagatattgcataaggttttaaatatgttataattttcctttttaaaaggataagatttgaagatattaaattttttttacgaaaatcatcccaaatttgaaataagctatgaaagaaaggtacaaattcctctttgtaatatcatcatcaaaggaccaaaatttagcggtaaaaaaaccttgatttttaactatttatcccaatttaagcccaatgaaattttatttttaaatttgcacgatactcgttttgaaaaccaaagcttagagcatctttcaaattttttagaaaaaaatgcccagataaaatttctttgtatttataatgttgaatttgccttaaatttgcaagatattaaaattcctatcatcataagtacagataaaaaagatttgcatatcgaaggatttcaagagcttgagcttgattattttgactttgaagaatttgtaagtatcagtagaaaaaatttaccgataaacaatctagtgggactttttttgcaaagtgggcgtagtaaattaggtgaaaaaaatatacttttaagacaaaattttaacactctagaacttgaaattttaaaatacttagctttaaatttaggacagcagatcagtatttccaagctttttttagagcttaaaaaaaggctaaaaacatctaaagatagcgtttatcacaccataaaagagcttgaaaatacctatatcatccatcctataagccatgatgaaaaaaagcttcaaaaaatttattttagggattttggcttaagaaacaatctatgcatacaaaaagattttacccatttgtttgaaaatcttattttaaatgagctttttaaatttaaacaagaatttttttacaataaattttttacattttatagtaaggtttcaaaaatcgcatatatttctagtccgacattggatatagacttgatcaaattgcgcgctaagaaaattctttctaagagtttagagcttggaatttttcatgtagttttcatcactctttcgagtgaagatagcttttttgagcaaggggtgaaatttgaagttttgccttttgataaattttcactcggcttttagctaagactagaaagaatttggagtattgtatcgctcaagatcgtatcgctggatgattttagtaacgatattgatataataacccttgcgctcggagtaagaatctaaagttttaatagcctctagtcctgttatttctttgccttcgctttcaaatttagctctttcgttgcgaaattcctcataagcaaagtgccgatttaaattcagtacataagaatccacactatcttgcaagctatcaaaaattctaattttatgttttttatcaggatgtcttagatcagggattaagcccttttctccccaggtccattctccaaaaagattatttgcctctcttgcaaaacggcttgttcctgtagcactttcgaccaaagcttgggctatacccatggattttggaattttttgaatgcgttttttgtattctgtaaaatcataaagattttcaacgcggtatttgtttttaagattgattaatttttctagattgttttggtttgaatttctaagtccatttttatacgcatcataaaaaaaagcttctacaaaagccctttctttggctatttcttcaaagctttcatcaaacattgcattcattttgacaaaaaatatttgtcttttttgttctacatcgagtttataatactcctctccaaagccatttttaagctcgctattgccaaaaagagggagtaaataaaaactaagaaaaattataattcgcttcaaagcaatatctcacttttcccttaaaaaataattcttcattttcgaatttaaaacttagctcttcaccgctttttggaatcactctagcttgattgtgaatttttttatttaagaatgcaagataaaaacaagctcccatgcccgtgccacatgcttgcgtttcatcttctacgcctctttcaaaagtgcgaactcttaaagtattgtcattttcaacttttacaaaatttacattggcattatatttttctctcatttgtttgcaaagcttaagatcaaactcatccaaattttcacaaaaatgcaccaaatgtggaactcccgtatcgcaaagttgccagtttttttcacactcactaaaggcatcttgtatgttttttatcttccctaaagaaacttctacgctattattatcaacatttgcttttataactcctgctccggtaagaaaagccatatggggtttgataccatttatatggtgtgcaaaatgcgctgctgctcttgagccattgccacacatagcagcccttgagccatcgttattataaaattcccattcaaagtcgtatttttcatgaggtaaaattactataaagccatccgcacctatgccttcataacgattgcaaagttctttagctaaagcacttctgtcttttttttcactcgcattcattatcacaaaatcattgccacttgcgcaatatttataaaacttcacatttgtcctttggaaatattttgtattactttaacacattcttgcctaaaatcgacataagagccagtatttttaatgataaaatccgcttttttaagtttttcttcaatattcatttgagaatcaagccttgcttttgcagtttctaagcttaaattatctctttgtatgattctttttaggctgagttctttaggagcatagattaagatcacttttcccaaaccatcataagcaccgctttcaaaaaaaagaggaatttctacaaaaaaagctttattttcttgttctagaatttgcatttgttctaaaatttgagcacgaattttaggatgggtgaaattttctaatatggttttggcttctttgttgttaaaaacaatttctccaaggatttttctatctatcttaccctctgctttcaataaattttttttatgaaatttagagaaaatttgagccagttccaaagcatatttatctaaaatttcgtgagcgatactgtctgcgctaatgcttttaaagcctaaagaattcgctatttctataaaagtgcttttaccacaagcaattgaagcggttacaaaaaaagcatttttcatcttatgccttattaaaacttttttcgttaaaatacctttttagttcttaaaggaaaataaatgaaaatttcatatgaagatgcaggcgtaagtatagataatggaaatgcctttgtagaggctataaaacctttggttaaagaaacttttaatgataatgttgtaggtggaattggttcttttgctggtgcttttagaatgccaagtggttttaaaaagcctgtgattttaggtgcaacagatggggttggtaccaagcttcgcttggcaattgatgctaaaaaatatgatactataggacaagatttagtagcaatgtgcgtgaatgatttgatttgtaattttgctacgcctttgtttttcttagattattatgctacagctaaacttgaagtagaagtagcaaaggctgttgtatcaggcattgccaagggatgtaagatggcaaattgtgcattaatcggcggagaaactgctgaaatgcctggaatgtatgcaaaagatgattttgatcttgcgggttttgcagtgggtatggctgaagaagatgagatcgatagaagtaaatttgttaaaaatggtgatattttattggcacttcctagttcaggacttcattcaaatggttattctttagctagaaaagtactttttgaaagtttaaaattaaaatttgatgacaagataggggataaaaatttaattgatattttattagagcctacaaggatttatgtgcgtgattttcttacattaaagccttatattagtgctctagctcatattacagggggtggtttagtagaaaatttaccacgcgttttacctcgtggtatgggtgcaactatacgcaaacatcatcttaaaactcctgaaattttttatactataggacaggctgtagaagaaagcgaaatgtatagaagctttaacatgggagcgggtttagtaatggttgtagatccttctaatgtaagtaaggttttagaaaattcagatgcctttattatcggcgaaatttgcattaatgaaggtattgttttagagtgaaaagaatttatttttttaagatattttaagagtaaattaaaaaaataataaggaaaagtgatgaaaaatattgtctttcattcggatggttttggagatttattagtttgttttaaagctttgtatgctataaagcaactctatccagagtataaattatttttattaacaaatggattaatggaaagtgattttttagaaaaaattccatttattgatgaagttttgatttataaggatgattttttagaaaaaattcaaagcaaaaatccagtaatttttattaccacgcgaagacaaggtttatattttaaaaaattaaaatttttaaatgttcaaaaatgtatagtattccctcatcttattagtataatttctaaaaatttaaccacacctttaccattttttagagctaaaaaacatatgagtgaaattgttttaaaattggttaggatgattaatactaggcattttgataaaaattttaatcaaattgatttttctaaaattaaaaatttattaccttatgatgcaagattaagtgataatttttttaaacaaattgatacaaaatatgaaaaaattataggtattaatgctttttcaaataatagcgaatatagaggatttaatttttttataaaagattggatagggcttgcaaggcaactttctttaaaatatcctaaatttttatttatacttttaaattttagtacgaattctattcaatataatattgatcagaatgcaaatttgaaagttttctgtaataataaaaatattgcttctttggtaagtatttctcaaaagctagattttttaattactgttgatactggaaatttacatctttgtgatattttacaaattcctactttggctttcacaagtagtcttgcagcttatagatttggaggtggaagttatggaggtagatttgataaattgatagtaaaaccagcttggcaaaaagaatatagaaaaatttatgaaatttttactaaaaaagcagaaaataatttagaaaatttatagtttttataaaataataaatatttattatttaaagatactgctatttttgtagtgttttgttcttttggcacaggattggtttgtgctagataaaaggctacaagcacgtttgcaagcatagcgataagtaaaagaggagtggttcgttttataatatccattggagctacttttgcaaatccagctaaagctatgatcccacctgctatgggtgaagctgcgcgacctaaacaagatgcaatttctacaggtaaaactagagtaataggtgcaatgcctaatttcgtagctatatcaggagctagttttccaaaagcattaaaagcagcaattccacttcccataatcactgtggcaaaataaactaaaaagcttaaaatagctatactcaaaagaattccaaaccatgcaaaatttcctgttccaagatttgaaaccgcgttagcaaggatattaactccaccaagtgctttaatgcctttagcacatactccagcggcgatgattatgcttacgactgagataaaaatttcagccatagccttttaaaatcaccatcatatcttcgcctaattttctagcatttctgtgtcttgcaaattcaacaagaaaaactaaagaaattcttacaaaatttgctatcacaacatcgagcttgatagtaaaaaaatacgctataaataaaaatataacaggtaaccaaggaaagagtgtgtaaaaagtagggcatttaggatcaatgatttgcggaatttcaacttcatcatttaaaacacctttttctttatctcttttatcaatccaagcaaaataaaaaggaatcaagatggcaataattacaacataggtaatcacactataaatttggtaatttaaaaaaagccctacgacattatcactttgtcctaccatatctgccatattgattgaatttccatcttttggatcataatcaagtgcaattaaagaaagcgcacatacagttgtaataggacggattttaagtgagattaaaacaggatacatacatgctaacaaaagcaaaagcaattcagcatagctagaaatgacgatttttaaagccattccaacaacaaaagttccacttaaaatcaagtatttatttttgatttttcctgagggtttatttgctaaaaaagcaagttttgccgaagcattgatatgtttcatgtaagcagtaaagcctgccacactcatgataataagccctgctccagaaagctgacttttaaaagtcgctgtgataaaagataactatcaagtaaagcatttaaaagcttgtatactctctgcttggagcttttggtataggtgttcctgtgatataaaaagcaaaaataagcaagataatatttgaaagaaaaatacaaaaatgggatcgtatttttttgagtatatcataaaaattagcatagggtctcttgaatttacaataaattggattttatctaaatttttaaataaaaaatattttttatttaaaaattacttgttttttgtattataaaattaacatatatagtttggttactgaaaagtttatgtttgtttaaaaaaatgatttttgtattataattatacacaaatcataaatattaaaaaggatctagtgtggcaagaattttggcatttgatataggaataagctctattggctgggcatttagtgaaaatgatgagttaaaagattgtggagttaggatttttacaaaggctgaaaatcccaaaacaggagaatccttagccttgccaagacgccttgcaagaagtgctagaaaacgccttgctagacgcaaagcaaggctaaatcacttaaaacatttaatcgcaaatgaatttaagttaaattacgaagattatcaaagctttgatgaaagtttagccaaggcttataaaggatctttaattagcccttatgagttaagatttagagctttaaacgagcttttaagtaagcaagattttgcaagagtgattttacatattgcaaaaaggcgtggctatgatgatattaaaaatagtgatgataaagaaaaaggtgcgattttaaaagctatcaagcaaaatgaagaaaaactagcaaattatcaaagtgtgggcgagtatctttataaagagtattttcaaaaattcaaagaaaattccaaagaatttacaaatgttagaaataaaaaagaaagttatgaacgctgcatagcgcaaagttttttaaaagatgaattaaagcttatttttaaaaaacaaagagaatttggcttttctttttcaaaaaaaatttgaagaagaggtgcttagtgtagcattttataaaagggctttaaaagatttttctcatttggtgggaaattgtagtttttttaccgatgaaaaaagagcgccaaaaaattcgcccttagcttttatgtttgtagcacttacaagaattatcaatcttttaaacaatcttaaaaatactgaaggaattttatatacaaaagatgatttaaacgcccttttgaatgaagttttaaaaaacggcactctaacttataaacaaacaaaaaagcttttgggcttaagcgatgattatgaatttaaaggggaaaaaggaacttattttattgagtttaaaaaatataaagaatttataaaagccttaggtgatcatagtttaagccaagatgatttaaatgaaatagcaaaagatattacccttataaaagatgagattaagcttaaaaaggctttagcaaaatatgatttaaatcaaaatcaaattgatagtttaagcaaattggaatttaaagaccatttaaatataagttttaaagccttaaaacttatcactcctttaatgcttgaaggtaaaaaatacgatgaagcttgtaatgagcttaatttaaaagtagcaatcaatgaagataaaaaagattttttacccgcatttaatgaaacttattataaagatgaggtaactaatcctgtggttttaagagcgattaaagaatacagaaaggtcttaaatgctttacttaaaaaatacggcaaagtgcataaaataaacattgaattagcaagagaagtaggtaaaaattacagccaaagagctaaaatagaaaaagagcaaaatgaaaactacaaggccaaaaaagacgccgaacttgaatgtgaaaaactaggcttaaaaataaatagcaaaaatattttaaaattaagattatttaaagaacaaaaagaattttgtgcttatagtggagaaaagattaaaattagtgatttgcaagatgaaaaaatgcttgaaattgatcacatttacccttattctagaagttttgatgattcttatatgaataaagttttagtttttaccaagcaaaatcaagaaaaacttaatcaaaccccctttgaagcctttggcaatgatagtgcaaaatggcagaaaattgaagttttagcaaaaaatttacctactaaaaagcaaaaaagaattttagataaaaattacaaagacaaagagcaaaaagactttaaagatagaaatctaaacgatactcgctacatcgcaaggcttgttttaaactacactaaagattatttagattttttacctttaagcgatgatgaaaatacaaagttaaacgacacacaaaaaggctcaaaagtgcatgtagaagcaaaaagcggtatgcttacatcggctttaaggcacacttggggctttagcactaaggatagaaataatcatcttcatcacgccatcgatgcagtaattattgcttatgcaaacaactctatcgtaaaggctttttctgattttaaaaaagagcaagaaagcaacagtgcagaactttatgcaaaaaaaattagtgaattagattataaaaacaaaaggaagttttttgagccttttagtggttttaggcaaaaggttttagataaaattgatgaaatttttgtctcaaaacctgagagaaaaaagccaagcggagctttacatgaagaaacatttagaaaagaagaagaattctatcaatcatacggcggaaaagaaggagttttaaaagccctagagcttggtaaaatccgcaaagtaaatggtaaaatagttaaaaatggcgatatgtttagagtggatatttttaaacacaaaaagacaaataaattttatgctgtgccaatttatactatggattttgctttaaaagtattaccaaataaagctgtagcacgaagtaaaaaaggtgagataaaagactggattttaatggatgaaaattatgagttttgcttttctttatataaagatagtttgattttaattcaaactaaagatatgcaagagccagaatttgtttattataatgcttttacaagctctactgttagtttgattgtttcaaaacacgataataaatttgaaacgctaagcaaaaatcaaaaaatattgtttaaaaatgcaaatgaaaaagaagtaatcgcaaaaagcataggaattcaaaatctaaaagtatttgaaaaatacatagtttcagcacttggggaagttacaaaggctgagtttagacaaagagaagattttaaaaaatgagttacgatgaagcttttaaaacactgcttattagctctaatgccaagctaaatttagagctaaatcatcttgtgattaagcaagatgaaaatatagccaaattgtttttaaaagatataaacatcatcgttttagaaagcttacaagtaagcattagttccgcactttttaatgcctttgcaaggcataaaatcatcttgctaacctgcgatgaaactcatagtataaatggtgtttttactccttttttagggcattttcaaagtgcaaaaatcgcaaaagagcaaatgaatgtaagcgctcaaaaaaaggctattttatggcaaaaaatcattaaaaataaaatcctaaatcaagcctttgttttgaaaaaacacaataaaatagagcaaagcaatgagcttataaatttggctaaaaaagtaagcttaaatgatagtaaaaatatcgaagctgttgcggcggcgctttattttaaaactttgtttggcgtttctttttcaagagatgagctttgctttgaaaattctgctttaaattatggctatgcaatcattagggcttgtattattagagcagtttgtataagtgggcttttgccttggcttggcataaagcacgataatatttataattcttttgcgctttgtgatgatttgatagaagtgtttagggctagtgttgatgattgtgttttaaagcttaagggtgaaagtgagtttttaagcaaagatgacaaaagagcgttgattggcaatttacaaagcaaaatcaattttgatgggcaaaattatcctttaaacagagcgataaatcattatgtggcaaattttaaaaatgctttattgtatgaagatgaactaaagatagtgaaatttgatgattgaagataaatttatgcgcgtgcttttgatgtttgatgtacctactaaaagtaaaaaagagcaaaaactagcaagtaaatttagaaacaatcttataaaattaggttattttatgctgcaatttagcgtttatatgcgtatttgcaagggtttaagttctgcaaaaagttctattgaaaatgtaaaaaagattttgccaccttatggaaatgtaagggctttaatcatcactgaaaagcaatttgataaaatggagcttttgcttggtggcatagtttttaatgaaaaagttaataacgaaaccaatttaacactttttgatatagatagtcatggagaatttaaatacaaaaattcaaataatgaagaaatacaactaaacaaaaaacaagaaaaatatcatcagcaaaatttatttgaattttaaaagcggttttaggggattgtaaccccgcagagtcccgcaaactctttattttagtccctttttaaatttcttatgagattatagcataatttttgctatttttcatgaaaaaaccccgaaattttcattatctggtaaatatctattttaccataaagaaatttaaaaagggactaaaacttgtttttctttttcataagcaagatttttattttaccataaagaaatttaaaaagggactaaaactacaggaatggataaatccttatttgcaaaattttaccataaagaaatttaaaaagggactaaaactccaaagcgttttaaagcatttcctaaagcattttaccataaagaaatttaaaaagggactaaaacctttacaatattgtaaaaataataaggttgattttaccataaagaaatttaaaaagggactaaaacaataacattagagttactataagttgctaaattttaccataaagaaatttaaaaagggactaaaacaataatggctaaatatttcatgagaatggaattttaccataaagaaatttaaaaagggactaaaaaaccctagtggattgaaactccgctagggctaattactccactaaaaggaggttgcaaatttgaaacttattgaaatttagggttgattaaaatcgaaataaaattatttaaataattttaaggcataaagataatatccactaagctttcattttctaacatttcacattcttttggtactaccataagggcagctttattgttaagattgtttataatcgcactagagccttcttttttaccttcaagattagctaaaatgcgtccatttttaaattccacattacaagcgacaaattccaaataaggtgtttttttcttgtagcttccttgtaaaaaggctttgcaaatatagtctttaggctgaagtaaccaagagtttaaaatctctcttgcgtaaagattaaacattaccatagccgagtaaggaaaacctggtaaggcgatgatgaatttttcattagccttggctattttgatatgtctgcctggttttatgtcggctttatcgatgatgatttcgtattctttgatggctttttttaaaaagtcaaaatctcccatagaaaccccgcccgttgtaaccaaaatatcacaactttgcaaagcactttcaagggtggaaaaagtggctttctcatcatcttttaaaagaggaaaaacccttgtatcgcaatttaaatttttagctaaattagctatggcgatatgatttgaagagcggatttgagcaggattttccaaggcttctcctagatctttgatctcacttccactacttaaaacccctacaataggctttataaacacactaatgtgaaaaaatccaagttcagctaaaagagctatctcgctataatttaaccttgtgccttttttgagtaaaatttcatcttttttatagttttctcctaccgcacgcacggcaaaagcttggggaacttttttttctataaaaagagtatcattttctatgcgtatattttcaacagggactaaagtatcgcttccttcgctcatgagtgagcctgtaaaggtttttacacaagtgccattttgtacgctaaattgtggcatagtacccgcaggtgtgaggcctaaaatttttaaaggcttgtcttgatcttcaaatttgatcgcataaccatccatagccgaggttggaaattcaggctgatttttaggggcttttatatcttgagctaaaatgcgtcctaaacactctgtaagggctattttttcaatcttttcataagttttgatatgagaatgtaaaatttttaaactttcttcataagacattagcattttttatccttttaaaagtcctgcaccgcaaagcttggttgatctttctttggcataaattctttctttgtttatcacatcatacttccaaatgggcgcacttgctttaaaatcttcaacaaattcattaagaagtttaagtcctaattttctttgtttgcttaaaattcctgcaaaatacgagctttcatgtatcgctacatcgcctatagagtgagcaaaaagcaagctaataccatcaaaatctactcttttttgccactcatcaaaccatttttttaaaagcgattcataaatatcaaaactaagtgcctcaatacctccttcttcacgcacaataccacaaaaagtcagtaaagcaccgcagtttttatccttggaaaattcataccattggctataaattttaggaatatctaaagagccttgataaagtgtaaaatgtttcatttagcccccacaaactggcggtaaaagtgctattttatcaccatcttttaacttagtgttttcatcaaaaatgatttcatcgtttaaagatacggcacaaagttctagccattcttttaaactctcatctttttgcaaaatttcttttaattcttttaaattttttaccttaagttctaaattttctttatttatggggcctaaaaattccacttttaccattttattcctttacttctaaatttcccatcattcctaaatcttcatgttctaaaatatggcaatgatacattctaagtcctttaaaatcttgtttcattctaagtcttaactcttcattaggacgcacatttatagtatctcttaaggctctaaattcggctttttgaactttgccattgagttttgatgagatgagttcaaattgcgtgccgtgtatgtggaaaggatgatccatgtgagatttatttatcactatccagtcttcaactactccaagcttggagcttaaatcaatgcgttttaaatcatagcttttgccattgattaaaaacatagacgcaagagcgatttttaattcgctttcactttttcccatcataccatgcatttgcatatgatcttcactcatgattatttctttaaattccttaggctcttctaaaggtttgaaaatttttaatttttttggaagttctaaattttctttttttaagctaatactagctaaaaatagggtattagattcttcttttaccatcattttatccctatcataataagcactttctagtctaaattccccatcttttggagcatcgattaaaacttctacgcgagaagcaggacttaagaaaagttcttctttgtaaatagctttttctataagtccaccatcagtaccaacaagtataaacttagctccttgtatgcgtaaatttaaatatcttgctgcagtagcattataaatgcgtatgcgttcgtttgtggcgagtttgattttaggtttgaattgtccattgatgagtacaaattctccttctctaccattaagccaatcatttaggttgttgtttggaatttgagcgttttcatcaagacgcaaatcgctaatcatcaaatctttttcttttaaatgacttaaagcatctttttttgctttgatcacaaaagcccctgctaaacccataaaaacttgtttagaagccgtataatgaggatgtggatgataccagtaagttcctgcgctatcttgaggaatttcaaaacgatatattctttcttctcctgctaagataggatcatgtgggcttccatcttgatcaggtggcacaggaacgccatgccaatgtatagttgtagcttctttgagtttgtttttgactaaaatttcaagtttatctccttcaaaaacttctatttttggagcaggcacgaggccattgtaagtataaaataaggtttttttacctttgataagctctatatgattttctttgatttctagggtagcacgaaaaatatttttttctttactttcatttttgagtaaaggcaaggcttttaaaatttctccttgggggaattgttttggatctaaaagctttaaattttttggagcaaagtttataaaagaagtatctaagtcatgatttatagaatgatttttatgcatggagtgcatatcgtgcataggatttgcataggctacacccatacttgctagagtaagtgcattaaattttaaaaaatttcttctattcattagtttttccttttgtttgattttttgtattatagtcattatttttttagttttagtaaatattttgaaaatttggtttaattttgttatgattttagcaatttaatcaaggaaaaataatgttttatgaaaaaattcaaactccagcttatattttagaagaagataaattaagaaaaaattgtgagcttttagcaagtgttggtgaaaaaagtggtgctaaagtgcttttagctttaaaaggttttgctttttcaggagcgatgaaaattgttggagaatacttaaaaggttgtacttgtagcggactttgggaagcaaaatttgctaaagaatacatggataaagaaattcatacttattcgcctgcttttaaagaagatgaaataggtgaaatagccagtttatctcatcatatagtgtttaactctttagctcaatttcataaatttcaagctaaaacacaaaaaaattccttaggtcttcgttgtaatgttgaattttctctagccccaaaagaactttacaatccttgtggaagatactcaagacttggaattcgtgctaaagattttgaaaatgtggatttaaatgctatagaaggacttcattttcacgcactttgcgaagaaagtgctgatgctttagaggctgttttaaaggcttttgaggagaaatttggtaaatggatagggcaaatgaaatgggtgaattttggaggaggacatcacatcaccaaaaaaggctatgatgttgaaaaacttattgctttgtgtaaaaatttcagcgataaatatggtgtacaagtttatcttgaaccaggtgaagcagtgggttggcaaacaggaaatttggttgctagtgtagtagatatcatagaaaatgaaaaacaaattgctattttagatacttcaagcgaagcacatatgccagatactatcatcatgccttatacaagtgaagttttaaatgctagaattttagccacgagagaaaatgaaaaaatttcagacttaaaagaaaacgaattttcctatttactaaccggaaatacttgtttagcaggtgatgtaatgggagaatatgcctttgataaaaagcttaaaatcggcgataaaattgtttttttagatcaaattcattacaccattgtgaaaaacacaacttttaatggtataagacttccaaatctcatgcttttaaatgcaaaaaatgaacttcaaatgataagagaattttcttataaggattattctttaagaaattaaaaattttttggaagaataattttattatttctttttagcataaaatattttttaaacaacaaaatgaaagttttgttttttaggcttaaatattttatgcaacttttttataaaaaccttatcaagatactattttataggattttaaggatagattctattttttcatatcaggcagatttttaagagaaattcagttccttttaaaacaaatcatattaagataaatcagtcaaaaataaggattaagaaggaaaattaggtgtaatttgcataatattattttgcaaattatttaacgacaaatcttcaaaaatttgaatgagttaaaaatggatttagaaaaactaagattagctagaagtctttattatcagtgcttaggagaacttttcgttttttcattttccgaaaatagattgtgtaacttaaaagcttatttagaagctatgcaagagggtttatttgatgaaagtttaagaacaagttttgaaattttactttctaatttaaaagatacgcaagatctccaagtattttataaggaatacgacgagctttttttagcacttaaaaatactattcctatgactttctcttatatagaagaaggttttgaaaattcaaaagcattgcttaatgtaaggcagattttagctaagagtacaatccgccgcaatgaaaaaatttttaaagaagctgaagatagtgtaggattttgttttattttgatgagtgaatttctaaaaaataaggaagatgaacttgctaaggcattgtttgaaaaagtcatcaatcaaggcattgatgaatttttaatgcttattttttcaaattcaaaagcgaagctttataaagaaatagcaaatattgctgcgcagtttatagaatttgaaagatattgttttgaacttgaaaaacctactataaaaccttctaagaaagttcaaaatgatttatctcgttctgaatttttaagaagagaagcaaataaacaaaggagatctcgtgaaaaatcgcagggaatttcttaaaaaatctgctattgctttgggtactgcaagtcttttaggcggtgcaagtgtagcttttgggcaagatgaagaaagaaaggatcttgttagaggcaaaagcaaaaagaaggaagtgctttatcaaagaagtgctaattgggaaaaatattatatgagggctgaataatgtcaagtatgaatgaaactatcaagcttaatcgccgttcttttcttaaaatggccgcgctttcaagtttggcaagtccgttgctagctagaagcgaaattttaagagaagcaaatgcggatgaattaaaagaagcttatgaaggaagtcaaaagattaagagtgtatgtaccgcatgttctgtaggctgcggaattattgcagaagttcaaaacggagtgtggttgcgtcaagaaatcgcacaagatcaccctgttagctcgggaggccattgctgtaagggctctgatatgatcgatatggtgcgttctcatgtgcgtttaaaataccctatgaaaaaagaaaatggagaatggaaacgcataagttatgagcaagctttaagtgaaatcggagaaaaattagcagcttatcgtaaagaaaatccagaaagcgttatgtttttaggttctgcaaaactaaacaatgaacaagcttattatataagaaaattcgcagcattttttggaaccaataatgtagatcatcaagctagaatttgacacagcgcaacagtcgccggtgtggcgaatacatttggttatggcgctatgacaaaccatcttggagatattcaaagaagtaaatgtatcattatcattggggcaaatccagcagtaaatcaccctgtaggttttagacacttcttaaaagcaaaagaaaaaggtgcaaagcttatcgttgtagatcctagatttacaaaaagtgcggcaaaagcggatatttacgcaagaattcgtccaggaactgacattgctttcatgtatggaatgctaaaaatcatctttgatgaaggcttagaagatacaaaataccttgatgaaagagtttttggtatcgataaaattcgtgaagaagcagcaaaatggacagctgaagaagtggaaaatgttacagggatctctaaagaacttttggtgcaaatcactcacgaagtagctaaaaacaaaccaactacgcttatttgggctatgggtttaactcaacatactgtaggaacttcaaatacacgtttagcacctatagtacaaatggttttaggaaatataggtaaatttggcggcggagttaatatcttacgcggacacgataatgtgcaaggtgcttcagatatggcgtgtttgagtgaaaatttaccaggctattatcctttaaatgaagcgacttggagatattatgctaagatttggggcgttgattatgagtggcttttaggaaattttgtaagtaaagattggatgcataaaactggactttcacttgctagatggtgggctgcagccttaaatggtaaagatggaaatgataaagtggataatgcaggaacgcctttgaaagctttagtggtaatgggaaatggtatcacttcgactgcacagcaagctaaagttaaagaaggtttggaagctttagagcttttagttttagccgatccttttgtaaatgaagcagggattatcgcagaaagaaaagatggaatttatcttttacctgcagcaacacagtttgaaacaagtggaagtgtaacagctacaaatcgtagtgggcaatggagatttaaagttgtagatccactttatgaaagcaaagaagatcaagaaattttatttgagcttgccaaaaaattaggtttttatgaagactttactaaaaccttacgcgatgaaaaaggtgagatcgtttggcctgaaaatgcaacaagggaaattgcaaaagcagttagaagtataggacttaatggttggagtcctgaaaggcttaaaaagcatactttatactgggataaatttgatgaggtaactttagaaggaaaagacgaggttgctggtgagtattatgggcttccttggccttgttggagtgataagcatccaggttctcctgtgctttataataccgatattgaagttgcaaaaggtggtatgggctttagaaataattttggactcgagtatgaaggagagagtttgcttgctaaaaatgcacctttaaattcgcctattaatacaggctatccacaaattactaaagataatatagaaaaagttttaggtattactttaagtgctcaagaaaaagaaaa

SEQ ID NO: 3804 - DNA, 22229 bp, synthetic construct
  misc_feature 1..22229: note = Synthetic
  source 1..22229: mol_type = other DNA
cttttcgtcgtggcaaaccttatatgttaaaacctgcagtagataaggctttaagtgaagggtgtgaaagtgtagaaaaagtacttatagttatacgcaataatgagcctatagaatatattaaaggaagggactatgtttataacgaacttgtgaaaaatgagtcttataagtgtgaacccgaaatcatggatagtgaggatttgttgtttttgctttacacttcaggatcaacgggcaagccaaaaggagttatgcatgcaagtgcaggatatatactttgggcacaaatgactatggaatgggtttttgatattaaagattatgataattattggtgtagtgctgatgtgggttggattacaggacatacttatgtagtttatgggcctttagcatgtggagcaacgactataatgcatgaaggaactcctacttatccaaattctgggcgttggtggagaatgatagaagagtatcaaataagcaaattctacacttcgccaactgccataagaatgcttcatgctgatgcacctaatgagccaagaaaatatgatttaagtacgcttgaagtgcttggaacggttggagagcctatcaatcctagtgcttggaagtggttttatgatgaaatagggggaactaaaagtcctatagtcgatacttggtggcaaacagaaacaggtgggcatatgatcacgcctttaccaggtgccactcctttaaaaccaggttgtgccaccttgcctttgccagggatttttgcagaagttattgatgaagaaggcaataaaaaagatgaaggtgaagatgggttgctttgtataactaaaccttggccttcgatgattcgtggaatttggggcaatgatgaacgctatatagaaagttatttttctcaagctaaaaaggatggaaaagctgtatattttagtggtgatggtgctttttatgataaaaatggttatattaccatcacaggaagaacagatgatgtggttaatgttgcaggacatcgtataggaacggctgaaattgaaagcgctattgctaaacatccaagtgtagcagaatcagctgtagtgagtattttggatacgattaagggcgagtcattgtttgcttttgtggttttaagtcctgcatccagttgtgatcttggcggagctatagaaactttaaaagaacttaatgacattttaagagtagaaataggacctatagctaaaatagaaaaaattctttatactccaggtttgccaaaaactagaagtggtaaaataatgagaagaattttaagaactatagcaagaggcgaagaaatcaaacaggatatttcaacacttgaagattctaaagtagtagaaaccattgttaaattagctaaggcagagtttgaataacaaggtaaaaagaactttgcctagttgcatgaaaattcataaaaataagctataatgataaaaaaataaaaggaaatttttatgcttcaaacttgtattttccctgcggcaggttatgggacgagatttttacctgcaacaaaaactttacctaaagagatgttacctatcttaaccaagcctttgatccattatggagttgatgaagctttagaagcaggaatggaaaatatgggctttgtcacagggcgtggaaaaagagctttggaggattattttgatatttcttatgaacttgaacatcaaatttcaggtacaaaaaaagaatacttacttgatgaaattcgctctttgatcaatcgttgtacctttacttttacaagacaaaatcaaatgaaaggcttaggtgatgcggttttaaaaggtagacctttggttggcgatgaagcttttggcgtaattttggctgatgatttgtgtgttaatgaagaaggcttaaatgttatggctcaaatggtaaaaatttatgaaaaatatcgctgcaccatcatagctgtgatggaagtaccaaaagagcaagtttcaaactatggagtaatttctggaaattttgtagaagaaaatcttatcatggttaattctatgatagaaaaaccaagtcctgatgaagctccaagtaatcttgctatcataggaagatatattttaactcctgatatttttggaattttagaaaatactaaagcaggaaaaaatggcgaaattcaacttaccgacgcgcttttaactcaagcaaccaatggtatggttttagcttataaatttcaaggaaaacgctttgattgtggaagtgtagaaggctttgtagaagcgacaaattatttttacgagaaaagtaaatgttaaacaatacacttttttttaagcaaagtgaaattcacactataagttcttatgcaaatcgtattaatgatgaggtaaaaagtggagatatagggtattatcatcttattgatacaagtttgaatttaatcgatgagagtttggcttttatcaaagacaaagaatacataaaaaatatcgttttagtgggaatgggtggttcaagttgtggtgtaaaagccttgcgtgatatgctttttaatgaaaaaagcaaccaaagagaactttttatactcgataacacaagttcacattcttttaataagactttagaaaaaatcaagcttgaggaaagtttgtttttaatcatcagcaaaacaggtagtactatagaagttgtatcgctttttaaacttcttattgaacattttaaacttgatatgcaagaattaaaaaaatactttgtttttattaccgataaggattcaaaacttcatcaagaaggtgaaaatttaggtattaaatgcttttttatccctgcaaatgtaggaggtcgttttagcatactttcagccgtaggtatagttccgctttgtttttgtggctataatgccaaagctcttttagaaggagctaaagcttgttttgaagatttttttactcataaaaaagatgaaattttacaaaaagcctatcattattgcacacacaaaaatgccaatatcaatgtacttttttcatatagtgatgcttttaaaggctttaatgaatggtatatccagcttattgctgaaagtttaggtaaaaagcaaggctataaacgtataggtttaactcctattgcactcattggagcaagagatcagcatagttttttacaactcattatggatggacctaaaaataaaactgtaacttttttaaaaatcaaagacgctcaaaaagcacctattatccctgatattcattttaaatttttagattctttaagtaataaagtcaatcttcacgaacttttaaacgctcaatgtgatgcaactatgcacgctttaatcgctgaaaatttgagtgttgatgtgatagaacttgaaaaacttgacgcttggcatgcgggatatttgatgtattattatgaactttttacttcaacttgcggtgttatgctagggattaacacttatgatcaacctggtgtggaagttggaaagttgatcttaaaaaatatattaaattcttaatcaaaattcattaaaaaagagtataatgattttaaattaaaattataataaaaatttttaattaataataattattatttaagaattttatgttataattttaaaaatcaaaaaaggagtcaatcatgtcagttacaaaacaattattacaaatgcaagcagatgctcatcatctatgggttaaatttcataattatcactggaatgtaaaaggtttgcaatttttttctatacacgaatacacagaaaaagcttatgaagaaatggcagaactttttgatagttgtgctgaaagagttttacaacttggcgaaaaagccatcacttgccaaaaagttttaatggaaaatgcaaaaagtccaaaagttgcaaaagattgctttactccacttgaagtcatagaactgatcaaacaagattatgaatatcttttagcagaatttaaaaaactcaatgaagcagcagaaaaagaaagtgataccacaacagctgcttttgcgcaagaaaatatcgcaaaatatgaaaaaagtctttggatgataggtgctactttacagggtgcttgcaaaatgtaatttaaggggctttatgccccaattatacaaactaggttataatatccttttttaaaggataaaattgaaagtacttaattttttttatgaaaaccaccctaaatttgaagtaagttatgaaagaaaaaatcaaatttcaaaaccaaatattatcataaaaggcccacgattttgtggtaaaaaaacacttatttttaattttttatctcaatttaaagcaagtgaaattttgtttttagatttatatgatacacgctttgaaaaacaaagtttagaaagacttgctgattttttgaatgaaaatttacaaattaaaattctttgcctttataatttggattttatccctaatttagaaaaaattaaaattcccatcatcttaagtacaaatataaaagatttaaatataaatgggtttgaagaacttgaacttgattattttgattttgaagaatttattagtgtaagtaagaaaaatttacctataaataatttagtaggtctttttttgcaaagtggacgcagtaaatttggagaaaaaaacatacttctaagacaaagctttactcttttagaattagaaattttaaagtatttagctttaaatttgggtcagcaaatcagtatttctaagatatttatagaacttaaaaaaatattaaaaacttcaaaagatagtgtttatcaagctataaaaaaattagaaaatacttatgtgatctatactttaaaacatgatgaaaaaaaacttcaaaagatttattttaaagattttggcctaagaaataatctttgtatttcaaaggatttttcgcatttatttgaaaatttagttttaagcgagttgtttaaatttaaagaagattttttttataacaaatactttaacttttatagccaaatatctaaaattgcttatatttcaagtccaactttagatattgatttgattaaattacgtgctaagaaaattttaccaaaagctttagaacttggaatttttcatgtgatttttatcactctttcaagcgaggatagtttttttgagcaaggggttaaatttgaagtcatatcttttgataaattttcacttggattttaggtgttgtttgagtttgtatcgtatttttcaaggttgtatcgtttgatgatttttgtaataagattgatataatatcccttgcgttcagaataagaatctaaagttttaatagcctctagccctgttatctctttgccttcgctttcaaatttagctcttgcatcgcgaaacttttcataagcaaaatgacgatttaaatttaaaacataagagtcaacactatcttgcagactatcaaaaatcttaattttgtgttttttatctggatgtcttaaatcaggaattaaacctttctcaccccaagtccattctccaaaaagattgtttgcttctcttgcgaagcgactggtacctgtagcactttcaactaaagcttgggctatacccatggattttggaattttttgaatacgttttttatattctgcaaaatcataaagattttcaatgcgatatttgttttttatcgtgataagtttttcaagatttgtttgatttgaagtcctaaagcctgttttgtaagcatctttaaaaaaggcttcaataaaagctctttcttgttcaatttttttaaagctttgatcaaacatttcattcatttttataaaaaaaatttgtcttttttgatctatatcaagtttgtaatattcctcttcaaagccattttttagatcatcagcaaaaagtgggattagaaaaagactaagaaaaattataattggcttcaaaacaatactttacctttccttcaaaaaacaattcttcatttttatatgcaaaccctacctcttcaccacttttaggagttattttaactttattttgtacttttttatttaaaaatgccagataaaaacaagcccccattcctgtgccacaagctaaggtttcatcttcaactccgcgttcataggtgcgaacttttaaatgattttcatctaaaatttttacaaaattaacattggcattatatttttgtctcattttttgacaaagcattgtatcaaattcatctaaattttgacaaaaatgtactagatgtggaactccagtgttgcaaagttgccaagtttttcctaactcttcaaaagtattttgcacgctttttattttgcctaaagatacttcaactttatcttgatttacctttgcttttattattcctgcaccggttaaaaaactcatgttaggatttattttgttaatatgatgtgcaaaatgtgccgcagcccttgagccattgccacacatagcagcccttgagccatcgttattataaaattcccattcaaagtcgtatttttcatgaggcaatatcacgataaagccatccgcacctataccctcataacgattacaaagttctttagctaaagcacttctatcttcttttctatcagcatttgttatgacaaaatcattcccacttgcacaatatttataaaatttcacatttttcctttagaaatttcttgtattactttaacacattcttgcctaaaatcggcataagaattagtatttttaatgataaaatctgcttttttaagtttttcttcaatatctatttgagaatcaagtcttgcttttgcagcttctaagctaagcttatctctttgcatgattcttttaaggcttaattctttaggtgtgtaaattacaatgactttgcctaaattttcataagcaccgctttcaaaaaaaagaggaatttctacaaaaaaagctttattttctttatctagaatttgcatttgttctaaaattttagctcgaattttaggatgagtgaaattttctaagatttttttagcttctttattgttaaaaacaatttctccaaggatttttctatcgattttcttttcttttttgagtaaattttttaaactaaagggagaaaaaatcttttcaagttctaaagcattttcatctaaaattttatgagcgattttgtctgcgctaatgcttttaaagcctaaagaattcgctatttctataaaagtgcttttaccacaagcaattgaagcggttacaaaaaaagcatttttcatcttatgccttattaaaacttttttcgttaaaatacctttttagttcttaaaggaaaataaatgaaaatttcatatgaagatgcaggcgtaagtatagataatggaaatacctttgtagaggctataaaacctttggttaaagaaacttttaatgataatgttgtaggtggaattggttcttttgctggtgcttttagaatgccaagtggttttaaaaagcctgtgattttaggtgcaacagatggggttggtaccaagcttcgcttggcaattgatgctaaaaaatatgatactatagggcaagatttagtagcaatgtgtgtgaatgatttgatttgtaattttgctacgcctttgtttttcttagattattatgctacagctaagcttgaagtagaagtagcaaaggctgttgtatcaggcattgccaagggatgtaagatggcaaattgtgcattaattggcggagaaactgctgaaatgcctggaatgtatgcaaaagatgattttgatcttgcgggttttgctgtgggtatggctgaagaagatgagattgatagaagtaaatttgttaaaaatggtgatattttattggcacttcctagttcaggacttcattcaaatggttattctttagctagaaaagtactttttgaaagtttaaaattaaaatttgatgacaagatagagggtaaaaatttaattgatattttgttagaacctacaaggatttatgtgtgtgattttcttacactaaagccttatatcagtgctctagcacatattacagggggtggtttagtagaaaatttaccacgcgttttacctcgtggtatgggtgcaactatacgcaaacatcatcttaaaactcctgaaattttttatactataggacaggctgtagaagaaagcgaaatgtatagaagctttaacatgggagtgggtttagtaatggttgtagatccttctaatgtaagtaaggttttagaaaattcagatgcctttattatcggcgaaatttgcattaatgaaggtattgttttagaatgaaaataaagcgttaatacgctttatttttgtattttaagttctatttttgtagtgttttgttcttttggcaaaggattggtttgtgctagataaaaggctacaagtacatttacaagcatagcgataagtaaaagaggagtggttcgttttataatatccattggagctacttttgcaaatccagctaaagctatgattccgcctgctattggtgaagctgcacgacctaaacaagatgcaatttctataggtaaaactagagtaataggtgcaacgcctaattttgtagctatatcaggagctagtttgccaaaagcattaaaagcagcaattccacttcccataatcactgtggcaaaataaactaaaaagcttaaaatagctatactcaaaagaattccaaaccatgcaaaatttcctgttccaagatttgaaaccgcgttagcaaggatattaactccaccaagtgctttaatgccttcggcaaatactccagcggcgatgattatgcttacgactgagataaaaatttcagccatagcttttaaaatcaccatcatatcttcgcctaattttctagcatttctgtgtcttgcaaattcaacaagaaaaactaaagaaatgcttacaaaatttgctgttacaacatcgagcttgatagtaaaaaaatacgctgtaaataaaaatacaacaggtaaccaaggaaagagtatgtaaaaagtaggacatttaggatcaatgatttgcggaatttcaacttcatcatttaaaacacctttttctttatctcttttatcaatccaagcaaaataaaaaggaatcaagatggcaataactacaacataggcaatcacactataaatttggtaatttaaaaaaagccctacgacattatcactttgtcctaccatatctgccatattgattgaatttccatcttttggaccataatcaagcgcaattaaagaaagcacacatacggctgtaataggacggattttaagtgagattaaaacaggataaatacatgctaacaaaagcaaaagcaatccagcatagctagaaatgacgatttttaaagccattccaacaacaaaagttccacttaaaatcaagtatttatttttgatttttcctaagggtttatttgctaaaaaagcaagttttgccgaagcattgatatgtttcatataagcagcaaaacctgccacactcatgataataagtcctactccagaaagctgacttttaaaagtcgctgtgataaaagcataactatcaagtaaaacattcaaaaagcttgtatgttctctgttcggggcttttggtataggtgttcctgtgatgtaaaaagcaaaaataagcaagataatacctgaaagaaaaaatacaaaaataggattgtattttttaagtatataataagcaacgacaattaccgctaaaagtgtagaacatatcataaaaattggcatgatttctcctaaagttattattagcttttattttattttagctaaaatttaactaataaatatttttcatttaaaattttacttattttttacattataaaattaataatatgtatagtttggttactgaaaagtttatgtttgtataaaaaatgatttttatattataattataaacaaattataaatattaaaaaggatctagtgtggcaagaattttggcatttgatataggaataagctctattggctgggcatttagtgaaaatgatgagttaaaagattgtggagttaggatttttacaaaggctgaaaatcccaaaacaggagaatccttagccttgccaagacgccttgcaagaagtgctagaaaacgccttgctagacgcaaagcaaggctaaatcacttaaaacatttaatcgcaaatgaatttaagttaaattacgaagattatcaaagctttgatgaaagtttagccaaggcttataaaggatctttaattagcccttatgagttaagatttagagctttaaacgagcttttaagtaagcaagattttgcaagagtgattttacatattgcaaaaaggcgtggctatgatgatattaaaaatagtgatgataaagaaaaaggtgcgattttaaaagctatcaagcaaaatgaagaaaaactagcaaattatcaaagtgtgggcgagtatctttataaagagtattttcaaaaattcaaagaaaattccaaagaatttacaaatgttagaaataaaaaagaaagttatgaacgctgcatagcgcaaagttttttaaaagatgaattaaagcttatttttaaaaaacaaagagaatttggcttttctttttcaaaaaaatttgaagaagaggtgcttagtgtagcattttataaaagggctttaaaagatttttctcatttggtgggaaattgtagtttttttaccgatgaaaaaagagcgccaaaaaattcgcccttagcttttatgtttgtagcacttacaagaattatcaatcttttaaacaatcttaaaaatactgaaggaattttatatacaaaagatgatttaaacgcccttttgaatgaagttttaaaaaacggcactctaacttataaacaaacaaaaaagcttttgggcttaagcgatgattatgaatttaaaggggaaaaaggaacttattttattgagtttaaaaaatataaagaatttataaaagccctaggtgatcatagtttaagccaagatgatttaaatgaaatagcaaaagatattacccttataaaagatgagattaagcttaaaaaggctttagtaaaatatgatttaaatcaaaatcaaattgatagtttaagcaaattggaatttaaagaccatttaaatataagttttaaagccttaaaacttatcactcctttaatgcttgaaggtaaaaaatacgatgaagcttgtaatgagcttaatttaaaagtagcaatcaatgaagataaaaaagattttttacccgcatttaatgaaacttattataaagatgaggtaactaatcctgtggttttaagagcgattaaagaatacagaaaggtcttaaatgctttacttaaaaaatacggcaaagtgcataaaataaacattgaattagcaagagaagtaggtaaaaattacagccaaagagctaaaatagaaaaagagcaaaatgaaaactacaaggccaaaaaagacgccgaacttgaatgtgaaaaactaggcttaaaaataaatagcaaaaatattttaaaattaagattatttaaagaacaaaaagaattttgtgcttatagtggagaaaagattaaaattagtgatttgcaagatgaaaaaatgcttgaaattgatcacatttacccttattctagaagttttgatgattcttatatgaataaagttttagtttttaccaagcaaaatcaagaaaaacttaatcaaaccccctttgaagcctttggcaatgatagtgcaaaatggcagaaaattgaagttttagcaaaaaatttacctactaaaaagcaaaaaagaattttagataaaaattacaaagacaaagagcaaaaagactttaaagatagaaatctaaacgatactcgctacatcgcaaggcttgttttaaactacactaaagattatttagattttttacctttaagcgatgatgaaaatacaaagttaaacgacacacaaaaaggctcaaaagtgcatgtagaagcaaaaagcggtatgcttacatcggctttaagacacacttggggctttagcgctaaggatagaaataaccatcttcatcacgccatcgatgcagtaattattgcttatgcaaacaactctatcgtaaaggctttttcagattttaaaaaagagcaagaaagcaacagtgcagaactttatgcaaaaaaattagtgaattagattataaaaacaaaaggaagttttttgagccttttagtggttttaggcaaaaggttttagataaaattgatgaaatttttgtctcaaaacctgagagaaaaaagccaagtggagctttacatgaagaaacatttagaaaagaagaagaattctatcaatcatacggcggaaaagaaggagttttaaaagccctagagcttggtaaaatccgcaaagtaaatggtaaaatagttaaaaatggcgatatgtttagagtggatatttttaaacacaaaaagacaaataaattttatgctgtgccaatttatactatggattttgctttaaaagtattaccaaataaagctgtagcacgaagtaaaaaaggtgagataaaagactggattttaatggatgaaaattatgagttttgcttttctttatacaaagatagtttgattttaattcaaactaaagatatgcaagagccagaatttgtttattataatgcttttacaagctctactgttagtttgattgtttcaaaacacgataataaatttgaaacgctaagcaaaaatcaaaaaatattgtttaaaaatgcaaatgaaaaagaagtaatcgcaaaaagcataggaattcaaaatctaaaagtatttgaaaaatacatagtttcagcacttggggaagttacaaaggctgagtttagacaaagagaagattttaaaaaatgagttacgatgaagcttttaaaacactgcttattagctctaatgccaagctaaatttagagctaaatcatcttgtgattaagcaagatgaaaatatagccaaattgtttttaaaagatataaatatcatcgttttagaaagcttacaaataagcattagttccgcactttttaatgcctttgcaaagtataaaattatcttattaacctgcgatgaaactcatagtataaatggtgtttttactccttttttagggcattttcaaagtgcaaaaatcgcaaaagagcaaatgaatgtaagtgctcaaaaaaaggctattttatggcaaaaaatcattaaaaataaaatcctaaatcaagcctttgttttgaaaaaacacaataaaatagagcaaagcaatgagcttataaatttggctaaaaaagtaagcttaaatgatagtaaaaatattgaagctgttgcggcggcgctttattttaaaactttgtttggtacttctttttcaagagatgagctttgctttgaaaattctgctttaaattatggctatgcaatcattagggcttgtattattagagcagtttgcataagtgggcttttaccttggcttggcataaagcacgataatatttataattcttttgcgctttgtgatgatttgatagaagtgtttagggctagtgttgatgattgtgttttaaagcttaagggtgaaagtgagtttttaagcaaagatgacaaaagagcgttgattggcaatttacaaagcaaaatcaattttgatgggcaaaattatcctttaaatagagcgataaatcattatgtggcgaattttaaaaatgctttattgtatgaagatgaactaaagatagtgaaatttgatgattgaagataaatttatgcgcgtgcttttgatgtttgatgtacctactaaaagtaaaaaagagcaaaaactagcaagtaaatttagaaataatcttataaaattaggttattttatgctgcaatttagcgtttatatgcgtatttgcaagggtttaagttctgcaaaaagttctattgaaaatgtaaaaaagattttgccaccttatggaaatgtaagggctttaatcatcactgaaaagcaatttgataaaatggagcttttgcttggtggcatagtttttaatgaaaaagttaataacgaaactaatttaacgctttttgatatagatagtcatggagaatttaaatataaaaattcaaataatgaagaaattcaaataaacaaaaaacaagaaaaatatcatcagcaaaatttatttgaattttaaaagcggttttaggggattgtaacccagcagagtcccgcaaactctttattttagtccctttttaaatttcttatgagattatagcataatttttgctatttttcatgaaaaaaccccgaaattttcattatctggtaaatatcattttaccataaagaaatttaaaaagggactaaaacagttttaaaaccaatatcagcaaatgtattattttaccataaagaaatttaaaaagggactaaaataaaccctagtagattgaaactccgctagggctaattactccactaaaaggaggttgcgaatttgaaacttattgaaatttagggttgattaaaatcgaaataaaattatttaaataattttaaggcataaagataatatccactaagctttcattttctaaaatttcacattcttttggcaccaccataagagcggctttattgttaagattgtttataatcgcactagagccttcttttttaccttcaagattagctaaaatgcgtccatttttaaattccacattacaagcgacaaattccaaataaggtgtttttttcttgtagcttccttgtaaaaaggctttgcaaatatagtctttaggctgaagtaaccaagagtttaaaatctctcttgcgtaaagattaaacattaccatagccgagtaaggaaaacctggtaaggcgatgatgaatttttcattagccttggctattttgatatgtctgcctggttttatgtcggctttatcgatgatgatttcgtattctttgacggctttttttaaaaagtcaaaatctcccatagaaaccccgcctgttgtaatcaaaatatcacaactttgcaaagcactttcaagggtagaaaaagtggctttttcatcatcttttaaaagaggaaaaacccttgtatcgcaatttaaatttttagctaaattagctatggcgatatgatttgaagagcggatttgagcaggattttccaaggcttctcctagatccttgatctcacttccactacttaaaacccctacaataggctttataaacacactaatgtgaaaaaatccaagttcagctaaaagagctatctcgctataatttaaccttgtgccttttttgagtaaaatttcatcttttttatagttttctcctaccgcacgcacggcaaaagcttgaggaacttttttttctataaaaagagtatcattttctacgcgtacattttcaatagggactaaagtatcgcttccttcgctcatgagtgagcctgtaaaggtttttacacaagtaccattttgtacgctaaattgtggcatagtgcccgcaggtgtgaggcctaaaatttttaaaggcttatcttgatcttcaaatttgatcgcataaccatccatagccgaagttggaaattcgggctgatttttaggggcttttatatcttgagctaaaatgcgtcctaaacactctgtaagggctattttttcaatcttttcataagttttgatatgagaatgtaaaatttttaaactttcttcataagacattaacattttttatccttttaaaagtcctgcaccgcaaagtttggttgatctttctttggtataaattctttctttgtttatcacatcatacttccaaatgggtgcacttgctttaaaatcttcaacaaattcattaagaagtttaagtcctaattttctttgtttgcttaaaattcctgcaaaataagagctttcatgaaccgccacatcgcctatagagtgagcaaaaagcaaggtaataccatcaaaatctactcttttttgccactcattaaaccatttttttaaaagcggttcataaatatcaaaactaagtgcctcaatgcctccttcttcacgcacaataccacaaaaagtcagcaaagcaccgcagtttttatccttggcaaattcataccattggctataaattttaggaatatctaaagaatcttgatagagtgtaaaatgttccatttaacccccgcaaactggcggtaaaagtgctattttatcaccagtttttaacttagtgttttcatcaaaaatgatttcatcatttaaagatacagcacaaagttctagccattcttttaaactctcatctttttgcaaaatttcttttaattcttttaaattttttacctcaagctctaaattatctttatttatggggcctaaaaattccacttttaccattttattcctttacttctaaatttcccatcattcctaaatcttcatgttctaaaatatggcaatgatacattctaagccctttaaaatcttgtttcattctaagtcttaactcttcattaggacgcacatttatagtatctcttaaggctctaaattcggctttttgaactttgccattgagttttgatgagatgagttcaaattgcgtgccgtgtatgtggaaaggatgatccatgtgagatttatttatcactatccagtcttcaactactccaagtttggagcttaaatcaatgcgttttaaatcatagcttttgccattgattaaaaacatagacgcaagagcgatttttaattcgctttcactttttcccatcataccatgcatttgcatatgatcttcactcatgattatttctttaaattccttaggttcttctgaaggtttgaaaatttttaatttttttggaagttctacattttctttttttaggttaatattggctagaaatagggtattaggttcttcttttaccatcattttatccctatcataataagcactttctagcttaaaattcccatcttttggagcatcgattaaaacttctacacgagaagcaggacttaagaaaagttcttctttataaatagctttttctataagtccaccatcagtaccaacaagtataaacttagctccttgtatgcgtaaatttaaatatcttgctgcagtagtattataaatgcgtatgcgttcgtttgtggcgagtttgattttaggtttaaattgtccattgatgagtacaaattctccttctctaccatttagccaatcatttaggttattgtttggaatttgagcgttttcatcaagacgcaaatcgctaatcatcaaatctttttcttttaaatgacttaaagcatctttttttgctttgatcacaaaagcccctgctaaacccataaaaacttgtttagaagccgtataatgaggatgtggatgataccagtaagttcctgcgctatcttgaggaatttcaaaacgatatattctttcttctcctgctaagataggatcatgtgggcttccatcttgatcaggtggcacaggaacgccatgccaatgtatagttgtagcttctttgagtttgtttttgactaaaatttcaagtttatctccttcaaaaacttgtatttttggagcaggcacgaggccattgtaagtataaaataaggtttttttacctttgataagctctatatgattttctttgatttctagggtagcacgaaaaatatttttttctttactttcatttttgagtaaaggcaaggcttttaaaatttctccttgggggaattgttttggatctaaaagctttaaattttttggagcaaagtttataaaagaagtatctaagtcatgatttatagaatgatttttatgcatggagtgcatatcgtgcataggatttgcataggctacacccatacttgctagagtaagtgcattaaattttaaaaaatttcttctattcattagtttttccttttgcttgattttttgtattatagtcattatttttttaactttagtaaatatttattttgaaaatttggtttaattttgttatgattttagcaatttaatcaaggaaaaataatgttttatgaaaaaattcaaactccagcttatattttagaagaagataaattaagaaaaaattgtgagcttttagcaagtgttggcgaaaaaagtggtgctaaagtgcttttagctttaaaaggttttgctttttcaggagcgatgaaaattgttggagaatacttaaaaggttgtacttgtagcggactttgggaagcaaaatttgctaaagaatacatggataaagaaattcatacttattcgcctgcttttaaagaagatgaaatcgatgaaatagccagcttatctcatcatatagtgtttaactctttagctcaatttcataaatttcaagctaaaacacaaaaaaattccttaggtcttcgttgtaatgttgaattttctctagccccaaaagaactttacaatccttgtggaagatactcaagacttggaattcgtgctaaagattttgaaaatgtggatttaagtaccatagaaggacttcattttcacgcactttgcgaagaaagtgctgatgctttagaagctgttttaaaggtttttgaagagaaatttggcaaatggatagggcaaatgaaatgggtgaattttggaggagggcatcacatcactaaaaaaggctatgatgttgaaaaacttattgctttgtgtaaaaatttcagtgataaatatagcgtgcaagtttatcttgaaccaggtgaagcggtaggttggcaaacaggaaatttagtggctagtgtagtagatatcatagaaaatgaaaaacaaattgctattttagacacttcaagcgaagcgcatatgccagatactatcatcatgccttatacaagtgaagttttaaatgctagaattttagccacaagagaaaatgaaaaaatttcagacttaaaagaaaacgaatttgcctatttacttactggaaatacttgtttagcaggtgatgtaatgggagaatatgcctttgataaaaagcttaaaatcggcgataaaattgtttttttagatcaaattcattacaccattgtgaaaaacacaacttttaatggtataagacttccaaatctcatgcttttaaatgcaaaaaatgaacttcaaatgataagagaattttcttataaggattattctttaagaaattagtattatttataatttgcataaaatgttaattttactcggaagagaatcaaagatgtaaattttatgcaaagtattttatttttttcaaatataaaatcaactcaaatatctaatttttaatacttttgtatgattttttaatattttaaatccttgtggaattttattgaaattcagtgatttttaaatcaaatagtattaagataaatcgatttaaaaatcggctttaaaatgaatattaggtatattttgcataatattcattcaagcaaaatttaaagctatttttgaaaattttgaatgcatgggagctttaatggatttggaaaaattaagattagctagaagtctttattatcaatgtctaggagagctttttgttttttcattttctgaagaaagattgtcaaaattacaagagtatttaaagacaatgcaagaatgtttatttgatgaaaatttaaaatcaaattttgatatcttgcttaagcatttagatgatgaaaattctatacaagcattttttaaagaatatgatttgctttttttaagtcttaaaaatagcattccaacgactttttcttacatagaagaaggttttgaaaattcaaatcctttactttgcgtgcgtcaaattttagtcaaaagtaaaataagacgcaatgaaaaattttttaaagaaagtgaagatagtgttggattttgtttattgttgatgagtgaatttttaaggcaaaatgaagatgatttagccaaagagctttttgaaaaagtgatcaataaaagcattgatgagtttttaggcgatgttttcatgaataaaaatgcgaatttatataaggaaattgcaagtattgcatcggcttttatggaatttgaaagactttgctttgaagtggaaaaacctgcaaaaataaattctaaaaaagtgcaaaacgatctatcgcgttcagaatttttaagaagagaagcaaataaacaaaggaggactcgtgaaaaatcgcagggaatttcttaaaaaatccgcttttgccttaggggctgctggagtgcttggtagcacaactttagctctagctaaagatgaagaaagaaaagatttggttaaaggtaaaagtaagaaaaaagaagtgctttttcaaagaagtgctaattgggaaaattattatataaaggctgagtaatgtcaagtgtaggtgaaaatatcaagcttacgcgtcgttcttttcttaaaatggcagcactttcaagcctagcaacaccgttgcttgctagaagtgaaactttaagagaagcgagtgctgatgagcttaaagaagcttatgaaggtagtaaaaaagtaaaaacagtttgtacagcctgttctgtaggctgtgggattattgcagaagtgcaaaatggtgtttgggtgcgtcaagaaatcgctcaagatcatcctgtgagttcaggtggacattgctgcaagggatctgatatgatcgatatggtgcgttcacatgtgcgtttaaaatatcctatgaaaaaagaaaatggagaatggaaacgcataagttatgagcaagctttaagtgagatcggagaaaaactagctgcttatcgtaaagaaaatcctgaaagtgttatgtttttaggttctgcaaaacttaataatgaacaagcttattatataagaaaatttgcagcattttttggaacgaacaatgtagatcatcaagctagaatttgacacagcgcaacagtcgccggtgtggcgaatacatttggttatggcgctatgacaaaccatcttggagacatccaaagaagtaaatgtatcattatcattggagcaaatccagcggtaaatcaccctgtgggttttagacatttcttaaaagcaaaagaaaaaggtgcaaagcttatcgttgtagatcctagatttacaaaaagtgcagcaaaagcggatatttatgcaagaattcgtccaggaactgacattgctttcatgtatggaatgttaaaaatcatttttgatgaaggcttggaagatgcaaaatatcttgatgaaagagtttttggaattgataaaattcgcgaagaagcagcaaaatggacagccgaagaagtagaaaatgttacgggaatttctaaagaacttttggtgcaaatcactcacgaagtagctaaaaacaaaccaactacgcttatttgggctatgggtttaactcaacatactgtaggaacttcaaatacacgtttagcacctattgtgcaaatggtacttggaaatataggtaaatttggtggcggagttaatatcttacgcggacacgataatgttcaaggtgcttcggatatggcttgtttgagtgaaaatttacctggttattatcctttaaatgaagcgacttggagatactatgccaaaatttggggtgtggattatgaatggcttttaggaaattttgtaagtaaagattggatgcataaaaccggactttcacttgctagatggtgggcagcagctttaaatggaaaagatggaaatgatgctatcgataatgcaggaacgcctttaaaagctttagtagttatgggaaatggtatcacttcaaccgcacaacaagtaaaagttaaagaaggtttggaagctttagagcttttagttttggctgatccttttgtaaatgaagcagggattatcgcagaaagaaaagatggaatttatcttttacctgcagcaacacagtttgaaacaagcggaagtgtaacagctacaaatcgtagtgggcaatggagatttaaggttgtagatccactttatgaaagcatggaagatcaagaaattttatttgagcttgctaaaaaattaggtttttatgaagactttaccaagactttacgcgatgaaaaaggtgagatcgtttggcctgaaaatgcaacaagagaaattgc

SEQ ID NO: 3805 - DNA, 22229 bp, synthetic construct
  source 1..22229: mol_type = other DNA
  misc_feature 1..22229: note = Synthetic
tcgatacttggtggcaaacagaaacaggtgggcatatgatcacgcctttaccaggcgctactcctttaaaaccaggttgtgctaccttgcctttgccaggaatttttgcagaagttattgatgaagaaggcaataaaaaagatgaaggtgaagatggattgctttgtataaccaaaccttggccttcgatgattcgtggaatttggggtaatgatgaacgctatatagaaagttatttttctcaagctaaaaaagatggaaaagctgtatattttagtggcgatggtgctttttatgataaaaatggttatataactatcacaggaagaacagatgatgtggttaatgttgcaggacatcgtataggaacggctgaaattgaaagcgctattgctaaacatccaagtgtagcagaatcagctgtagtgagtattttggatgcgattaagggcgagtcactgtttgcttttgtggttttaagtcctgcatccagttgtgatcttggcggagctatagaaactttaaaagaacttaatgacattttaagagtagaaataggacctatagctaaaatagaaaaaattctttatactccaggtttgccaaaaactagaagtggtaaaataatgagaagaattttaagaactatagcaagaggtgaagaaatcaaacaggatatttcaacgctcgaagattctggagtagtagaaactattgttaaattagctaaggcagagtttgaataacaaggcaaaaagaactttgccttgttgcataaaaattcataaaaataagctataatgataaaaaaataaaaggaaatttttatgcttcaaacttgtattttccctgcggcaggttatgggacgagatttttacctgcaacaaaaactttacctaaagagatgttacctatcttaactaagcctttgatccattatggggttgatgaagctttggaagcaggaatggaaaatatgggctttgtcacagggcgtggaaaaagagctttggaggattattttgatatttcttatgaacttgagcatcaaatttcaggtacaaaaaaagaatacttacttgatgaaattcgctctttgatcaatcgttgcacctttacttttacaagacaaaatcaaatgaaaggattaggtgatgcggttttaaaaggtaaacctttggttggtgatgaagcttttggcgtaattttggctgatgatttgtgtgtcaacgaagaaggcttaaatgttatggctcaaatggtaaaaatttatgaaaaatatcgctgcaccatcatagctgtgatggaagtaccaaaagaacaagtttcaaactatggagtaatttttggaaattttgtagaagaaaatcttatcatggttaattctatgatagaaaaaccaagtcctgatgaagctccaagtaatcttgctatcataggaagatatattttaactcctgatatttttggaattttagaaaatactaaagcgggaaaaaatggcgaaattcaacttaccgacgcgcttttaactcaagcaaccaatggtatggttttagcttataaatttcaagggaaacgctttgattgtggaagtgtagaaggctttgtagaggctacaaattatttttacgagaaaagtaaatgttaaacaatacacttttttttaaacaaagtgaaattcatactataagctcttatgcaaatcgtattaatgatgaggtaaaaagtggagatatagggtattatcatcttattgatacaagtttgaatttaatcgatgagagtttggcttttatcaaagacaaagaacacataaaaaatatcgttttagtgggaatgggtggttcaagttgtggtgtaaaagccttgcgtgatatgctttttaatgaaaaaagcaaccaaagagaactttttatactcgataacacaagttcacattcttttaataagactttagaaaaaatcaagcttgaggaaagtttgtttttaatcatcagcaaaacaggtagtactatagaagttgtatcgctttttaaacttcttattgaacattttaaacttgatatgcaagaattaaaaaaatactttgtttttattaccgataaggattcaaaacttcatcaagaaggtgaaaatttaggtattaaatgcttttttatccctgcaaatgtaggaggtcgttttagcatactttcagccgtaggtatagttccgctttgtttttgtggctataatgccaaagctcttttagaaggagctaaagcttgttttgaagatttttttactcataaaaaagatgaaattttacaaaaagcctatcattattgcacacacaaaaatgccaatatcaatgtacttttttcatatagtgatgcttttaaaggctttaatgaatggtatatccagcttattgctgaaagtttaggtaaaaagcaaggctataaacgtataggtttaactcctattgcactcattggagcaagagatcagcatagttttttacaactcattatggatggacctaaaaataaaactgtaacttttttaaaaatcaaagacgctcaaaaagcacctattatccctgatattcattttaaatttttagattctttaagtaataaagtcaatcttcacgaacttttaaacgctcaatgtaatgcaactatgcacgctttaatcgctgaaaatttgagtgttgatgtgatagaacttgaaaaacttgatgcttggcatgcgggatatttgatgtattattatgaactttttacttcaacttgcggtgttatgctagggattaacacctatgatcaacctggtgtggaagttggaaagttgatcttaaaaaatatattaaattcttaatcaaaattcattaaaaaagagtataataattttaagttaaaattataataaaaatttttaattaataataattattatttaagaattttatgttataattttaaaaattaaaaaaaggagtcaatcatgtcagttacaaaacaattattacaaatgcaagcagatgctcatcatctatgggttaaatttcataattatcactggaatgtaaaaggtttgcaatttttttctatacacgagtacacagaaaaagcttatgaagaaatggcagaactttttgatagttgtgctgaaagagttttacaacttggcgaaaaagctatcacttgccaaaaagttttaatggaaaatgcaaaaagtccaaaagttgcaaaagattgctttactccgcttgaagtcatagaactgatcaaacaagattatgaatatcttttagcagaatttaaaaaactcaatgaagcagcagaaaaagaaagtgataccacaacagctgcttttgcgcaagaaaatattgcaaaatatgaaaaaagtctttggatgataggtgctactttacagggtgcttgcaaaatgtaatttaaggggctttatgccccaattatacaaactaggttataatatccttttttaaaggataaaattgaaagtacttaattttttttatgaaaatcaccctaaatttgaagtaagttatgaaagaaaaaatcaaatttcaaaaccaaatattatcataaaaggcccacgattttgtggtaaaaaaacacttatttttaattttttatctcaatttaaagcaagtgaaattttgtttttagatttatatgatacacgctttgaaaaacaaagtttagaaagacttgctgattttctgaatgaaaatttacaaattaaaattctttgcctttataatttggattttatccctaatttagaaaaaattaaaattcccatcatcttaagtacaaatataaaagatttaaatataaatgggtttgaagagcttgaacttgattattttgattttgaagaatttattagtgtaagtaagaaaaatttacctataaataatttagtaggtctttttttacaaagtggacgcagtaaatttggagaaaaaaacatacttctaagacaaagctttactcttttagaattagaaattttaaagtatttagctttaaatttgggtcagcaaatcagtatttctaagatatttatagaacttaaaaaaagattaaaaacttcaaaagatagtgtttatcaagctataaaaaaattagaaaatacttatgtgatctatactttaaaacatgatgaaaaaaaacttcaaaagatttattttaaagattttggcctaagaaataatctttgtatttcaaaggatttttcgcatttatttgaaaatttagttttaagcgagttgtttaaatttaaagaagattttttttataacaaatactttaacttttatagccaaatatctaaaattgcttatatttcaagtccaactttagatattgatttgattaaattacgtgctaagaaaattttaccaaaggctttagaacttggaatttttcatgtgatttttatcactctttcaagcgaggatagtttttttgagcaaggggttaaatttgaagtcatatcttttgataaattttcacttggattttaggtgttgtttgagtttgtatcgtatttttcaaggttgtatcgtttgatgatttttgtaataagattgatataatatcccttgcgttcagaataagaatctaaagttttaatagcctctagtcctgttatctctttgccttcgcttgcaaatttagctcttgcatcgcgaaacttttcataagcaaaatgacgatttaaatttaaaacataagagtaaacactatcttgcagactatcaaaaatcttaattttatgttttttatctggatgtcttaaatcaggaattaaacctttctcaccccaagtccattctccaaaaagattatttgcttctcttgcgaagcgacttgtacctgtagcactttcaactaaagcttgggctatacccatggattttggaattttttgaatacgttttttatattctgcaaaatcataaagattttcaatgcgatatttgttttttatcgtgataagtttttcaagatttgtttgatttgaagtcctaaagcctgttttgtaagcatctttaaaaaaggcttcgataaaagctctttcttgttcaatttttttaaagctttgatcaaacatttcattcatttttataaaaaaaatttgtcttttttgatctatatcaagtttgtaatattcctctccaaagccattttttagatcatcagcaaaaagtgggattagaaaaagactaagaaaaattataattggcttcaaaacaatactttacctttccttcaaaaaacaattcttcatttttatatgtaaacccaacctcttcaccacttttaggagttattttaactttattttgtacttttttatttaaaaatgccagataaaaacaagcccccattcctgtgccacaagctaaggtttcatcttcaactccgcgttcataggtacgaacttttaaatgattttcatctaaaatttttacaaaattaacattggcattatatttttgtctcattttttgacaaagtattgtatcaaattcatctaaattttgacaaaaatgcactagatgtggaactccagtgtcgcaaagttgccaagtttttcctaattcttcaaaagtattttgcacgctttttattttgcctaaagatacttcaactttatcttgatttacctttgcttttattattcctgcaccggttaaaaaactcatgttaggatttattttgttaatatgatgtgcaaaatgtgccgcagcccttgagccattgccacacatagcagcccttgagccatcgttattataaaattcccattcaaagtcgtatttttcatgaggcaatatcacgataaagccatccccacctatgccctcataacgattgcaaagttctttagctaaagcacttctatcttcttttctatcagcatttgttatgacaaaatcattcccacttgcacaatatttataaaatttcacatttttcctttagaaatttcttgtattactttaacacattcttgcctaaaatcgacataagaattagtatttttaatgataaaatctgcttttttaagtttttcttcaatatctatttgagaatcaagtctcacttttgcagcttctaagctgagcttatctctttgcatgattcttttaaggcttaattctttaggtgtgtaaattacaatgactttgcctaaattttcataagcaccgctttcaaaaaaaagaggaatttctacaaaaaaagctttattttctttatctagaatttgcatttgttctaaaattttagctcgaattttaggatgagtgaaattttctaaggtttttttagcttctttgttgttaaaaacaatttctccaaggatttttctatcgattttcttttcttttgtgagtaaattttttaagttaaagggagaaaaaatcttttcaagttctaaagcattttcatctaaaattttatgagcaattttatctgcgctaatgcttttaaagcctaaagaattcgctatttctataaaagtgcttttaccacaagcaattgaagcggttacaaaaaaagcatttttcatcttatgccttattaaaacttttttcgttaaaatacctttttagttcttaaaggaaaataaatgaaaatttcatatgaagatgcaggcgtaagtatagataatggaaatgcctttgtagaggctataaaacctttggttaaagaaacttttaatgataatgttgtaggcggaattggttcttttgctggtgcttttagaatgccaagcggttttaaaaagcctgtgattttaggtgcaacagatggagttggtaccaagcttcgcttggcaattgatgctaaaaaatatgatactataggacaagatttagtagcaatgtgcgtgaatgatttgatttgtaattttgctacgcctttgttttttctagattattatgctacagctaaacttgaagtagaagtagcaaaggctgttgtatcaggcatcgccaagggatgtaagatggcaaattgtgcattaatcggcggagaaactgctgaaatgcctggaatgtatgcaaaagatgattttgatcttgcgggttttgcagtgggtatggctgaagaagatgagattgatagaagtaaatttgttaaaaatggtgatattttattggcacttcctagttcaggacttcattcaaatggttattctttagctagaaaagtactttttgaaagtttaaaattaaaatttgatgacaagatagaggataaaaatttaattgatattttattagagcctacaaggatttatgtgcgtgattttcttacattaaagccttatattagtgctctagctcatattacagggggtggtttagtagaaaatttaccacgcgttttgcctcgtggcatgggtgcaactatacgcaaacaccatcttaaaactcctgaaattttttatattataggacaggctgtagaagaaagcgaaatgtatagaagctttaacatgggagtgggtttagtaatggttgtagatccttctaatgtaagtaaggttttagaaaattcagatgcctttattatcggcgaaatttgcattaatgaaggtattgttttagaatgaaaataaagcgtcatacgctttatttttttattttaagttctatttttgtagtgttttgttcttttggcaaaggattggtttgtgctagataaaaggctacaagtacatttacaagcatagcgataagtaaaagaggagtggtccgttttataatatccattggagctacttttgcaaatccagctaaagctatgattccgcctgctattggtgaagctgcgcgacctaaacaagatgcaatttctacaggtaaaactagagtaataggtgcaatgcctaatttcgtagctatatcaggagctagttttccaaaagcattaaaagcagcaattccacttcccataatcactgtggcaaaataaactaaaaagcttaaaatagctatactcaaaagaattccaaaccatgcaaaatttcctgttccaagatttgaaaccgcgttagcaaggatattaactccaccaagtgctttaatgccttcagcaaatactccagcggcgatgattatgcttacgactgagataaaaattttagccatagccttttaaaatcaccatcatatcttcgcctaattttctagcatttctgtgtcttgcaaattcaacaagaaaaactaaagaaattcttacaaaatttgcttcacaacatcgagcttgatagtaaaaaaatatgctataaataaaaatacaacaggtaaccaaggaaagagtatgtaaaaaagtagggcatttaggatcaatgatttgcggaatttcaacttcatcatttaaaacacctttttctttatctcttttatcaatccaagcaaaataaaaaggaatcaagatggcaataactacaacataggcaatcacactataaatttggtaatttaaaaaaagccctacgacattatcactttgtcctaccatatctgccatattgattgaatttccatcttttggatcataatcaagtgcaattaaagaaagcgcacatacagttgtaataggacggattttaagtgagattaaaacaggataaatacatgctaacaaaagcaatccagcatagctagaaatgacgatttttaaagccattccaataacaaaagttccacttaaaattaagtatttattttttgatttttcctgagggtttatttgctaaaaaagcaagttttgccgaagcattgatatgtttcatgtaagcagtaaagcctgccacactcatgataataagccctgctccagaaagctgacttttaaaagtcgctgtgataaaagataactatcaagtaaaacatttaaaagcttgtatactctctgcttggagcttttggtataggtgttcctgtgatataaaaagcaaaaataagcaagataatatttgaaagaaaaatacaaaaatgggatcgtatttttttgagtatatcataaaaattagcatagggtctcttgaatttacaataaattggattttatctaaatttttaaataaaaaatattttttatttaaaaattacttgttttttgtattataaaattaacatatatagtttggttactgaaaagtttatgtttgtttaaaaaaatgatttttgtattataattatacacaaatcataaatattaaaaaggatctagtgtggcaagaattttggcatttgatataggaataagctctattggctgggcatttagtgaaaatgatgagttaaaagattgtggagttaggatttttacaaaggctgaaaatcccaaaacaggagaatccttagccttgccaagacgccttgcaagaagtgctagaaaacgccttgctagacgcaaagcaaggctaaatcacttaaaacatttaatcgcaaatgaatttaagttaaattacgaagattatcaaagctttgatgaaagtttagccaaggcttataaaggatctttaattagcccttatgagttaagatttagagctttaaacgagcttttaagtaagcaagattttgcaagagtgattttacatattgcaaaaaggcgtggctatgatgatattaaaaatagtgatgataaagaaaaaggtgcgattttaaaagctatcaagcaaaatgaagaaaaactagcaaattatcaaagtgtgggcgagtatctttataaagagtattttcaaaaattcaaagaaaattccaaagaatttacaaatgttagaaataaaaaagaaagttatgaacgctgcatagcgtaaagttttttaaaagatgaattaaagcttatttttaaaaaacaaagagaatttggcttttctttttcaaaaaaatttgaagaagaggtgcttagtgtagcattttataaaagggctttaaaagatttttctcatttggtgggaaattgtagtttttttaccgatgaaaaaagagcgccaaaaaattcgcccttagcttttatgtttgtagcacttacaagaattatcaatcttttaaacaatcttaaaaatactgaaggaattttatatacaaaagatgatttaaacgcccttttgaatgaagttttaaaaaacggcactctaacttataaacaaacaaaaaagcttttgggcttaagcgatgattatgaatttaaaggggaaaaaggaacttattttattgagtttaaaaaatataaagaatttataaaagccttaggtgatcatagtttaagccaagatgatttaaatgaaatagcaaaagatatcactcttataaaagatgagattaaacttaaaaaggctttagcaaaatacgatttaaatcaaaatcaaattgatagcttaagcaaattggaatttaaagaccatttaaatataagttttaaagccttaaaacttatcactcctttaatgcttgaaggtaaaaaatacgatgaagcttgcaatgagcttaatttaaaagtagcaatcaatgaagataaaaaagactttttacccgcatttaatgaaacttattacaaagatgaagtaactaatcctgtggttttaagggcgattaaagaatatagaaaaatcttaaatgccttacttaaaaaatacggtaaagtgcataaaataaacattgaattagcaagagaagtaggtaaaaatcacagccaaagagctaaaatagaaaaagagcaaaacgaaaactacaaggccaaaaaagacgccgaaattgaatgtgaaaaactaggcttaaaaataaatagcaaaaatattttaaaattaagattatttaaagaacaaaaagaattttgtgcttatagtggagaaaagattaaacttagtgatttgcaagatgaaaaaatgcttgaaattgaccatatttacccttattctagaagttttgatgattcttatatgaataaagttttagtttttaccaagcaaaatcaagaaaagcttaataaaaccccctttgaagcctttggcaatgatagtacaaaatggcagaaaattgaagttttggcaaaaaatttacctgaaaaaaagcaaaaaagaattttagataaaaattacaaagacaaagagcaaaaagactttaaagatagaaatctaaacgatactcgctacatcgcaaggcttgttttaaactacactaaagattatttagattttttacctttaagcgatgatgaaaatacaaaattaaacgatacgcaaaaaggctcaaaagtgcatgtagaagcaaaaagcggtatgctaacatcggctttaaggcacacttggggctttagcgctaaggatagaaacaaccatcttcatcacgccatcgatgcagcaattattgcttatgcaaacaattctatcgtaaaggctttttcagattttaaaaaagagcaagaaagcaacagtgtagaactttatgcaaaaaaaattagtgaattagattataaaaacaaaaggaagttttttgagccttttagtggttttaggcaaaaggttttagataaaattgatgaaatttttgtctcaaaacctgagagaaaaaagccaagtggagctttacatgaagaaacatttagaaaagaagaagaattctatcaatcatacggcggaaaagaaggagttttaaaagccctagagcttggtaaaatccgcaaagtaaatggtaaaattgttaaaaatggcgatatgtttagagtggatatttttaaacacaaaaagacaaataaattttatgctgtgccaatttatactatggattttgctttaaaagtattaccaaataaagctgtagcgcgaagtaaaaaaggtgagataaaagactggattttaatggatgaaaattatgagttttgcttttctttatacaaagatagtttgattttaattcaaactaaagatatgcaagagccagaacttgtttattttaatgcttttacaagctctactgttagtttgattgtttcaaaacacgataataaatttgaaacgctaagcaaaaatcaaaaaatattgtttaaaaatgcaaatgaaaaagaagtaatcgcaaaaagcataggaattcaaaatctaaaagtatttgaaaaatacatagtttcagcacttggagaagtgacaaaggctgagtttagacaaagagaagattttaaaaaatgagttacgatgaagcttttaaaacactgcttattagctctaatgccaagctaaatttagagctaaatcatcttgtgattaagcaagatgaaaatatagccaaattgtttttaaaggatataaacatcatcgttttagaaagcttacaagtaagccttagttccgcactttttaacgcttttgcaaggcataaaattatcttattaacctgcgatgaaactcatagtataaatggtgtttttactccttttttagggcattttcaaagtgcaaaaatcgcaaaagagcaaatgaatgtaagtgctcaaaaaaaggctattttatggcaaaaaatcattaaaaacaaaatcctaaatcaagcctttgttttgaaaaaacacaataaaatagggcaaagcaatgagcttataaatttggctaaaaaagtaagcttaaatgatagtaaaaatatcgaagctgttgcagcggcgctttattttaaaactttgtttggcgtttctttttcaagagatgagctttgctttgaaaattctgctttaaattatggctatgcaatcattagggcttgtattattagagcagtttgtataagtgggcttttgccttggcttggcataaagcacgataatatttataattcttttgcactttgtgatgatttgatagaagtgtttagggctagtgttgatgattgtgttttaaagcttaagggtgaaagtgagtttttaagcaaagatgacaaaagagcgttgattggcaatttacaaagcaaaatcaattttgatgggcaaaattatcctttaaacagagcgataaatcattatgtggcgaattttaaaaatgctttattgtatgaagatgagctaaagatagtgaaatttgatgattgaagataaatttatgcgcgtgcttttgatgtttgatgtacctactaaaagtaaaaaagagcaaaaactagcaagtaaatttagaaacaatcttataaaattaggttattttatgctgcaatttagcgtttatatgcgtatttgcaagggtttaagttctgcaaaaagttctattgaaaatgtaaaaaagattttgccaccttatggaaatgtaagggctttaatcatcactgaaaagcaatttgataaaatggagcttttgcttggtggcatagtttttaatgaaaaagttaataacgaaactaatttaacgctttttgatatagatagtcatggagaatttaaatacaaaaattcaaataatgaagaaatacaactaaacaaaaaacaagaaaaatatcatcagcaaaatttatttgaattttaaaagcggttttaggggattgtaaccccgcagagtcccgcaaactctttattttagtccctttttaaatttcttattgagattatagcataatttttgctatttttcatgaaaaaaccccgaaattttcattatctggtaaatatctattttaccataaagaaatttaaaaagggactaaaacatctttttttgtaatacttcttaaagtattattttaccataaagaaatttaaaaagggactaaaactccaaagcgttttaaagcatttcctaaagcattttaccataaagaaatttaaaaagggactaaaaaccctagtggattgaaactctgctagggctaattacttcactaaaaggaggtgcaaatttgaaacttattgaaatttagggttgattaaaatcgaaataaaattatttaaataattttaaggcataaagataatatctactaaactttcattttctaaaatttcacattcttttggtactaccataagggcagctttattgttaagattgtttataatcgcactagagccttctttcttaccttcaagattggctaaaatgcgtccatttttaaattccacattacaagcgacaaattccaaataaggtgtttttttcttgtagcttccttgtaaaaaggctttgcaaatatagtctttaggctgaagtaaccaagagtttaaaatctctcttgcgtaaagattaaacattaccatagccgagtaaggaaaacctggtaaggcgatgatgaatttttcattagccttggctattttgatatgtctacctggttttatgtcggctttatcgatgatgatttcgtattcttttacagctttttttaaaaagtcaaaatctcccatagaaactccgcctgttgtaatcaaaatatcacaactttgcaaagcactttcaagggtagaaaaagtggctttttcatcatcttttaaaagtggaaaaacccttgtatcgcaatttaaatttttagctaaattagctatggcgatatgatttgaagagcggatttgagcaggattttccaaggcttctcctagatctttgatctcacttccactacttaaaacccctacaataggctttataaacacactaatgtgaaaaaatccaagttcagccaaaagagctatttcgctataatttaactttgtgccttttttgagtaaaatttcatcttttttatagttttctcctactgcacgcacggcaaaagcttggggaacttttttttctataaaaagagtatcattttctacgcgtacattttcaacagggactaaagtatcacttccttcactcataagtgaacctgtaaaggtttttacacaagtaccattttgcacgctaaattgtggcatagtgcctgcaggtgtgaggcctaaaatttttaaaggcttatcttgatcttcaaatttgatcgcataaccatccatagccgaagttggaaattcaggctgatttttaggggcttttatgtcttgagctaaaatgcgtcctaaacactctgtaagagctattttttcaatcttttcataagttttgatatgagagtgtaaaatttttaaactttcttcataagacattaacattttttatccttttaaaagtcctgcaccgcaaagtttggttgatctttctttggcataaattctttctttgtttatcacatcatacttccaaataggtgcacttgctttaaaatcttcaacaaattcattaagaagtttaagtcctaattttctttgtttgcttaaaattcctgcaaaataagagctttcatgaaccgccacatcgcctatagagtgagcaaaaagcaagctaatatcatcaaaatctactcttttttgccactcatcaaaccatttttttaaaagcggttcataaatatcaaaactaagtgcctcaatgcctccttcttcacgcacaataccacaaaaagtcagcaaagcaccgcagtttttatccttggcaaattcataccattggctataaattttaggaatatctaaagaaccttgatagagtgtaaaatgtttcatttaacccccacaaactggcggtaaaagtgctattttatcaccatcttttaacttagtgttttcatcaaaaatgatttcatcgtttaaagatacggcacaaagttctagccattcttttaaactctcatctttttgcaaaatttcttttaattcttttaaattttttacctcaagctctaaattttctttatttatggggcctaaaaattccacttttatcattttattcctttacttctaaatttcccatcattcctaaatcttcatgttctaaaatatgacaatgatacattctaagtcctttaaaatcttgtttcattctaagtcttaactcttcattaggacgcacatttatagtatctcttaaggctctaaattcggctttttgaactttgccattgagttttgatgagatgagttcaaattgcgtgccgtgtatgtggaaaggatgatccatgtgagatttgtttatcactatccagtcttcaactactccaagtttggagcttaaatcaatgcgttttaaatcatagcttttgccattgattaaaaacatagacgcaagagcgatttttaattcgctttcactttttcccatcataccatgcatttgcatatgatcttcactcatgattatttctttaaattccttaggttcttctgaaggtttgaaaatttttaaattttttggaagttctacattttctttttttagactaatattagctaaaaatagggtattaggttcttcttttaccatcattttatccctatcataataagcactttctagcttaaaattcccatcttttggagcgtcgattaaaacttctacgcgagaagcaggacttaagaaaagttcttctttataaatagctttttctataagtccaccatcagtaccaacaagtataaacttagctccttgtatgcgtaaatttaaatatcttgctgcagtagcattataaatgcgtatgcgttcgtttgtggcgagtttgattttaggtttaaattgtccattaatgagtacaaattctccttctctaccatttagccaatcatttaggttgttgttcggaatttgagcgttttcatcaagacgcaaatcgctaatcatcaaatctttttcttttaaatgacttaaagcatctttttttgctttgatcacaaaagcccctgctaagcccataaaaacttgtttagaagtggtataatgagggtgtggatgataccagtaagttcctgcgctatcttgaggaatttcaaaacgatatattctttcttttcctgctaagataggatcatgtgggcttccatcttgatcaggtggcacaggaacgccatgccaatgtatagttgtagcttccttgagtttgtttttgactaaaatttcaagtttatctccttcaaaaacttctatttttggagcaggtactagaccattgtaagtataaaataaggtttttttacctttgataagctctatatgattttctttgatttctagggtagcacgaaaaatatttttttctttactttcatttttgagcaaaggcaaggcttttaaaatttctccttgggggaattgttttggatctaaaagttttaaattttttggagcaaagttgataaaagaagtatctaagtcatgatttatagaatgatttttatgcatagagtgcatatcgtgcataggatttgcataggctacacccatacttgctagagtaagtgcattaaattttaaaaaatttcttctattcattagtttttccttttgcttgattttttgtattatagtcattatttttttagttttagtaaatatttattttgaaaatttgatttaattttgttatgattttagcaatttaatcaaggaaaaataatgttttatgaaaaaattcaaactccagcttatattttagaagaagataaattaagaaaaaactgtgagcttttagcaagtgttggtgaaaaaagtggtgctaaagtgcttttagctttaaaaggttttgctttttcaggagcgatgaaaattgttggagaatacctaaaaggttgtacttgtagcggactttgggaagcaaaatttgctaaagaatacatggataaagaaattcatacttattcacctgcttttaaagaagatgaaataggtgaaatagccagtttatctcatcatatagtgtttaattctttagctcaatttcataaatttcaaagcaaaacacaaaaaaattccttaggtcttcgttgcaatgttgaattttctctagccccaaaagaactttacaatccttgtggaagatactcaagacttggaattcgtgctaaagattttgaaaatgtggatttaaatgctatagaaggacttcattttcacgcactttgtgaagaaagtgctgacgctttagaagctgttttaaaggtctttaaagagaaatttggtaaatggatagggcaaatgaaatgggtgaattttggaggaggacatcacatcaccaaaaaaggctatgatgttgaaaaacttattgctttgtgtaaaaatttcagcgataaatatggtgtacaagtttatcttgaaccaggtgaagcggtaggttggcaaacaggaaatttggttgctagtgtagtagatatcatagaaaatgaaaaacaaattgccattttagatacttcaagcgaagcacatatgccagatactatcatcatgccttatacaagtgaagttttaaatgctagaattttagccacaagagaaaatgaaaaaatttcagacttaaaagaaaacgaatttgcctatttacttactggaaatacttgtttagcgggtgatgtaatgggagagtacgcttttgataaaaagcttaaaatcggcgataaaattgtttttttagatcaaattcattacaccattgtgaaaaacacaacttttaatggtataagacttccaaatctcatgcttttagaccataaaaatgaacttcaaatgataagagaattttcttataaggattattctttaagaaattagtattatttataatttgcataaaatattaattttactcggaagagaatcaaagatataaattttatgcaaagtattttattttttcaaatataaaatcaactcaaatatctaattttcaatactttgatatgattttttaagattttaaatccttgtggaattttattgaaattcagtgatttttaaatcaaatagtattaagataaatcgatttaaaaatcggctttaaaatgaatattaggtatattttgcataatattcattcaagcaaaatttaaagctatttttgaaaattttgaatgcatggaggctttaatggatttggaaaaattaagattagctagaagtctttattatcaatgtctaggagagctttttgttttttcattttctgaagaaagattgtcaaaattacaagagtatttaaagacaatgcaagaatgtttatttgatgaaaatttaaaatcaaattttgatatcttgcttaagcatttagatgatgaaaattctatacaagcattttttaaagaatacgatttgctttttttaagtcttaaaaacagcattccaacgactttttcttacatagaagaaggttttgaaaattcaaatcctttactttgcgtgcgtcaaattttagtcaaaagtaaaataagacgcaatgaaaaattttttaaagaaagtgaagatagtgttggattttgtttattgttgatgagtgaatttttaaggcaaaatgaagatgatttagctaaagagctttttgaaaaagtgatcaataaaagcattgatgagtttttaggcgatgttttcatgaataaaaatgcgaatttatataaggaaattgcaagtattgcgatggcttttatggaatttgaaagactttgctttgaagtggaaaaacctgcaaaaataaattctaaaaaagtgcaaaatgatctatcgcgttcggaatttttaagaagagaagcaaataaacaaaggaggactcgtgaaaaatcgcagggaatttcttaaaaaatccgcttttgccttaggggctgctggagtgcttggtagcacaactttagctctagctaaagatgaagaaagaaaagatttggttaaaggtaaaagcaagaaaaaagaagtgctttttcaaagaagtgctaattgggaaaattattatataaaggctgagtaatgtcaagtgtaggtgaaaatatcaagcttacgcgtcgttcttttcttaaaatggcagcactttcaagtctagcaacaccgttgcttgctagaagtgaaactttaagagaagcgagtgctgatgagcttaaagaagcttatgaaggtagtaaaaaagtaaaaacagtttgtacagcctgttctgtaggctgtgggattattgcagaagtgcaaaatggtgtttgggtgcgtcaagaaatcgctcaagatcatcctgtgagttcaggtggacattgctgcaagggatctgatatgatcgatatggtgcgttcacatgtgcgtttaaaatatcctatgaaaaaagaaaatggagaatggaaacgcataagttatgagcaagctttaagtgagatcggagaaaaactagctgcttatcgtaaagaaaatcctgaaagtgttatgtttttaggttctgcaaaaatgagcaatgaacaagcttattatgtacgtaaatttgcagcgttttttggaacaaacaatgtagatcatcaagctagaatttgacacagcgcaacagtcgccggtgtggcgaatacatttggttatggcgctatgacaaaccatcttggagacattcaaagaagtaaatgtatcattatcattggggcaaatccagcggtaaatcatcctgtgggttttagacatttcttaaaagcaaaagaaaaaggtgcaaagcttatcgttgtagatcctagatttacaaaaagtgcagcaaaagcggatatttatgcaagaattcgtccaggaactgacattgctttcatgtatggaatgctaaaaatcatctttgatgaaggtttagaagatacaaaatatcttgatgaaagagtttttggaatcgataaaattcgtgaagaagcggcaaaatggacagctgaagaggtggaaaatgttacaggaatttctaaagaacttttggtgcaaatcactcacgaagtagctaaaaacaaaccaactacgcttatttgggctatgggtttaactcaacacactgtaggaacttcaaatacacgtttagcacctattgtgcaaatggtacttggaaatataggtaaatttggtggtggagttaatatcttacgcggacatgataatgttcaaggtgcttcagatatggcttgtttgagcgaaaatttaccaggttattatcctttaaatgaagcgacttggagatactatgccaaaatttggggtgtggattatgagtggcttttaggaaattttgtaagcaaagattggatgcataaaaccggactttcacttgctagatggtgggcagcggctttaaatggaaaagatggaaatgatgctatcgataacgcaggaacgcctttaaaagctttagtagttatgggaaatggtatcacttcgactgcacaacaagtaaaagttaaagaaggtttggaagctttagagcttttagttttagccgatccttttgtaaatgaagcaggcattattgcagaaagaaaagatggaatttatcttttacctgcagcaacacagtttgaaacaagcggaagtgtaacagcaacaaatcgtagcggacaatggagatttaaagttgtagatccactttatgaaagcatggaagatcaagaaattttatttgagcttgctaaaaaattaggtttttatgaagactttaccaagactttacgcgatgaaaaaggtgagattgtttggcctgaaaatgcaacaagagaaattgcaaaagcagttagaagtatagggcttaatggttggagtcctgaaaggcttaaaaagcatactttatactgggataaatttgatgaggtaactttagaaggaaaagatgaagttgctggtgagtattacgggcttccttggccttgttggagtgataagcacccaggttctcctgtactttataataccgacattgaagtcgcaaaaggtggtatgggctttagaaataattttggacttgagtatgaaggagagagtttacttgctaaaaatgcgcctttaaattcacctattgatacaggttatccacaaattactaaagataatatagaaaaagttttaggtattactttaagtgcccaagaaaaagaaaaaatgggatcaacttggtcttatgatgatagcaatatcatagcaactaaatgtatagaaaaaggcatagttccttatggaaatgctaaagctagagctgtagtttggacttttaaagataaaattccactccaccgtgagcctttacattctccaagaaacgatttggtgcaaaaatatccaagttttgaagatcaaaaagcgctttaccgcgtggatactaaatttgtgtctgtgcaacaagctaaggattattctaaagaattcccgcttaatcttg

SEQ ID NO: 3806 - DNA, 22175 bp, synthetic construct
  misc_feature 1..22175: note = Synthetic
  source 1..22175: mol_type = other DNA
atcgtattaatgatgaggtaaaaagtggagatatagggtattatcatcttattgacacaagtttgaatttaatcgatgagagcttgcaatttattcaagataaagagtatgtaaaaaatatcgttttagtgggaatgggaggttcaagttgtggtgtaaaagccttgcgtgatatgctttttaatgaaaaaagcaaccaaagagagctttttatactcgataacacaagctcgcattcttttaataagactttagaaaaaatcaagcttgaagaaagtttgtttttaatcatcagcaaaacaggtagtactatagaagttgtatcgctttttaaacttcttattgaacattttaaacttgatatgcaagaattaaaaaaatactttgtttttattactgataaggattcaaaacttcatcaagaaggtgaaaatttaggtattaaatgcttttttatccctgcaaatgtaggaggtcgttttagcatactttcagccgtaggtatagttccactttgtttttgtggctataatgccaaagctcttttagaaggagctaaagcttgttttgaagatttttttactcacaaaaaagatgaaattttacaaaaagcctatcattattgtacacacaaaaatgccaatatcaatgtacttttttcatatagcgatgcttttaaaggctttaatgaatggtatatccagcttattgctgaaagtttaggtaaaaagcaaggctataaacgcataggtttaactcctattgcgctcattggcgcaagagatcagcatagttttttacaactcatcatggatggacctaaaaataaaactgtaacttttttaaaaatcaaagacgctcaaaaagcacctattatccctgatattcattttaaatttttagattctttaagtaataaagtcaatcttcacgaacttttaaacgctcaatgtgatgcaactatgcacgctttaatcgctgaaaatttgagtgttgatgtgatagaacttgaaaaacttgacgcttggcatgcgggatatttgatgtattattatgaactttttacttcaacttgcggtgttatgctagggattaacacttatgatcaacctggtgtggaagttggaaagttgatcttaaaaaatatattaaattcttaatcaaaattcattaaaaaagagtataatgattttaagttaaaattataataaaaatttttaattaataataataattattatttaagaattttatgttataattttaaaaattaaaaaaaaggagtcaatcatgtcagttacaaaacaattattacaaatgcaagcagatgctcatcatctatgggttaaatttcataattatcactggaatgtaaaaggtttgcaatttttttctatacacgagtacacagaaaaagcttatgaagaaatggcagaactttttgatagttgtgctgaaagagttttacaacttggcgaaaaagctatcacttgccaaaaagttttaatggaaaatgcaaaaagtccaaaagttgcaaaagattgctttactccgcttgaagtcatagaactgatcaaacaagattatgaatatcttttagcagaatttaaaaaactcaatgaagcagcagaaaaagaaagtgatactacaacagctgcttttgcacaagaaaatatcgcaaaatatgaaaaaagtctttggatgataggcgctactttacaaggtgcttgcaaaatgtaatttaaggggctttatgccccaattatacaaactaggttataatatccttttttaaaggataaaattgaaagtacttaattttttttatgaaaaccaccctaaatttgaagtaagttatgaaagaaaaaatcaaatttcaaaaccaaatattatcataaaaggcccacgattttgtggtaaaaaaacacttatttttaattttttatctcaatttaaagcaagtgaaattttgtttttagatttatatgatacacgctttgaaaaacaaagtttagaaagacttgctgattttctgaatgaaaatttacaaattaaaattctttgcctttataatttggattttatccctaatttagaaaaaattaacattcccatcatcttaagtacaaatataaaagatttaaatgtaaatgggtttgaagagcttgaacttgattattttgattttgaagaatttattagtgtaagtaagaaaaatttacctataaataatttagtaggtctttttttgcaaagtggacgcagtaaatttggagaaaaaaacatacttctaagacaaagctttactcttttagaattagaaattttaaagtatttagctttaaatttgggtcagcaaatcagtatttctaagatatttatagaactcaaaaaaagattaaaaacttcaaaagatagtgtttatcaagctataaaaaaattagaaaatacttatgtgatttataccttaaaacatgatgaaaaaaaacttcaaaagatttattttaaagattttggcctaagaaataatctttgtatttcaaaggatttttcacatttatttgaaaatttagttttaagcgagttgtttaaatttaaagaagaatttttttataacaaatactttaacttttatagccaaatatctaaaattgcttatatttcaagtccaactttagatattgatttgatcaagctacgtgctaagaaaattttaccaaaggctttagaacttggaatttttcatgtgatttttatcactctttcaagcgaggatagtttttttgagcaaggggttaaatttgaagtcatatcttttgataaattttcacttggattttaggtgttgtttgagtttgtatcgtatttttcaaggttgtatcgtttgatgatttttgtaataagattgatataatatcccttgcgttcagaataagaatctaaagttttaatagcctctagtcctgttatctctttgccttcgcttgcaaatttagctcttgcatcgcgaaacttttcataagcaaaatgacgatttaaatttaaaacataagagtaaacactatcttgcagactatcaaaaatcttaattttatgttttttatctggatgtcttaaatcaggaattaaacctttctcaccccaagtccattctccaaaaagattatttgcttctcttgcgaagcgacttgtacctgtagcactttcaactaaagcttgggctatacccatggattttggaattttttgaatacgttttttatattctgcaaaatcataaagattttcaatgcgatatttgttttttatcgtgataagtttttcaagatttgtttgatttgaagtcctaaagcctgttttgtaagcatctttaaaaaaggcttcgataaaagctctttcttgttcaatttttttaaagctttgatcaaacatttcattcatttttataaaaaaaatttgtcttttttgatctatatcaagtttgtaatattcctctccaaagccattttttagatcatcagcaaaaagtgggattagaaaaagactaagaaaaattataattggcttcaaaacaatactttacctttccttcaaaaaacaattcttcatttttatatgtaaacccaacctcttcaccacttttaggagttattttaactttattttgtacttttttatttaaaaatgccagataaaaacaagcccccattcctgtgccacaagctaaggtttcatcttcaactccgcgttcataggtacgaacttttaaatgattttcatctaaaatttttacaaaattaacattggcattatatttttgtctcattttttgacaaagtattgtatcaaattcatctaaattttgacaaaaatgcactagatgtggaactccagtgtcgcaaagttgccaagtttttcctaattcttcaaaagtattttgcacgctttttattttgcctaaagatacttcaactttatcttgatttacctttgcttttattactcccgcaccggttaaaaaaatcatgctaggatttattttgttgatatgatgtgcaaaatgtgccgcagcccttgagccattgccacacatagcagcccttgagccatcgttattataaaattcccattcaaagtcgtatttttcatgaggcaatatcacgataaagccatccccacctatgccctcataacgattgcaaagttctttagctaaagcacttctatcttcttttctatcagcatttgttatgacaaaatcatttccacttgcacaatatttataaaatttcacatttttcctttagaaatttcttgtattactttaacacattcttgcctaaaatcgacataagaattagtatttttaatgataaaatctgcttttttaagtttttcttcaatatctatttgagaatcaagtctcacttttgcagcttctaagctgagcttatctctttgcatgattcttttaaggcttaattctttaggtgcgtaaattactatgattttgcctaaattttcataagcaccgctttcaaaaaaaagaggaatttctacaaaaaaagctttattttctttatctagaatttgcatttgttctaaaattttagctcgaattttaggatgagtgaaattttctaaggtttttttagcttctttgttgttaaaaacaatttctccaaggatttttctatcgattttcttttcttttgtgagtaaattttttaagttaaagggagaaaaaatcttttcaagttctaaagcattttcatctaaaattttatgagcgattttgtctgcgctaatgcttttaaagcctaaagaattcgctatttctataaaagtgcttttaccacaagcaattgaagcggttacaaaaaaagcatttttcatcttatgccttattaaaacttttttcgttaaaatacctttttagttcttaaaggaaaataaatgaaaatttcatatgaagatgcaggcgtaagtatagataatggaaatgcctttgtagaggctataaaacctttggttaaagaaacttttaatgataatgttgtaggcggaattggttcttttgctggtgcttttagaatgccaagtggttttaaaaagcctgtgattttaggtgcaacagatggtgttggtaccaagcttcgcttggcaattgatgctaaaaaatatgatactatagggcaagatttagtagcaatgtgtgtgaatgatttgatttgtaattttgctacgcctttgtttttcctagattattatgctacagccaagctcgaagtagaagtagcaaaggctgttgtatcaggcattgccaagggatgtaagatggcaaattgtgcattaatcggcggagaaactgctgaaatgcctggaatgtatgcaaaagatgattttgatcttgcgggttttgcagtgggtatggctgaagaagatgagatcgatagaagtaaatttgttaaaaatggtgatattttattggcacttcctagttcaggacttcattcaaatggttattctttagctagaaaagtactttttgaaagtttaaaattaaaatttgatgacaagatagagggtaaaaatttaattgatattttattagagcctacaaggatttatgtgcgtgattttcttacattaaagccttatattagtgctctagctcatattacagggggtggtttagtagaaaatttaccacgcgttttgcctcgtggtatgggtgcaactatacgcaaacatcatcttaaaactcctgaaattttttatactataggacaggctgtagaagaaagcgaaatgtatagaagctttaacatgggagtgggtttagtaatggttgtagatccttctaatgtaagtaaggttttagaaaattcagatgcctttattattggcgaaatttgcattaatgaaggtattgttttagagtgaaaacaaattattatgattatttatgtgctaaaatgtatgtaattttgcccataaaagcccataaagacaaactaaaattttatctttcttatgtaaataagaaagataaaatttttagagttaatgtgtggaagtgggcggttttgataaaaattgccaaagatgataaaacgaaatatttttgttcgaatgtattaaataaagggtaaaatgcacaatttaaatgaagctttgtttcaaaaaaagataaaagaaattcgcttaaaagcaatagcgagtattatttgtgggtttttaggtatcattccttatcttggagttttatttgttcttgcgagttggattttattttttattgtgctttatgatttaaaaatctatggtggtgctaaaaatttgtttaagaatttccttattagtgtagggattggattttttggtattcttgttaatacaagtattttatttgcaatgctaaagcctagaactggcatttttggtgggctttattttaatcaagataatatttttatggctattgctatatttttagtattacattttgctattttggctttaatttttccttttttgaaagctttttactatgaaattgctagaacaacaaagcaaaagtatttcacttatgcttttaataccttttatttagggcttcttactttgattatcggcataggcttggtgtttttgctagcaagtttggttttttggattttagcgtgggtcaaatttaaagaatttgatgagcaagaactttcaaatttagaagaaagattggcaaaagcacaaaaaaaggtttttgattttgatttaaaatggattaaaatcacaatggcttcatttataattttaaacttgctcgttttaacattttcgtttatattagaagttattagctttgaagattttaggttttactacacaaaaaaaactttattttacacagccataatcctagctttgcttagtgtgtttttgttttgtaaaaagataaaaaattacaaactttttatttattttttcatatggcaaggtttaagtgtttttggtagtcatcttctttttattcctgattttatggtagatcaacaaattgtatatggaagtttaaacataatattaagtctatgctatattatttttgcttttttattttttaaaattttgattcaaattacaaaggaaaaacttttttatcttatttttgcattttatgtttgcatagaaattttgataatattaattttctttatttttatgatggttgataactattatatatttacaaaaagtcctataaagatgctcatagataattataaattactttttcaagttgtttatttcgtttcatttttaattgtttggcttatgcttaaaggacaaaaaaatgtaaaaatatgttagaatgatgaaaaaatactattttacgtagatgtttattaggatatattcgtatgtcttaaagctctttatggggtgttaagtaattataatatttaaaaattaaaaaatatatagtttatccacattttatagtttaacttctaaaaatttgatcatctcttttttcattttttagagctagaaaacatatgagtgaaattgctttaaagttagttagagcagttgatactaaatattttgataagaaatttaaatagattgattttacttaaattaaagactttttgcctcgtgatacaaaattaagtgatgaatttttagttaaattgatattaaatatgaaaaaattataaatattaatactttttcaaattaatagtaaatatagagggtttgattttttcacaaaagatttggatagaacttgcaaaaaactttcttcaatatttatacttttaaattttgatgcaaatcctattcaatatagcattggcaaaataaactaaaaagcttaaaatagctatactcaaaagaatttcaaaccatgcaaaatttcctgttccaagatttgaaaccgcgttagcaaggatattaactccaccaagtgctttaatgcctttagcacatactccagcggcgatgattatgcttacgactaagaaaaaatttcagccatagcttttaaaatcaccatcatatcttcgcctaattttctagcatttctgtgtcttgcaaattcaacaagaaaaactaaagaaattcttacaaaatttgctatcacaacatcgagcttgatagtaaaaaaatacgctataaataaaaatataacaggtaaccaaggaaagagtgtgtaaaaagtagggcatttaggatcaatgatttgcggaatttcaacttcatcatttaaaacacctttttctttatctcttttatcaatccaagcaaaataaaaaggaatcaagatggcaataattacaacataggtaatcacactataaatttggtaatttaaaaaaagccctacgacattatcactttgtcctaccatatctgccatattgattgaatttccatcttttggatcataatcaagtgcaattaaagaaagcgcacatacagttgtaataggacggattttaagtgagattaaaacaggatacatacatgctaacaaaagcaaaagcaattcagcatagctagaaatgacgatttttaaagccattccaacaacaaaagttccacttaaaattaagtatttattttttgatttttcctgagggtttatttgctaaaaaagcaagttttgccgaagcattgatatgtttcatgtaagcagtaaagcctgccacactcatgataataagccctgctccagaaagctgacttttaaaagtcgctgtgataaaagataactatcaagtaaaacatttaaaagcttgtatactctttgtttggagtttttggtataggtgttcctgtgatataaaaagcaaaaataagcaagataatatttgaaagaaaaatacaaaaatgggatcgtattttttttgagtatatcataaaaattagcatagggtctcttgaatttacaataaattggattttatctaaatttttaaataaaaaatattttttatttaaaaattacttgttttttgtattataaaattaacatatatagtttggttactgaaaagtttatgtttgtttaaaaaaatgatttttgtattataaaattaacatatatagtttggttactgaaaagtttatgtttgtttaaaaaaatgatttttgtattataattatacacaaatcataaatattaaaaaggatctagtgtggcaagaattttggcatttgatataggaataagctctattggctgggcatttagtgaaaatgatgagttaaaagattgtggagttaggatttttacaaaggctgaaaatcccaaaacaggagaatccttagccttgccaagacgccttgcaagaagtgctagaaaacgccttgctagacgcaaagcaaggctaaatcacttaaaacatttaatcgcaaatgaatttaagttaaattacgaagattatcaaagctttgatgaaagtttagccaaggcttataaaggctctttaattagcccttatgagttaagatttagagctttaaacgagcttttaagtaagcaagattttgcaagagtgattttacatattgcaaaaaggcgtggctatgatgatattaaaaatagtgatgataaagaaaaaggtgcgattttaaaagctatcaagcaaaatgaagaaaaactagcaaattatcaaagtgtgggcgagtatctttataaagagtattttcaaaaattcaaagaaaattccaaagaatttacaaatgttagaaataaaaaagaaagttatgaacgctgcatagcgcaaagttttttaaaagatgaattaaatcttatttttaaaaaacaaagagaatttggcttttctttttcaaaaaaatttgaagaagaggtgtttagtgtagcattttataaaagggctttaaaagatttttctcatttggtgggaaattgtagttttttaccgatgaaaaaagagcgccaaaaaattctcccttagcttttatgtttgtagcacttacaagaattatcaatcttttaaacaatcttaaaaatactgaaggaattttatatacaaaagatgatttaaacacgcttttgaatgaagttttaaaaaacggcactctaacttataaacaaacaaaaaagcttttgggcttaagcgatgattatgaatttaaaggggaaaaaggaacttattttattgagtttaaaaaatataaagaatttataaaagccctaggtgatcatagtttaagccaagatgatttaaatgaaatagcaaaagatattacccttataaaagatgagattaagcttaaaaaggctttagcaaaatatgatttaaatcaaaatcaaattgatagtttaagcaaattggaatttaaagaccatttaaatataagttttaaagccttaaaacttatcactcctttaatgcttgaaggtaaaaaatacgatgaagcttgcaatgagcttaatttaaaagtagcaatcaatgaagataaaaaagattttttacccgcatttaatgaaacttattataaagatgaggtaactaatcctgtggttttaagggcgattaaagaatacagaaaggtcttaaatgccttacttaaaaaatacggtaaagtgcataaaataaacattgaattagcaagagaagtaggtaaaaatcacagccaaagagctaaaatagaaaaagagcaaaacgaaaactacaaggccaaaaaagacgccgaacttgaatgtgaaaaactaggcttaaaaataaatagcaaaaatattttaaaattaagattatttaaagaacaaaaagaattttgtgcttatagtggagaaaagattaaaattagtgatttgcaagatgaaaaaatgcttgaaattgatcacatttacccttattctagaagttttgatgattcttatatgaataaagttttagtttttaccaagcaaaatcaagaaaaacttaatcaaaccccctttgaagcctttggcaatgatagtgcaaaatggcagaaaattgaagttttagcaaaaaatttgcctactaaaaagcaaaaaagaattttagataaaaattacaaagacaaagagcaaaaaaactttaaagatagaaatctaaacgatactcgctacatagcaaggcttgttttaaactacactaaagattatttagattttttacctttaagcgatgatgaaaatacaaaattaaacgatacacaaaaaggctcaaaagtgcatgtagaagcaaaaagcggtatgcttacatcggctttaagacacacttggggctttagcgctaaggatagaaataaccatcttcatcacgccatcgatgcagtaattattgcttatgcaaacaactctatcgtaaaggctttttcagattttaaaaaagagcaagaaagcaacagtgcagaactttatgcaaaaaaaattagtgaattagattataaaaacaaaaggaagttttttgagccttttagtggttttaggcaaaaggttttagataaaattgatgaaatttttgtctcaaaacctgagagaaaaaagccaagtggagctttacatgaagaaacatttagaaaagaagaagaattctatcaatcatacggcggaaaagaaggagttttaaaagccctagagcttggtaaaatccgcaaagtaaatggtaaaatagttaaaaatggcgatatgtttagagtggatatttttaaacacaaaaagacaaataaattttatgctgtgccaatttatactatggattttgctttaaaagtattaccaaataaagctgtagcacgaagtaaaaaaggtgagataaaagactggattttaatggatgaaaattatgagttttgcttttctttatacaaagatagtttgattttaattcaaactaaagatatgcaagagccagaacttgtttattttaatgcttttacaagctctactgttagtttgattgtttcaaaacacgataataaatttgaaacgctaagcaaaaatcaaaaaatattgtttaaaaatgcaaatgaaaaagaagtaatcgcaaaaagcataggaattcaaaatctaaaagtatttgaaaaatacatagtttcagcacttggagaagtgacaaaggctgagtttagacaaagagaagattttaaaaatgagttacgatgaagcttttaaaacactgcttattagctctaatgccaagctaaatttagagctaaatcatcttgtgattaagcaagatgaaaatatagccaaattgtttttaaaagatataaatatcatcgttttagaaagcttacaagcaagccttagttccgcactttttaatgcctttgcaaggcataaaatcatcttgctaacctgcgatgaaactcatagtataaatggtatttttactccttttttagggcattttcaaagtgcaaaaatcgcaaaagaacaaataaatgtaagtgctcaaaaaaaggctattttatggcaaaaaatcattaaaaataaaatcctaaatcaagcctttgttttgaaaaaacacaataaaatagagcaaagcaatgagcttataaatttggccaaaaaagtaagcttaaatgatagtaaaaatatcgaagctgttgcagcggcgctttattttaaaactttgtttgggacttctttttcaagagatgagctttgctttgaaaattctgctttaaattatggctatgcaatcattagggcttgtattattagagcagtttgtataagtgggcttttgccttggcttggcattaagcacgataatatttataattcttttgcgctttgtgatgatttgatagaagtgtttagggctagtgttgatgattgtgttttaaagattaagggtgaaagtgagtttttaagcaaagatgacaaaagagcgttgattggcaatttacaaagcaaaatcaattttgatgggcaaaattatcctttaaacagagcgataaatcattatgtggcgaattttaaaaatgctttattgtatgaagatgaactaaagatagtgaaatttgatgattgaagataaatttatgcgcgtgcttttgatgtttgatgtgcctactaaaagtaaaaaagagcaaaaactagcaagtaaatttagaaacaatcttataaaattaggttattttatgctgcaatttagcgtttatatgcgtatttgcaagggtttaagttctgcaaaaagttctattgaaaatgtaaaaaagattttgccaccttatggaaatgtaagggctttaatcatcactgaaaagcaatttgataaaatggagcttttgcttggtggcatagtttttaatgaaaaagttaataacgaaaccaatttaacactttttgatatagatagtcatggagaatttaaatacaaaaattcaaataatgaagaaattcaaataaacaaaaaacaagaaaaatatcatcagcaaaatttatttgaattttaaaagcggttttaggggattgtaaccccgcagagtcccgcaaactctttattttagtccctttttaaatttcttatgagattatagcataatttttgctatttttcatcaaaaaacccctaaattttcattatctggtaaatatctattttaccataaagaaatttaaaaagggactaaaactacttaagctatgaaatggacttgtgttgtattttaccataaagaaatttaaaaagggactaaaacatcttgtttagcttcaacttcatcttcatcattttaccataaagaaatttaaaaagggactaaaactacaactactttaccatattgtgaaaaagtattttaccataaagaaatttaaaaagggactaaaataaaccctagtggattgaaactccgctagggctaattactccactaaaaggaggttgcgaatttgaaacttattgaaatttagggttgattaaaatcgaaataaaattatttaaataattttaaggcataaagataatatccactaaactttcattttctaaaatttcacattcttttggcaccaccataagggcagctttattgttaagattgtttataatcgcactagagccttcttttttgccttcaagattggctaaaatgcgtccattttcaaactttatgttgcaagcgacaaattccaaataaggtgtttttttcttgtaacttccttgtaaaaaggctttgcaaatatagtctttaggctgaagtaaccaagagtttaaaatctctcttgcgtaaagattaaacattaccatagccgagtaaggaaaacctggtaaggcgatgatgaatttttcattagccttggctattttgatatgtctgcctggttttatgtcggctttatcgatgatgatttcgtattctttgacggctttttttaaaaagtcaaaatctcccatagaaaccccgcccgttgtaatcaaaatatcacaactttgcaaagcactttcaagggtagaaaaagtggctttttcatcatcttttaaaagaggaaaaacccttgtatcgcaatttaaatttttagctaaattagctatggcgatatgatttgaagagcggatttgagcaggattttccaaggcttctcctagatccttgatctcacttccactacttaaaacccctacaataggctttataaacacactaatgtgaaaaaatccaagttcagccaaaagagctatctcgctataatttaaccttgtgccttttttgagtaaaatttcatcttttttatagttttctcctaccgcacgcacggcaaaagcttgaggaacttttttttctataaaaagagtatcattttctatgcgtatattttcaacagggactaaagtatcgcttccttcgctcatgagtgagcctgtaaaggtttttacacaagtaccattttgcacgctaaattgtggcatagtgcccgcaggtgtgaggcctaaaatttttaaaggcttatcttgatcttcaaatttgatcgcataaccatccatagccgaagttggaaattcgggctgatttttaggggcttttatgtcttgagctaaaatgcgtcctaaacactctgtaagagctattttttcaatcttttcataggttttgatatgagaatgtaaaatttttaaactttcttcataagacattaacattttttatccttttaaaagtcctgcaccgcaaagtttggttgatctttctttggcgtaaattctttctttgtttatcacatcatacttccaaatgggtgcacttgctttaaaatcttcaacaaattcattaagaagtttaagccctaattttctttgtttgcttaaaattcctgcaaaatacgagctttcatgaaccgccacatcgcctatagagtgagcaaaaagcaagctaataccatcaaaatctactcttttttgccactcatcaaaccatttttttaaaagcggttcataaatatcaaaactaagtgcctcaatgcctccttcttcacgcacaataccacaaaaagtcagtaaagcaccgcagtttttatccttggcaaattcataccattggctataaattttaggaatatctaaagaatcttgatagagtgtaaaatgttccatttaacccccgcaaactggcggtaaaagtgctattttatcaccagtttttaacttagtgttttcatcaaaaatgatttcatcatttaaagataccgcacaaagttctagccattcttttaaactctcatctttttgcaaaatttcttttaattcttttaaattttttacctcaagttctaaattttctttatttatggggcctaaaaattccacttttaccattttattcctttacttctaaatttcccatcattcctaaatcttcatgttctaaaatatggcaatgatacattctaagccctttaaaatcttgtttcattctaagtcttaactcttcattaggacgcacatttatagtatctcttaaggctctaaattcggctttttgaactttgccattgagttttgatgagatgagttcaaattgcgtgccatgtatatggaaaggatgatccatgtgagatttgtttatcactatccagtcttcaactactccaagtttggagcttaaatcaatgcgttttaaatcatagcttttgccattgattaaaaacatagacgcaagagcgatttttaattcaccttcactttttcccatcataccatgcatttgcatatgatcttcactcatgattatttctttaaattccttaggttcttctgaaggtttgaaaatttttaaattttttggaagttctacattttctttttttaggttaatattggctagaaatagggtattaggttcttcttttaccatcattttatccctatcataataagcactttctagcttaaaattcccatcttttggagcgtcgattaaaacttctacacgagaagcaggacttaagaaaagttcttctttataaatagctttttctataagtccaccatcagtaccaacaagtataaatttagctccttgtatgtgtaaatttaaatatcttgccgcagtagcattataaatgcgtatgcgttcgtttgtggcgagtttgattttaggtttaaattgtccattgatgagtacaaattctccttctctaccatttagccaatcatttaggttattgtttggaatttgagcgttttcatcaagacgcaaatcgctaatcatcaaatctttttcttttaaatgacttaaagcatctttttttgctttgatcacaaaagcccctgctaaacccataaaaacttgtttagaagcggtataatgaggatgtggatgataccagtaagttcctgcgctatcttgaggaatttcaaaacgatatattctttcttctcctgctaagataggatcatgtgggcttccatcttgatcaggtggcacaggaacgccatgccaatgtatagttgtagcttctttgagtttgtttttgactaaaatttcaagtttatctccttcaaaaacttctatttttggagcaggtgctaagccattgtaagtataaaataaggtttttttacctttgataagctctatatgattttctttgatttctagggtagcacgaaaaatatttttttctttactttcatttttgagtaaaggcaaggcttttaaaatttctccttgggggaattgttttggatctaaaagttttaaattttttggagcaaagttgataaaagaagtatctaagtcatgatttatagaatgatttttatgcatggagtgcatatcatgcataggatttgcataggctacgcttatacttgctagagtgagtgcattaaattttaaaaaatttcttctattcattagtttttccttttgcttgattttttgtattatagtcattattttttagtttttagtaaatatttattttgaaaatttggtttaattttgttatgattttagcaatttaatcaaggaaaaataatgttttatgaaaatattcaaactccagcttatattttagaagaagataaattaagaaaaaattgcgagcttttagcaagtgttggtgaaaaaagtggcgctaaagtgcttttagctttaaaaggttttgctttttcaggagcgatgaaaattgtcggagaatacctaaaaggttgcacttgtagcggactttgggaagcaaaatttgccaaagaatacatggataaagaaattcatacttattcacctgcttttaaagaagatgaaataggtgaaatagccagtttatctcatcatatagtgtttaactctttagcccaatttcataaatttcaagctaaaacacaaaaaaattccttaggtcttcgttgtaatgttgaattttctctagccccaaaagaactttacaatccttgtggaagatactcaagacttggaatttgcgctaaagattttgaaaatgtggatttaaatgccatagaaggacttcattttcacgcactttgtgaagaaagtgctgatgctttagaagctgttttaaaggcttttgaagagaaatttggcaaatggatagggcaaatgaaatgggtgaattttggaggaggacatcacatcacgaaaaaaggctatgatgttgaaaagcttattgctttgtgtaaaaatttcagtgataaatatggcgtgcaagtttatcttgaaccaggtgaagcggtgggttggcaaacaggaaatttggtggctagtgtagtcgatatcatagaaaatgaaaaacaaattgctattttagatacttcaagcgaagcacatatgccagatactatcatcatgccttatacaagtgaagttttaaatgctagaattttagccacaagagaaaatgaaaaaatttcagacttaaaagagaacgaattttcctatttgcttactggaaatacttgtttagcgggtgatgtaatgggagaatacgcctttgataaaaagcttaaaatcggcgataaaattgtttttttagatcaaattcattacaccattgtgaaaaacacaacttttaatggtataagacttccaaatctcatgcttttaaatgcaaaaaatgaacttcaaatgataagagaattttcttataaggattattctttaagaaattagtattatttataatttgcataaaatgttaattttactcggaagagaatcaaagatgtaaattttatgcaaagtattttattttttcaaatataaaatcaactcaaatatataattttcaatactttggtatgattttttaatattttaaatccttgtggaattttattgaaattcagtgatttttaaatcaaatagtattaagataaatcgatttaaaaatcggctttaaaatgaatattaggtatattttgcataatattcattcaagcaaaatttaaagctatttttgaaaattttgaatgcatgggagctttaatggatttggaaaaattaagattagctagaagtctttattatcaatgtctaggagagctttttgttttttcattttctgaagaaagattgtcaaaattacaagagtatttaaagacaatgcaagaatgtttatttgatgaaaatttaaaatcaaattttgatatcttgcttaagcatttagatgatgaaaattctatacaagcattttttaaagaatatgatttgctttttttaagtcttaaaaatagcattccaacgactttttcttacatagaagaaggttttgaaaattcaaatcctttactttgcgtgcgtcaaattttagtcaaaagtaaaataagacgcaatgaaaaattttttaaagaaagtgaagatagtgttggattttgtttattgttgatgagtgaatttttaaggcaaaatgaagatgatttagccaaagagctttttgaaaaagtgatcaataaaagcattgatgagtttttaggcgatgttttcatgaataaaaatgcgaatttatataaggaaattgcaagtattgcatcggcttttatggaatttgaaagactttgctttgaagtggaaaaacctgcaaaaataaattctaaaaaagtgcaaaacgatctatcgcgttcagaatttttaagaagagaagcaaataaacaaaggaggactcgtgaaaaatcgcagggaatttcttaaaaaatccgcttttgccttaggggctgctggagtgcttggtagcacaactttagctctagctaaagatgaagaaagaaaagatttggttaaaggtaaaagtaagaaaaaagaagtgctttttcaaagaagtgctaattgggaaaattattatataaaggctgagtaatgtcaagtgtaggtgaaaatatcaagcttacgcgtcgttcttttcttaaaatggcagcactttcaagcctagcaacaccgttgcttgctagaagtgaaactttaagagaagcgagtgctgatgagcttaaagaagcttatgaaggtagtaaaaaagtaaaaacagtttgtacagcctgttctgtaggctgtgggattattgcagaagtgcaaaatggtgtttgggtgcgtcaagaaatcgctcaagatcatcctgtgagttcaggtggacattgctgcaagggatctgatatgatcgatatggtgcgttcacatgtgcgtttaaaatatcctatgaaaaaagaaaatggagaatggaaacgcataagttatgagcaagctttaagtgagatcggagaaaaactagctgcttatcgtaaagaaaatcctgaaagtgttatgtttttaggttctgcaaaacttaataatgaacaagcttattatataagaaaatttgcagcattttttggaacgaacaatgtagatcatcaagctagaatttgacacagcgcaacagtcgccggtgtggcgaatacatttggttatggcgctatgacaaaccatcttggagacatccaaagaagtaaatgtatcattatcattggagcaaatccagcggtaaatcaccctgtgggttttagacatttcttaaaagcaaaagaaaaaggtgcaaagcttatcgttgtagatcctagatttacaaaaagtgcagcaaaagcggatatttatgcaagaattcgtccaggaactgacattgctttcatgtatggaatgttaaaaatcatttttgatgaaggcttggaagatacaaaatatcttgatgaaagagtttttggaattgataaaattcgcgaagaagcagcaaaatggactgctgaagaagtagaaaatgttacgggaatttctaaagaacttttggtgcaaatcactcacgaagtagctaaaaacaaaccaactacgcttatttgggctatgggtttaactcaacatactgtaggaacttcaaatacacgtttagcacctattgtgcaaatggtacttggaaatataggtaaatttggtggcggagttaatatcttacgcggacacgataatgttcaaggtgcttcggatatggcttgtttgagtgaaaatttacctggttattatcctttaaatgaagcgacttggagatactatgccaaaatttggggtgtggattatgaatggcttttaggaaattttgtaagtaaagattggatgcataaaaccggactttcacttgctagatggtgggcagcagctttaaatggaaaagatggaaatgatgctatcgataatgcaggaacgcctttaaaagctttagtagttatgggaaatggtatcacttcaaccgcacaacaagtaaaagttaaagaaggtttggaagctttagagcttttagttttggctgatccttttgtaaatgaagcagggattatcgcagaaagaaaagatgggatttatcttttacctgcagcaacacagtttgaaacaagcggaagtgtaacagcaacaaatcgtagcggacaatggagatttaaagttgtagatccactttatgaaagcatggaagatcaagaaattttatttgagcttgctaaaaaattaggcttttatgaagactttactaagactttacgcgatgaaaaaggtgagattgtttggcctgaaaatgcaacaagagaaattgcaaaagcagtcagaagtatagggcttaatggttggagtcctgaaaggcttaaaaagcatactttatactgggataaatttgatgaggtaactttagaaggaaaagacgaagttgctggcgagtattacgggcttccttggccttgctggagtgataagcacccaggttctcctgtactttataataccgacattgaagtagcaaaaggtggtatgggctttagaaataattttggacttgagtatgaaggagagagtttacttgctaaaaatgcgcctttaaattcacctattgatacaggttatccacaaattactaaagataatatagaaaaagttttaggtattactttaagtgcccaagaaaaagaaaaaatgggatcaacttggtcttatgatgatagcaatatcatagcaactaaatgtatagaaaaaggcatagttccttatggaaatgctaaagctagagctgtagtttggacttttaaagataaaattccactccaccgtgagcctttacattctccaagaaacgatttggtacaaaaatatccaagttttgaagatcaaaaagcactttatcgcgtggatac

SEQ ID NO: 3807 - DNA, 22175 bp, synthetic construct
  source 1..22175: mol_type = other DNA
  misc_feature 1..22175: note = Synthetic
agaagttattgatgaagaaggcaataaaaaagatgaaggtgaagatggattgctttgtataactaaaccctggccttcgatgattcgtggaatttggggtaatgatgaacgttatatagaaagttatttttctcaagctaaaaaagatggaaaagctgtatattttagtggcgatggcgctttttacgataaaaatggttatattaccatcacaggaagaacagatgatgtggttaatgttgcaggacatcgtataggaacggctgaaattgaaagcgctattgctaaacatccaagtgtagcagaatcagctgtagtgagtattttggatgcgattaagggcgagtcactgtttgcttttgtggttttaagtcctgcatccagttgtgatcttggcggagctatagaaactttaaaagaacttaatgacattttaagagtagagataggacctatagctaaaatagaaaaaattctttatactccaggtttaccaaaaactagaagtggtaaaataatgagaagaattttaagaaccatagcaagaggtgaagaaatcaaacaagatatttcaacgcttgaagattctggagtagtagaaaccattgttaaattagctaaggcagagtttgaataacaagcaaaaagaactttgccttgttgcataaaaattcataaaaataagctataatgataaaaaaataaaaggaaatttttatgcttcaaacttgtattttccctgcggcaggttatgggacgagatttttacctgcaacaaaaactttacctaaagagatgttacctatcttaaccaaacctttgatccattatggggttgatgaagctttggaagcaggaatggaaaatatgggatttgtaacaggacgtggaaaaagagctttagaggattattttgatatttcttatgaacttgaacatcaaatttcaggtacaaaaaaagaatacttacttgatgaaattcgttctttaatcaatcgttgcacctttacttttacaagacaaaatcaaatgaaaggtttaggtgacgcggttttaaaaggtaaacctttagttggcgatgaagcttttggcgtaattttggctgatgatttgtgtgttaatgaagaaggcttaaatgttatggctcaaatggtaaaaatttatgaaaaatatcgctgcaccatcatagctgtgatggaagtaccaaaagaacaagtttcaaactatggagtaatttctggaaattttgtagaagaaaatcttattatggttaattctatgatagaaaaaccaagtcctgatgaagctccaagtagtcttgctatcataggaagatatattttaactcctgatatttttggaattttagaaaatactaaagcaggaaaaaatggcgaaattcaacttaccgacgcgcttttaactcaagcaaccaatggtatggttttagcttataaatttcaagggaagcgctttgattgtggaagcgtagaaggctttgtagaggcgacaaattatttttacgagaaaagtaaatgttaaacaatacacttttttttaagcaaagtgaaattcacactataagttcttatgcaaatcgtattaatgatgaggtaaaaagtggagatgtagggtattatcatcttattgacacaagtttgaatttaatcgatgagagcttgaaatttattcaagataaagaatatgtaaaaaatatcgttttagtgggaatgggaggttcaagttgtggtgtaaaagccttgcgcgatatgctttttaatgaaaaaagcaaccaaagagagctttttatactcgataacacaagctcacattcttttaataagactttagaaaaaatcaagcttgaagaaagtttgtttttaatcatcagtaaaacaggtagcactatagaagtcgtatcactttttaaacttcttattgaacattttaaacttgatatgcaagaattaaaaaaatactttgtttttattactgataaggattcaaaacttcataaagaaggtgaaaatttaggtattaaatgcttttttatccctgcaaatgtaggaggtcgttttagcatactttcagccgcgggtatagttccactttgtttttgtggctataatgccaaagctcttttagaaggagctaaagcttgttttgaagatttttttactcgcaaaaaagatgaaattttacaaaaggcttatcattattgcacacacaaaaatgccaatatcaatgtgcttttttcatatagtgatgcttttaaaggctttaacgaatggtatatccagcttattgctgaaagtttaggtaaaaagcaaggctataaacgtataggtttaactcctattgcactcattggtgcaagagatcagcatagttttttacaactcattatggatggacctaaaaataaaactgtaacttttttaaaaatcaaagacgctcaaaaagcacctattatccctgatattcattttaaatttttagattctttaagtaataaagtcaatcttcacgaacttttaaacgctcaatgtgatgcaactatgcatgctttaatcgctgaaaatttgagtgttgatgtgatagaatttgaaaaacttgacgcttggcatgcgggatatttgatgtattattatgaactttttacttcaacttgcggtgttatgctagggattaacacttatgatcaacctggtgtggaagttggaaagttgatcttaaaaaatatattaaattcttaatcaaaattcattaaaaaaagagtataatgattttaagttaaaattataataaaatttttaattaataataattattatttaagaattttatgctataattttaaaaatcaaaaaaaggagtcaatcatgtcagttacaaaacaattattacaaatgcaagcagatgctcatcatctatgggttaaatttcataattatcattggaatgtaaaaggtttgcaatttttttctatacacgagtacacagaaaaagcttatgaagaaatggcagaactttttgatagttgtgctgaaagagttttacaacttggcgaaaaagctatcacttgccaaaaagttttaatggaaaatgcaaaaagtccaaaagttgcaaaagattgctttactccgcttgaagtcatagaactgatcaaacaagattatgaatatcttttagcagaatttaaaaaactcaatgaagcagcagaaaaagaaagtgataccacaacagctgcttttgcacaagaaaatatcgcaaaatatgaaaaaagtctttggatggtaggcgctactttacaaggtgcttgcaaaatgtaatttaaggggctttatgccccaattatacaaactaggttataatatccttttttaaagaataaaattgaaagtgcttaattttttttatgaaaaccaccctaaatttgaagtaagttatgaaagaaaaattcaaatttcaaaactaaatattatcataaaaggcccacgattttgtggtaaaaaaacgcttatttttaattttttatctcaatttaaagcaagtgaaattttgtttttagatttatatgatacacgttttgaaaaacaaagtttagaaagacttgctgattttttgaatgaaaatttacaaattaaaattctttgcctttataatttggattttatccctaatttagaaaaaattaaaattcccatcatcttaagtacaaatataaaagatttaaatataaatgggtttgaagaacttgaacttgattattttgattttgaagaatttattagtgtaagtaagaaaaatttacctataaataatttagtaggtctttttttgcaaagtggacggagtaaatttggagaaaaaaacatacttttaagacaaagctttactcttttagaattagaaattttaaagtatttagctttaaatttgggtcagcaaatcagtatttctaagatatttatagaactcaaaaaaagattaaaaacttcaaaagatagtgtttatcaagctataaaaaaattagaaaatacttatgtgatctatattttaaaacatgatgaaaaaaaacttcaaaagatttattttaaagattttggcctaagaaataatctttgtatttcaaaggatttttcacatttatttgaaaatttagttttaagcgagttgtttaaatttaaagaagaatttttttataacaaatactttaacttttatagccaaatatctaaaattgcttatatttcaagtccaactttagatattgatttgatcaagctacgtgctaagaaaattttaccaaaggctttagaacttggaatttttcatgtgatttttatcactctttcaagcgaggatagtttttttgagcaagggattaaatttgaagtcatatcttttgataaattttcacttggattttaggcgttgtttgattttgtatcgtatttttcaaggttgtatcgtttgatgatttttgtaataagattgatataatatcccttgcgttcagaataagaatctaaagttttaatagcctctagccctgttatctctttgtcttcgctttcaaatttagctcttacatcgcgaaacttttcataagcaaaatgacgatttaaatttaaaacataagagtcaacactatcttgcagactatcaaaaattttaattttgtgttttttatctggatgtcttaaatcaggaattaaacctttctcaccccaagtccattctccaaaaagattgtttgcttctcttgcgaagcgactggtacctgtagcactttcaactaaagcttgggctatacccatggattttggaattttttgaatacgttttttatattctgcaaaatcataaagattttcaatgcgatatttgttttttatcgtgataagtttttcaagatttatttggtttgaagtcctaaagcctgttttgtaagcatctttaaaaaaggcttcgataaaggctctttcttgttcaatttttttaaagctttgatcaaacatttcattcatttttataaaaaaaatttgtcttttttgatctatatcaagtttgtaatattcctctccaaatccactctttagatcatcagcaaaaagtgggattagaaaaagactaagaaaaattataattggcttcaaaacaatactttacctttccctcaaaaaacaattcttcatttttatatgtaaaccccacctcttcaccacttttaggagttattttaactttattttgtacttttttatttaaaaatgccagataaaaacaagcccccattcctgtgccacaagctaaggtttcatcttcaactccgcgttcataggtgcgaacttttaaatgattttcatctaaaatttttacaaaattgacattggcattatatttttgtctcattttttgacaaagcattgtatcaaattcatctaaattttgacaaaaatgtactagatgtggaactccagtgtcgcaaaattgccaagtttttcctaattcttcaaaagtattttgcacgctttttattttgcctaaagatacttcaactttatcttgatttacttttgcttttattactcctgcgccagttaaaaaactcatgttaggatttattttgttaatatgatgtgcaaaatgtgccgcagcccttgagccattgccacacatagcagcccttgagccatcgttattataaaattcccattcaaaatcgtatttttcatgaggcaatatcacgataaagccatccgcacctataccctcataacgattacaaagttctttagctaaaacacttctatcttcttttctatcagcatttgttatgacaaaatcattcccacttgcacaatatttataaaatttcacatttttcctttggaaatttcttgtattactttaacacattcttgcctaaaatcggcataagaattagtatttttaatgataaaatctgcttttttaagtttttcttcaatatctatttgagaatcaagtcttgcttttgcagcttctaagctgagcttatctctttgcatgattcttttaaggcttaattctttgggtgtgtaaattactatgactttgcctaaattttcataagcaccgctttcaaaaaaaagaggaatttctgcaaaaaaagctttattttctttatctagaatttgcatttgttctaaaattttagctcgaattttaggatgagtgaaattttctaagatttttttagcttctttattgttaaaaacaatttctccaaggatttttctatcgattttcttttcttttgtgagtaaattttttaagctaaagggagaaaaaatcttttcaagttctaaagcattttcatctaaaatttcatgagcgattttatctgcattaatgcttttaaagcctaaagaattcgctatttctataaaggtgcttttaccacaagcaattgaagcggttacaaaaaaagcatttttcatcttatgccttattaaaacttttttcgttaaaatacctttttagttcttaaaggaaaataaatgaaaatttcatatgaagatgcaggcgtaagtatagataatggaaatgcctttgtagaggctataaaacctttggttaaagaaacttttaatgataatgttgtaggtggaattggttcttttgctggtgcttttagaatgccaagtggttttaaaaagcctgtgattttaggtgcaacagatggggttggtaccaagcttcgcttggcaattgatgctaaaaaatatgatactatagggcaagatttagtagcaatgtgtgtgaatgatttgatttgtaattttgctacgcctttgtttttcctagattattatgctacagccaagctcgaagtagaagtagcaaaggctgttgtatcaggcattgccaagggatgtaagatggcaaattgtgcattaatcggcggagaaactgctgaaatgcctggaatgtatgcaaaagatgattttgatcttgcgggttttgcagtgggtatggctgaagaagatgagattgatagaagtaaatttgttaaaaatggtgatattttattggcacttcctagttcaggacttcattcaaatggttattctttagctagaaaagtactttttgaaagtttaaaattaaaatttgatgacaagatagagggtaaaaatttaattgatattttgttagaacctacaaggatttatgtgcgtgattttcttacactaaagccttatatcagtgctctagctcatattacagggggtggtttagtagaaaatttaccacgcgttttacctcgtggtatgggtgcaactatacgtaaacatcatcttaaaactcctgaaattttttatactataggacaggctgtagaagaaagcgaaatgtatagaagctttaacatgggagcgggtttagtaatggttgtagatccttctaatgtaagtaaggttttggaaaattcagatgcctttattatcggcgaaatttgcattaatgaaggtattgttttagaatgaaaataaagcgtcaatacgctttatttgtgtattttaagttctatttttgcagtgttttgttcttttggcaaaggattggtttgtgctagataaaaggctacagtacatttacaagcatagcgataagtaaaagaggagtggttcgttttataatatccattggagctacttttgcaaatccagctaaagctatgattccgcctgctattggtgaagctgcacgacctaagcaagatgcaatttctataggtaaaactagagtaataggtgcaacgcctaatttcatagctatatcaggagttaattttccaaaagcattaaaagcagcaactctactccccataatcactatggcaaaataaactaaaaagcttaaaatagctatactcaaaagaattccaaaccatgcaaaatttcctgttccaagatttgaaaccgcgttaccaaggatattaactccaccaagtgctttaatgccttcagcaaatactccagcagcgatgattatgcttacgactgagataaaaatttcagccatagcttttaaaatcaccatcatgtcttcgcctaattttctagcatttctgtgtcttgcaaattcaacaagaaaaactaaagaaatgcttacaaaatttgctgtcgcaacaccgagcttgatagtaaaaaaatacgctgtaaataaaaatacaacaggtaaccaaggaaagagtatgtaaaaagtgggacatttaggatcaatgatttgtggaatttcaacttcatcatttaaaacacctttttctttatctcttttatcaatccaagtaaaataaaaaggaatcaagatgacaataactacaacataggcaatcacactataaatttggtaatttaaaaaaagccctacgacattatcactttgtcctaccatatctgccatattgattgaatttccatcttttggaccataatcaagtgcaattaaagaaagcacacatacagctataataggacggattttaagtgagattaaaacagagattaaaacaggataaatacatgctaacaaaagtaaaagtaatccagcatagctaaaaatgacgatttttaagctatttcaacaacaaaagttccacttaaatcaagtatttatttttgattttcctaagggtttatttgctaaaaaagcaagttttgccgaagcattgatatgtttcatataagcagcaaaacctgccacactcatgataataagctctactctagaaagctggcttttaaaagttgctgtgataaaagctaaaatattcaaaaagcttgtatgttctctgcttgaggtttttggtataggtgttcctgtgatgtaaaaagcaaaaataaacaagataatacctgaaagaaaaaatacaaaaatgggattgtattttttgagtatataataagcaacgacaattaccgttaaaagtgtagaacatatcataaaaattggcatgatttctcctgaatttacagcttatgaatttaattttagctaaatttttaaataaaaaatattttttatttaaaaattacttattttttgtattgcaaaattaacatatgtatagtttgattactgaaaagtttatgtttgtataaaaaatgatttttatattataattataagcaaatcataaatatcaaaaaggatctagtgtggcaagaattttggcatttgatataggaataagctctattggctgggcatttagcgaaaatgatgagttaaaagattgcggagttaggatttttacaaaggctgaaaatcctaaaacaggagaatccctagccttaccaagacgccttgcaagaagtgctagaaaacgccttgctagacgcaaagcaaggctaaatcacttaaaacatttaatcgcaaatgaatttaagttaaattacgaagattatcaaagctttgatgaaagtttagctaaggcttataaaggctctttaattagcccttatgagttaagatttagagctttaaacgagcttttaagtaagcaagattttgcaagagtgattttacatattgcaaaaaggcgtggctatgatgatattaaaaataatggtgatgaagaaaaaggcaagattttaaaagctatcaagcaaaatgaagaaaaattagtaagttatcaaagtgtaggcgagtatctttataaagagtattttcaaaaattcaaagaaaattccaaagaatttataaatgttagaaataaaaaagaaagttatgaacgctgcatagcgcaaagttttttaaaagacgaattaaagcttatttttcaaaaacaaagagaatttggcttttctttctcaaagaaatttgaagaagaagtgcttagtgtagcattttataaaagggctttaaaagatttttctcatttggtgggaaattgtagttttttactgatgaaaaaagagcgccaaaaaattcgcccttagcttttatgtttgtagcgcttacaagaattatcaatcttttaaacaatcttaaaaatactgaaggaattttatatacaaaagatgatttaaacacgcttttaaatgaagctttaaaaaacggcactctaacttataaacaaacaaaaaagcttttgggcttaagtaatgattatgagtttaaaggagaaaaaggaacttattttattgagtttcaaaaatacaaagaatttgtaaaagccctaggtgagcataatttaagccaagatgatttaaatgaaatagcaaaagatattacccttataaaagatgagattaaacttaaaaaggctttagcaaaatatgatttaaatcaaaatcaaattgatagcttaagcaaattggaatttaaagaccatttaaatataagttttaaagccttaaaacttatcactcctttaatgcttgaaggtaaaaaatacgatgaagcttgcaatgagcttaatttaaaagtagcaattaatgaagataaaaaagactttttacccgcatttaatgaaacttattacaaagatgaagtaactaatcctgtggttttaagggcgattaaagaatatagaaaggtcttaaatgccttgcttaaaaaatacggtaaagtgcataaaataaacattgaattagcaagagaagtaggtaaaaatcacagtcaaagagctaaaatagaaaaagagcaaaacgaaaactacaaggccaaaaaagacgccgaacttgaatgtgagaaactaggcttaaaaataaatagtaaaaatattttaaaattaagattatttaaagaacaaaaagaattttgtgtttatagtggggaaaagattaaaattagtgatttgcaagatgaaaaaatgcttgaaattgaccatatttacccttattctagaagttttgatgattcttatatgaataaagttttagtttttaccaagcaaaatcaagaaaaacttaataaaaccccctttgaaacctttggcaatgatagagtaaaatggcagaaaattgaagttttagcaaaaaatttacctactaaaaagcaaaaaagaattttagataaaaactacaaagacaaagagcaaaaagactttaaagatagaaatctaaacgatactcgctacatcgcaaggcttgttttaaactatactaaagattatttagattttttacctttaagtgatgatgaaaatacaaaattaaacgacacacaaaaaggttcaaaagtgcatgtagaagcaaaaagcggtatgctaacatccactttaagacacacttggggctttagcactaaggatagaaataaccatcttcatcatgccatcgatgcagcaattattgcttatgcaaacaactctatcgtaaaggctttttcagattttaaaaaagagcaagaaagtaacactgcagaactttatgcaaaaaaaattagtgaattagattataaaaacaaaaggaagttttttgagccttttagtggttttaggcaaaagcttttagataaaattgatgaaatttttgtctcaaaacctgagagaaaaaagccaagtggagctttacatgaagaaacatttagaaaagaagaagaattctatcaatcatacggcggaaaagaaggagttttaaaagccctagagcttggtaaaatccgcaaagtaaatggtaaaatggttaaaaatggcgatatgtttagagtggatatttttaaacacaaaaagacaaataaattttatgctgtgccaatttataccatggattttgctttaaaagtattaccaaataaagccgtggtgcaaggtaaagataaaaagtcaggtcttataaaagattggattttaatggatgaaaattatgagttttgcttttctttatacaaagatagtttgattttaattcaaactaaagatatgcaagagccagaacttgtttattatgaaaggctagatagctcaaatgctagcctaactgtttcaaaacacgataataaatttgaaacgctaagcaaaaatcaaaaaatattgtttaaaaatgcaaatgaaaaagaagtaatcgcaaaaagcataggaattcaaaatctaaaagtatttgaaaaatacatagtttcagcacttggagaagtgacaaaggctgagtttagacaaagagaagattttaaaaaatgagttacgatgaagcttttaaaacactgcttattagctctaatgccaagctaaatttagagctaaatcatcttgtgattaagcaagatgaaaatgtagcaaaattgtttttaaaagatataaacatcatcgttttagaaagcttgcaagcaagcctgagttccgcactttttaacgcttttgcaaagcataaaatcatcttgctaacctgtgatgaaactcatagtataaatggtgtttttactccttttttagggcattttcaaagtgcaaaaatcgcaaaagagcaaatgaatgtaagtgctcaaaaaaaggctattttatggcaaaaaatcattaaaaacaaaatcctaaatcaagcctttgttttgaaaaaacacaataaaatagagcaaagcaatgagcttataaatttggctaaaaaagtaaccttaaatgatagtaaaaatattgaagttgttgcggcggtgttgtattttaaaactttgtttggtgcttctttttcaagagatgagctttgctttgaaaattctgctttaaattatggctatgcaatcattagggcttgtattattagagcagtttgtatcagtggacttttgccttggcttggcataaagcacaataatatttataattcttttgcgctttgtgatgatttgatagaagtgtttagggctagtgttgatgattgtgttttagaacttgtgggtgaaagtgagtttttaaacaaagatgacaaaagagcgttgattggtcatttacaaagcaaaatcaattttgatgggcaaaattatcctttaaatagagcgataaatcattatgtggcaaattttaaaaatgctttattgtatgaagatgaactaaagatagtgaaatttgatgattgaagataaatttatgcgtgtgcttttgatgtttgatgtgccaactaaaagtaaaaaagagcaaaaactagcaagtaaatttagaaacaatcttataaaattaggttattttatgctgcaatttagcgtttatatgcgtatttgcaagggtttaagttccgcaaaaagttctattgaaaatgtaaaaaagattttgccaccttatggaaatgtaagggctttaatcatcactgaaaagcagtttgataaaatggagcttttgcttggtggcatagtttttaacgaaaaagttaataacgaaactaatttaacgctttttgatatagatagtcatggagaatttaaatacaaaaattcaaataatgaagaaattcaaataaacaaaaaacaagaaaaatatcaccagcaaaatttatttgaattttaaaagcggttttagaggattgtaaccccgcagagtcccgcaaactctttattttagtccctttttaaatttcttatgagattatagcataatttttgctatttttattaaaaaaccctgaaattttcattatctggtaaatatctattttaccataaagaaatttaaaaagggactaaaactttgttttcaacttttgcattagctttattattttccataaagaaatttaaaaagggactaaaacaaattatggagttaattttaatatcagtaaattttaccataaagaaatttaaaaagggactaaaaaccctagtggattgaaactccactagggctaattactccactaaaaggaggttgcaaatttgaaatttattgaaatttatggttgattaaaatcgaaataaaattatttaaataattttaaggcataaagataatatccactaaactttcattttctaacatttcacattcttttggcaccaccataagggcagctttattgttaagattgtttataatcgcactagagccttcttttttaccttcaagattagctaaaatgcgtccattttcaaactttatgttacaagcgacaaattccaaataaggtgtttttttcttgtagcttccttgtaagaaggctttgcaaatatagtctttaggctgaagcaaccaagagtttaaaatctctcttgcgtaaagattaaacattaccatagccgagtaaggaaaacctggtaaggcgataatgaatttttcattagccttggctattttgatatgtctacctggttttatgtcggctttatcgatgatgatttcgtattctttgacagcttttttcaaaaagtcaaaatcccccatagaaactccgccagttgtaactaaaatatcacaactttgcaaagcactttcaagggtagaaaaagtggctttttcatcatcttttaaaagaggaaaaacccttgtatcacaatttaaatttttagctaaattagctatggcgatatgatttgaagagcggatttgagcgggattttctaaggcttctcctagatctttgatctcacttccactacttaaaactcctacaataggctttataaacacactaatgtgaaaaaatccaagttcagccaaaagagctatttcgctataatttaaccttgtgccttttttgagtaaaatttcatcttttttatagttttctcctaccgcacgcacggcaaaagtttggggaacttttttttctataaaaagagtatcattttctacgtgtacattttcaacagggactaaagtatcgcttccttcgctcatgagtgagcctgtaaaggtttttacacaagtaccattttgcacgctaaattgtggcatagtgcccgcaggtgtgaggcctaaaatttttaaagttttattttgatcttcaaatttgatcgcataaccatccatagccgaagttggaaattcaggctgatttttaggggcttttatgtcttgagctaaaatgcgtcctaaacactctgtaagagctattttttcaatcttttcataggttttgatatgagaatgtaaaatttttaaactttcttcataagacattaacattttttatccttttaaaagtcctgcaccgcaaagtttggttgatctttctttggcataaattctttctttgtttatcacatcatacttccaaatgggtgcacttgctttaaaatcttcaacaaattcattaagaagtttaagtcctaattttctttgtttgcttaaaattcctgcaaaataagagctttcatgaaccgccacatcgcctatagagtgagcaaaaagcaagctaataccatcaaaatctactcttttttgccactcattaaaccatttttttaaaagcggttcataaatatcaaaactaagtgcctcaatgccttcttcttcacgcacaataccacaaaaagtcagtaaagcaccgcagtttttatccttggcaaattcataccattgtctataaattttaggaatatctaaagaaccttgataaagtgtaaaatgtttcatttaacccccacaaactggcggtaaaagtgctattttatcaccatcttttaacttagtgttttcatcaaaaatgatttcatcgtttaaagatacggcacaaagttctagccattcttttaaactctcatctttttgcaaaatttcttttaattcttttaaattttttacctcaagttctaaattttctttatttatggggcctaaaaattccacttttaccattttattcctttacttctaaatttcccatcattcctaaatcttcatgttctaaaatatgacaatgatacattctaagccctttaaaatcttgtttcattctaagtcttaattcttcattaggacgcacatttatagtatctcttaaggctctaaattcggctttttgaactttgccattgagttttgatgagatgagttcaaattgcgtgccatgtatatggaaaggatgatccatatgagatttgtttatcactatccagtcttcaactactccaagtttggagcttaaatcaatgcgttttaaatcatagcttttgccattgattaaaaacatagacgcaagagcgatttttaattcgctttcactttttcccatcataccatgcatttgcatatgatcttcactcatgattatttctttaaattccttaggttcttctgaaggtttgaaaatttttaaattttttggaagttctacattttctttttttaggttaatattggctagaaatagggtattaggttcttcttttaccatcattttatccctatcataataagcactttctagcttaaaattcccatcttttggagcgtcgattaaaacttctatgcgagaagcaggacttaagaaaagttcttctttataaatagctttttctataagtccaccatcagtaccaacaagtataaacttagctccttgtatgcgtaaatttaaatatcttgctgcagtagcattataaatgcgtatgcgttcgtttgtggcgagtttgattttaggtttaaattgtccattgatgagtacaaattctccttctctaccatttagccaatcatttaggttattgtttggaatttgagcgttttcatcaagacgcaaatcgctaatcatcaaatctttttcttttaaatgacttaaagcatctttttttgctttgatcacaaaagcccctgctaaacccataaaaacttgtttagaagcggtataatgaggatgcggatgataccagtaagttcctgcgctatcttgaggaatttcaaaacgatatattctttcttctcctgctaagataggatcatgtgggcttccatcttgatcaggtggcacaggaacgccatgccaatgtatagttgtagtttctttgagtttgtttttgactaaaatttcaagtttatctccttcaaaaacttctatttttggagcaggtactaggccattgtaagtataaaataaggtttttttacctttgataagctctatatgattttctttgatttctagggtagcacgaaaaatatttttttctttactttcatttttgagtaaaggcaaggcttttaaaatttctccttgggggaattgttttggatctaaaagctttaaattttttggagcaaagtttataaaagaagtatctaagtcatgatttatagaatgatttttatgcatggagtgcatatcgtgcataggatttgcataggctacacccatacttgctagagtaagtgcattaaattttaaaaaatttcttctattcattagtttttccttttgcttgattttttgtattatagtcattatttttttaactttagtaaatatttattttgaaaatttggtttaattttgttatgattttagcaatttaatcaaggaaaaataatgttttatgaaaaaattcaaactccagcttatattttagaagaagataaattaagaaaaaattgtgagcttttagcaagtgttggtgaaaaaagtggtgctaaagtgcttttagctttaaaaggttttgctttttcaggagcgatgaaaattgttggagaatacctaaaaggttgtacttgtagcggactttgggaagcaaaatttgctaaagaatacatggataaagaaattcatacttattcacctgcttttaaagaagatgaaataggtgaaatagccagtttatctcatcatatagtgtttaactctttagcccaatttcataaatttcaagctaaaacacaaaaaaattccttaggtcttcgttgtaatgttgaattttctctagccccaaaagaactttacaatccttgtggaagatactcaagacttggaattcgtgctaaagattttgaaaatgtggatttaaatgctatagaaggacttcattttcacgcactttgcgaggaaagtgctgatgctttagaagcagttttaaaggtctttgaagagaaatttggtaaatggatagggcaaatgaaatgggtgaattttggaggaggacatcacatcactaaaaaaggctatgatgttgaaaaacttattgctttgtgtaaaaatttcagtgataaatatggcgtgcaagtttatcttgaaccaggcgaagcggtgggttggcaaacaggaaatttggtggctagtgtagtagatatcatagaaaatgaaaaacaaattgccattttagatacttcaagcgaagcacatatgccagatactatcatcatgccttatacaagtgaagttttaaatgctagaattttagccacaagagaaaatgaaaaaatttcagacttaaaagagaacgaattttcctatttgcttactggaaatacttgtttagcgggtgatgtaatgggagaatacgcctttgataaaaagcttaaaatcggcgataaaattgtttttttagatcaaattcattacaccattgtgaaaaacacaacttttaatggtataagacttccaaatctcatgcttttaaatgcaaaaaatgaacttcaaatgataagagaattttcttataaggattattctttaagaaattagtattatttataatttgcataaaatgttaattttatttggaagagaatcaaagatataaattttatgcaaagtattttattttttcaaatataaaatcaactcaaatatctaattttcaatattttggtatgattttttaatattttaaatccttgtggaattttattgaaattcagtgatttttaaatcaaatagtattaagataaatcgatttaaaaatcggctttaaaatgaatattaggtatattttgcataatattcattcaagcaaaatttaaagctatttttgaaaattttgaatgcatgggggctttaatggatttggaaaaattaagattagctagaagtctttattatcaatgtctaggagagctttttgttttttcattttctgaagaaagattgtcaaaattacaagagtatttaaagacaatgcaagaatgtttatttgatgaaaatttaaaatcaaattttgatatcttgcttaagcatttagatgatgaaaattctatacaagcattttttaaagaatatgatttgctttttttaagtcttaaaaatagcattccaacgactttttcttacatggaagaaggttttgaaaattcaaatcctttactttgcgtgcgtcaaattttagtcaaaagtaaaataagacgcaatgaaaaattttttaaagaaagtgaagatagtgttggattttgtttattgttaatgagtgaatttttaaggcaaaatgaagatgatttagccaaagagctttttgaaaaagtgatcaataaaagcattgatgagtttttaggcgatgttttcatgaataaaaatgcgaatttatataaggaaattgcaagtattgcatcggcttttatggaatttgaaagactttgctttgaagtggaaaaacctgcaaaaataaattctaaaaaagtgcaaaacgatctatcgcgttcagaatttttaagaagagaagcaaataaacaaaggaggactcgtgaaaaatcgcagggaatttcttaaaaaatccgcttttgccttaggggctgctggagtgcttggtagcacgactttagctctagctaaagataaagaaagaaaagatttggttaaaggtaaaagtaagaaaaaagaagtgctttttcaaagaagtgctaattgggaaaattattatataaaggctgagtaatgtcaagtgtaggtgaaaatatcaagcttacgcgtcgttcttttcttaaaatggcagcactttcaagcctagcaacaccgttgcttgctagaagtgaaactttaagagaagcgagtgctgatgagcttaaagaagcttatgaaggtagtaaaaaagtaaaaacagtttgtacagcctgttctgtaggctgtgggattattgcagaagtgcaaaatggtgtttgggtgcgtcaagaaatcgctcaagatcatcctgtgagttcaggtggacattgttgcaagggatctgatatgatcgatatggtgcgttcacatgtgcgtttaaaatatcctatgaaaaaagaaaatggagaatggaaacgcataagttatgagcaagctttaagtgagatcggagaaaaactagctgcttatcgtaaagaaaatcctgaaagtgttatgtttttaggttctgcaaaacttaataatgaacaagcttattatataagaaaatttgcagcgttttttggaacgaacaatgtagatcatcaagctagaatttgacacagcgcaacagtcgccggtgtggcgaatacatttggttatggcgctatgacaaaccatcttggagacattcaaagaagtaaatgtatcattatcattggggcaaatccagcggtaaatcatcctgtgggttttagacatttcttaaaagcaaaagaaaaaggtgcaaagcttatcgttgtagatcctagatttacaaaaagtgcggcaaaagcggatatttacgcaagaattcgtccaggaactgacattgctttcatgtatggaatgttaaaaatcatctttgatgaaggcttagaagatacaaaatatcttgatgaaagagtttttggaattgataaaattcgtgaagaagcagcaaaatggacagccgaagaagtagaaaatgttacagggatctctaaagaacttttggtgcaaatcactcacgaagtagctaaaaacaaaccaactacgcttatttgggctatgggtttaactcaacacactgtaggaacttcaaatacacgtttagcacctattgtgcaaatggtacttggaaatataggtaaatttggtggtggagttaatatcttacgcggacacgataatgttcaaggtgcttcagatatggcttgtttgagcgaaaatttaccaggttattatcctttaaatgaagcgacttggagatactatgccaaaatttggggtgtggattatgagtggcttttaggaaattttgtaagtaaagattggatgcataaaactggactttcacttgctagatggtgggcagcggctttaaatggaaaagatggaaatgatgctatcgataacgcaggaacgcctttaaaagctttagtagttatgggaaatggtatcacttcgactgcacaacaagctaaggttaaagaaggtttggaagctttagagcttttagttttagccgatccttttgtaaatgaagcagggattatcgcagaaagaaaagatggaatttatcttttacctgcagcaacacagtttgaaacaagcggaagtgtaacagctacaaatcgtagcggacaatggagatttaaagttgtagatccactttatgaaagcatggaagatcaagaaattttatttgagcttgctaaaaaattaggcttttatgaagactttactaagactttacgcgatgaaaaaggtgagattgtttggcctgaaaatgcaacaagagaaattgcaaaagcagttagaagtataggacttaatggttggagtcctgaaaggcttaaaaagcatactttatactgggataaatttgatgaggtaactttagaaggaaaagacgaagttgctggcgagtattacgggcttccttggccttgttggagtgataagcacccaggttctcctgtactttataataccgacattgaagtagcaaaaggtggtatgggctttagaaataattttggactcgagtatgaaggagagagtttacttgctaaaaatgcacctttaaattcacctattgatacaggttatccacaaattactaaagataatatagaaaaagttttaggcattactttaagtgcccaagaaaaagaaaaaatgggatcaacttggtcttatgatgatagcaatatcatagcaactaaatgtatagaaaaaggcatagttccttatggaaatgctaaagctagagctgtagtttggacttttaaagataaaattccactccaccgtgagcctttacattctccaagaaacgatttggtgcaaaaatatccaagttttgaagatcaaaaagcactttaccgcgtggatactaaatttgtttctgtgcaacaagctaaggattattctaaagaattcccgcttaatcttgtt

SEQ ID NO: 3808 - DNA, 22133 bp, synthetic construct
  misc_feature 1..22133: note = Synthetic
  source 1..22133: mol_type = other DNA
aaggaactcctacttatccaaattctgggcgttggtggagaatgatagaagagtatcaaataagcaaattctacacttcgccaactgccataagaatgcttcatgctgatgcacctaatgagccaagaaaatatgatttaagtacgcttgaagtgcttggaacggttggagagcctatcaatcctagtgcttggaagtggttttatgatgaaatagggggaactaaaagtcctatagtcgatacttggtggcaaacagaaacaggtgggcatatgatcacgcctttaccaggcgctactcctttaaaaccaggttgtgccaccttgcctttgccagggatttttgcagaagttattgatgaagaaggcaataaaaaagatgaaggtgaagatgggttgctttgtataactaaaccttggccttcgatgattcgtggaatttggggcaatgatgaacgctatatagaaagttatttttctcaagctaaaaaagatggaaaagctgtatattttagtggcgatggtgctttttatgataaaaatggttatattaccatcacaggaagaacagatgatgtggttaatgttgcaggacatcgtataggaacggctgaaattgaaagcgctattgctaaacatccaagtgtagcagaatcagctgtagtgagtattttggatacgattaagggcgagtcattgtttgcttttgtggttttaagtcctgcatccagttgtgatcttggcggagctatagaaactttaaaagaacttaatgacattttaagagtagaaataggacctatagctaaaatagaaaaaattctttatactccaggtttgccaaaaactagaagtggtaaaataatgagaagaattttaagaactatagcaagaggcgaagaaatcaaacaggatatttcaacacttgaagattctaaagtagtagaaaccattgttaaattagctaaggcagagtttgaataacaaggcaaaaagaactttgccttgttgcatgaaaattcataaaaataagctataatgataaaaaaataaaaggaaatttttatgcttcaaacttgtattttccctgcggcaggttatgggacgagatttttacctgcaacaaaaactttacctaaagagatgttacctatcttaaccaagcctttgatccattatggagttgatgaagctttagaagcaggaatggaaaatatgggatttgtcacagggcgtggaaaaagagctttggaggattattttgatatttcttatgaacttgaacatcaaatttcaggtacaaaaaaagaatacttacttgatgaaattcgctctttgatcaatcgttgtacctttacttttacaagacaaaatcaaatgaaaggcttaggtgatgcggttttaaaaggtagacctttggttggcgatgaagcttttggcgtaattttggctgatgatttgtgtgttaatgaagaaggcttaaatgttatggctcaaatggtaaaaatttatgaaaaatatcgctgcaccatcatagctgtgatggaagtaccaaaagagcaagtttcaaactatggagtaatttctggaaattttgtagaagaaaatcttatcatggttaattctatgatagaaaaaccaagtcctgatgaagctccaagtaatcttgctatcataggaagatatattttaactcctgatatttttggaattttagaaaatactaaagcgggaaaaaatggtgaagtccaacttaccgacgcgcttttaactcaagcaaccaatggtatggttttagcttataaatttcaaggaaaacgctttgattgtggaagtgtagaaggctttgtagaagcgacaaattatttttacgagaaaagtaaatgttaaacaatacacttttttttaagcaaagtgaaattcacactataagttcttatgcaaatcgtattaatgatgaggtaaaaagtggagatatagggtattatcatcttattgacacaagtttgaatttaatcgatgagagcttgcaatttattcaagataaagagtatgtaaaaaatatcgttttagtgggaatgggaggttcaagttgtggtgtaaaagccttgcgtgatatgctttttaatgaaaaaagcaaccaaagagagctttttatactcgataacacaagctcgcattcttttaataagactttagaaaaaatcaagcttgaagaaagtttgtttttaatcatcagcaaaacaggtagtactatagaagttgtatcgctttttaaacttcttattgaacattttaaacttgatatgcaagaattaaaaaaatactttgtttttattaccgataaggattcaaaacttcatcaagaaggtgaaaatttaggtattaaatgcttttttatccctgcaaatgtaggaggtcgttttagcatactttcagccgtaggtatagttccactttgtttttgtggctataatgccaaagctcttttagaaggagctaaagcttgttttgaagatttttttactcacaaaaaagatgaaattttacaaaaagcctatcattattgtacacacaaaaatgccaatatcaatgtacttttttcatatagcgatgcttttaaaggctttaatgaatggtatatccagcttattgctgaaagtttaggtaaaaagcaaggctataaacgcataggtttaactcctattgcactcattggcgcaagagatcaacatagttttttacaactcatcatggatggacctaaaaataaaactgtaacttttttaaaaatcaaagacgctcaaaaagcacctattatccctgatattcattttaaatttttagattctttaagtaataaagtcaatcttcacgaacttttaaacgctcaatgtgatgcaactatgcacgctttaatcgctgaaaatttgagtgttgatgtgatagaacttgaaaaacttgacgcttggcatgcgggatatttgatgtattattatgaactttttacttcaacttgcggtgttatgctagggattaacacttatgatcaacctggtgtggaagttggaaagttgatcttaaaaaatatattaaattcttaatcaaaattcattaaaaaagagtataatgattttaagttaaaattataataaaaatttttaattaataataataattattatttaagaattttatgttataattttaaaaattaaaaaaaggagtcaatcatgtcagttacaaaacaattattacaaatgcaagcagatgctcatcatttatgggttaaatttcataattatcactggaatgtaaaaggtttgcaatttttttctatacacgagtacacagaaaaagcttatgaagaaatggcagaactttttgatagttgtgctgaaagagttttacaacttggcgaaaaagctatcacttgccaaaaagttttaatggaaaatgcaaaaagtccaaaagttgcaaaagattgctttactccgcttgaagtcatagaactgatcaaacaagattatgaatatcttttagcagaatttaaaaaactcaatgaagcagcagaaaaagaaagtgatactacaacagctgcttttgcacaagaaaatatcgcaaaatatgaaaaaagtctttggatgataggcgctactttacaaggtgcttgcaaaatgtaatttaaggggctttatgccccaattatacaaactaggttataatatccttttttaaaggataaaattgaaagtacttaattttttttatgaaaaccaccctaaatttgaagtaagttatgaaagaaaaaatcaaatttcaaaaccaaatattatcataaaaggcccacgattttgtggtaaaaaaacacttatttttaattttttatctcaatttaaagcaagtgaaattttgtttttagatttatatgatacacgctttgaaaaacaaagtttagaaagacttgctgattttctgaatgaaaatttacaaattaaaattctttgcctttataatttggattttatccctaatttagaaaaaattaacattcccatcatcttaagtacaaatataaaagatttaaatgtaaatgggtttgaagagcttgaacttgattattttgattttgaagaatttattagtgtaagtaagaaaaatttacctataaataatttagtaggtctttttttgcaaagtggacgcagtaaatttggagaaaaaaacatacttctaagacaaagcttcactcttttagaattagaaattttaaagtatttagctttaaatttgggtcagcaaatcagtatttctaagatatttatagaactcaaaaaaagattaaaaacttcaaaagatagtgtttatcaagctataaaaaaattagaaaatacttatgtgatttataccttaaaacatgatgaaaaaaaacttcaaaagatttattttaaagattttggcctaagaaataatctttgtatttcaaaggatttttcacatttatttgaaaatttagttttaagcgagttgtttaaatttaaagaagaatttttttataacaaatactttaacttttatagccaaatatctaaaattgcttatatttcaagtccaactttagatattgatttgatcaagctacgtgctaagaaaattttaccaaaggctttagaacttggaatttttcatgtgatttttatcactctttcaagcgaggataatttttttgaacaaggggttaaatttgaagtcatatcttttgataaattttcacttggattttaggtgttgtttgagtttgtatcgtatttttcaaggttgtatcgtttgatgatttttgtaataagattgatataatatcccttgcgttcagaataagaatctaaagttttaatagcctctagccctgttatctctttgccttcgctttcaaatttagctcttgcatcgcgaaacttttcataagcaaaatgacgatttaaatttaaaacataagagtcaacactatcttgcagactatcaaaaatcttaattttatgttttttatctggatgtcttaaatcaggaattaaacctttctcaccccaagtccattctccaaaaagattgtttgcttctcttgcgaagcgactggtacctgtagcactttcaactaaagcttgggctatacccatggattttggaattttttgaatacgttttttatattctgcaaaatcataaagattttcaatgcgatatttgttttttatcgtgataagtttttcaagatttatttggtttgaagtcctaaagcctgttttgtaagcatctttaaaaaaggcttcgataaaagctctttcttgttcaatttttttaaagctttgatcaaacatttcattcatttttataaaaaaaatttgtcttttttgatctatatcaagtttgtaatattcctctccaaagccattttttagatcatcagcaaaaagtgggattagaaaaagactaagaaaaattataattggcttcaaaacaatactttacctttccttcaaaaaacaattcttcatttttatatgtaaacccaacctcttcaccacttttaggagttattttaactttattttgtacttttttatttaaaaatgccagataaaaacaagcccccattcctgtgccacaagctaaggtttcatcttcaactccgcgttcataggtacgaacttttaaatgattttcatctaaaatttttacaaaattaacattggcattatatttttgtctcattttttgacaaagtattgtatcaaattcatctaaattttgacaaaaatgcactagatgtggaactccagtgtcgcaaagttgccaagtttttcctaattcttcaaaagtattttgcacgctttttattttgcctaaagatacttcaactttatcttgatttacctttgcttttattatttctgcaccggttaaaaaactcatgttaggatttattttgttaatatgatgtgcaaaatgtgccgcagcccttgagccattgccacacatagcagcccttgagccatcgttattataaaattcccattcaaagtcgtatttttcatgaggcaatatcacgataaagccatccccacctatgccctcataacgattgcaaagttctttagctaaagcacttctatcttcttttctatcagcatttgttatgacaaaatcattcccacttgcacaatatttataaaatttcacatttttcctttagaaatttcttgtattactttaacacattcttgcctaaaatcggcataagagttagtatttttaatgataaaatctgcttttttaagtttttcttcaatatctatttgagaatcaagtcttgtttttgcagcttctaagctaagcttatctctttgcatgattcttttaaggcttaattctttaggtgtgtaaattactatgactttgcctaaattttcataagcaccgctttcaaaaaaaagaggaatttctacaaaaaaagctttattttctttatctagaatttgcatttgttctaaaattttagctcgaattttaggatgagtgaaattttctaagatttttttagcttctttattgttaaaaacaatttctccaaggatttttctatcgattttcttttcttttgtgagtaaattttttaagttaaagggagaaaaaatcttttcaagttctaaagcattttcatctaaaattttatgagcaattttatctgcgctaatgcttttaaagtctaaagaattcgctatttctataaaagtgcttttaccacaagcaattgaagcggttacaaaaaaagcatttttcatcttatgccttattaaaacttttttcgttaaaatacctttttagttcttaaaggaaaataaatgaaaatttcatatgaagatgcaggcgtaagtatagataatggaaatacctttgtagaggctataaaacctttggttaaagaaacttttaatgataatgttgtaggtggaattggttcttttgctggtgcttttagaatgccaagtggttttaaaaagcctgtgattttaggtgcaacagatggggttggtaccaagcttcgcttggcaattgatgctaaaaaatatgatactatagggcaagatttagtagcaatgtgcgtgaatgatttgatttgtaattttgctacgcctttgtttttcctagattattatgctacagccaagctcgaagtagaagtagcaaaggctgttgtatcaggcattgccaagggatgtaagatggcaaattgtgcattaattggcggagaaactgctgaaatgcctggaatgtatgcaaaagatgattttgatcttgcgggttttgcagtgggtatggctgaagaagatgagattgatagaagtaaatttgttaaaaatggtgatattttattggcactttctagttcaggacttcattcaaatggttattctttagctagaaaagtactttttgaaagtttaaaattaaaatttgatgacaagatagagggtaaaaatttaattgatattttgttagaacctacaaggatttatgtgcgtgattttcttacactaaagccttatatcagtgctctagcacatattacagggggtggtttagtagaaaatttaccacgcgttttacctcgtggtatgggtgcaactatacgcaaacatcatcttaaaactcctgaaattttttatactataggacaggctgtagaagaaagcgaaatgtatagaagctttaacatgggagtgggtttagtaatggttgtagatccttctaatgtaagtaagattttagaaaattcagatgcctttattatcggcgaaatttgcattaatgaaggtattgttttagaatgaaaataaagcgttaatacgctttatttttgtattttaagttctatttttgtagtgttttgttcttttagcaaaggattggtttgtgctagataaaaggctacaagtacatttacaagcatagcgataagtaaaagaggagtggttcgttttataatatccattggagctacttttgcaaatccagctaaagctatgattccgcctgctattggtgaagctgcacgacctaaacaagatgcaatttctataggtaaaactagagtaataggtgcaacgcctaattttgtagctatatcaggagctagttttccaaaagtattaaaagcggcaattccacttcccataatcactgtggcaaaataaactaaaaagcttaaaatagctatactcaaaagaattccaaaccatgcaaaatttcctgttccaagatttgaaaccgcgttagcaaggatattaactccaccaagtgctttaatgccttcagcaaatactccagcggcgatgattatgcttacgactgagataaaaatttcagccatagcttttaaaatcaccatcatatcttcgcctaattttctagcatttctgtgtcttgcaaattcaacaagaaaaactaaagaaatgcttacaaaatttgctgttacaacatcgagcttgatagtaaaaaaaatacgctataaataaaaatacaacaggcaaccaaggaaagagtatgtaaaaaagtagggcatttaggatcaatgatttgcggaatttcaacttcatcatttaaaacacctttttctttatctcttttatcaatccaagtagaataaaaaggaatcaagatggcaattaactacaacataagtaatcacactataaatttgataatttaaagaaagtcctacgacattatcactttgtcctaccatatccgccatattgattgaatttccatcttttggaccataatcaagcgcaattaaagaaagcacacatacagctgtaataggacggattttaagtgagattaaaacaggataaatacatgctaacaaaagcaatccagcatagctagaaatgacgatttttaaagccattccaacaacaaaagttccacttaaaattaagtatttattttttgatttttcctgagggtttatttgctaaaaaagcaagttttgccgaagcattgatatgtttcatgtaagcagtaaagcctgccacactcatgataataaaccctactccagaaagctgacttttaaaaatcgctgtgataaaagataactatcaagtaaaacatttaaaaagcttgtatgctctctgcttggggcttttggtataggtgttcctgtgatataaaaagcaaaaataagcaagataatatttgaaagaaaaatacaaaaatgggatcgtattttttttgagtatatcataaaaattagcatagggtctcttgaatttacaataaattggattttatctaaatttttaaataaaaaatattttttatttaaaaattacttgttttttgtattataaaattaacatatatagtttggttactgaaaagtttatgtttgtttaaaaaaatgatttttgtattataattatacacaaatcataaatattaaaaaggatctagtgtggcaagaattttggcatttgatataggaataagctctattggctgggcatttagtgaaaatgatgagttaaaagattgtggagttaggatttttacaaaggttgaaaatcccaaaacaggagaatccttagccttgccaagacgccttgcaagaagtgctagaaaacgccttgctagacgcaaagcaaggctaaatcacttaaaacatttaatcgcaaatgaatttaagttaaattacgaagattatcaaagctttgatgaaagtttagccaaggcttataaaggatctttaattagcccttatgagttaagatttagagctttaaacgagcttttaagtaagcaagattttgcaagagtgattttacatattgcaaaaaggcgtggctatgatgatattaaaaatagtgatgataaagaaaaaggtgcgattttaaaagctatcaagcaaaatgaagaaaaactagcaaattatcaaagtgtgggcgagtatctttataaagagtattttcaaaaattcaaagaaaattccaaagaaaattccaaatgttagaaataaaaaagaaagttatgaacgctgcatagcgcaaagttttttaaaagatgaattaaagcttatttttaaaaaacaaagagaatttggcttttctttttcaaaaaaatttgaagaagaggtgcttagtgtagcattttataaaagggctttaaaagatttttctcatttggtgggaaattgtagtttttttaccgatgaaaaaagagcgccaaaaaattcgcccttagcttttatgtttgtagcacttacaagaattatcaatcttttaaacaatcttaaaaatactgaaggaattttatatacaaaagatgatttaaacgcccttttaaatgaagttttaaaaaacggcactctaacttataaacaaacaaaaaagcttttgggcttaagcgatgattatgaatttaaaggagaaaaaggaacttattttattgagtttaaaaaatacaaagaatttataaaagccctaggtgagcataatttaagccaagatgatttaaatgaaatagcaaaagatattacccttataaaagatgagattaaacttaaaaaggctttagcaaaatatgatttaaatcaaaatcaaattgatagtttaagcaaattggaatttaaagaccatttaaatataagttttaaagccttaaaacttatcactcctttaatgcttgaaggtaaaaaatacgatgaagcttgcaatgagcttaatttaaaagtagcaatcaatgaagataaaaaagactttttacccgcatttaatgaaacttattacaaagatgaagtaactaatcctgtggttttaagggcgattaaagaatatagaaaggtcttaaatgccttacttaaaaaatacggtaaagtgcataaaataaacattgaattagcaagagaagtaggtaaaaatcacagccaaagagctaaaatagaaaaagagcaaaacgaaaactacaaggccaaaaaagacgccgaacttgaatgtgaaaaactaggcttaaaaataaatagcaaaaatattttaaaattaagattatttaaagaacaaaaagaattttgtgcttatagtggagaaaagattaaaattagtgatttgcaagatgaaaaaatgcttgaaattgatcacatttacccttattctagaagttttgatgattcttatatgaataaagttttagtttttaccaagcaaaatcaagaaaaacttaataaaaccccctttgaagcctttggcaatgatagtgcaaaatggcagaaaattgaagttttagcaaaaaatttacctactaaaaagcaaaaaagaattttagataaaaattacaaagacaaagagcaaaaagactttaaagatagaaatctaaacgatactcgctacatcgcaaggcttgttttaaactacactaaagattatttagattttttacctttaagcgatgatgaaaatacaaagttaaacgacacacaaaaaggctcaaaagtgcatgtagaagcaaaaagcggtatgcttacatcggctttaagacacacttggggctttagcactaaggatagaaataaccatcttcatcacgccatcgatgcagtaattattgcttatgcaaacaactctatcgtaaaggctttttcagattttaaaaaagagcaagaaagcaacagtgcagaactttatgcaaaaaaaattagtgaattagattataaaaacaaaaggaagttttttgagccttttagtggttttaggcaaaaggttttagataaaattgatgaaatttttgtctcaaaacctgagagaaaaaagccaagtggagctttacatgaagaaacatttagaaaagaagaagaattctatcaatcatacggcggaaaagaaggagttttaaaagccctagagcttggtaaaatccgcaaagtaaatggtaaaatagttaaaaatggcgatatgtttagagtggatatttttaaacacaaaaagacaaataaattttatgctgtgccaatttatactatggattttgctttaaaagtattaccaaataaagctgtagcacgaagtaaaaaaaggtgagataaaagactggattttaatggatgaaaattatgagttttgcttttctttatacaaagatagtttgattttaattcaaactaaagatatgcaagagccagaatttgtttattataatgcttttacaagctctactgttagtttgattgtttcaaaacacgataataaatttgaaacgctaagcaaaaatcaaaaaatattgtttaaaaatgcaaatgaaaaagaagtaatcgcaaaaagcataggaattcaaaatctaaaagtatttgaaaaatacatagtttcagcacttggggaagttacaaaggctgagtttagacaaagagaagattttaaaaaatgagttacgatgaagcttttaaaacactgcttattagctctaatgccaagctaaatttagagctaaatcatcttgtgattaagcaagatgaaaatatagccaaattgtttttaaaagatataaatatcatcgttttagaaagcttacaaataagcattagttccgcactttttaatgcctttgcaaagtataaaattatcttattaacctgcgatgaaactcatagtataaatggcgtttttactccttttttagggcattttcaaagtgcaaaaatcgcaaaagagcaaatgaatgtaagtgctcaaaaaaaggctattttatggcaaaaaatcattaaaaataaaatcctaaatcaagcctttatcttaaaaaaacacaataaaatagagcaaagcaatgagcttataaatttggctaaaaaagtaagcttaaatgatagtaaaaatattgaagctgttgcggcggcgctttattttaaaactttgtttggtacttctttttcaagagatgagctttgctttgaaaattctgctttaaattatggctatgcaatcattagggcttgtattattagagcagtttgcataagtgggcttttgccttggcttggcataaagcacgataatatttataattcttttgcgctttgtgatgatttgatagaagtgtttagggctagtgttgatgattgtgttttaaagcttaagggtgaaagtgagtttttaagcaaagatgacaaaagagcgttgattggcaatttacaaagcaaaatcaattttgatgggcaaaattatcctttaaacagagcgataaatcattatgtggcaaattttaaaaatgctttattgtatgaagatgaactaaagatagtgaaatttgatgattgaagataaatttatgcgtgtgcttttgatgtttgatgtacctactaaaagtaaaaaagagcaaaaactagcaagtaaatttagaaataatcttataaaattaggttattttatgctgcaatttagtgtttatatgcgtatttgcaagggtttaagttctgcaaaaagttctattgaaaatgtaaaaaagattttgccaccttatggaaatgtaagggctttaatcatcactgaaaagcaatttgataaaatggagcttttgcttggtggcatagtttttaacgaaaaagttaataacgaaaccaatttaacgctttttgatatagatagtcatggagaatttaaatataaaaattcaaataatgaagaaattcaaataaacaaaaaacaagaaaaatatcatcagcaaaatttatttgaattttaaaagcggttttaggggattgtaaccccgcagagtcccgcaaactctttattttagtccctttttaaatttcttatgagattatagcataatttttgctatttttcatgaaaaaaccccgaaattttcattatctggtaaatatctattttaccataaagaaatttaaaaagggactaaaacatattgtgcttgaatttgatttggtatttcattttaccataaagaaatttaaaaagggactaaaacccttttgcattccaattaacaacaccattaattttaccataaagaaatttaaaaagggactaaaataaaccctagtggattgaaactccgctagggctaattactccactaaaaggaggttgcgaatttgaaacttattgaaatttagggttgattaaaatcgaaataaaattatttaaataattttaaggcataaagataatatccactaaactttcattttctaaaatttcacattcttttggcaccaccataagggcagctttattgttaagattgtttataatcgcactagagccttcttttttgccttcaagattggctaaaatgcgtccattttcaaactttatgttacaagcgacaaattccaaataaggtgtttttttcttgtaacttccttgtaaaaaggctttgcaaatatagtctttaggctgaagtaaccaagagtttaaaatctctcttgcgtaaagattaaacattaccatagccgagtaaggaaaacctggtaaggcgatgatgaatttttcattagccttagctattttgatatgtctacctggttttatgtcggctttatcgatgatgatttcgtattctttgatggctttttttaaaaagtcaaaatctcccatagaaaccccgcccgttgtaaccaaaatatcacaactttgcaaagcactttcaagggtggaaaaagtggctttctcatcatcttttaaaagaggaaaaacccttgtatcgcaatttaaatttttagctaaattagctatggcgatatgatttgaagagcggatttgagcaggattttccaaggcttctcctagatctttgatctcacttccactacttaaaacccctacaataggctttataaacacactaatgtgaaaaaatccaagttcagctaaaagagctatctcgctataatttaactttgtgccttttttgagtaaaatttcatcttttttatagttttctcctaccgcacgcacggcaaaagcttggggaacttttttttctataaaaagagtatcattttctacgcgtacattttcaacaggggctaaagtatcgcttccttcgctcatgagtgagcctgtaaaggtttttacacaagtaccattttgcacgctaaattgtggcatagtacccgcaggtgtgatacctaaaatttttaaaggcttatcttgatcttcaaatttgatcgcataaccatccatagccgaagttggaaattcgggctgatttttaggggcttttatgtcttgagctaaaatgcgtcctaaacactctgtaagagctattttttcaatcttttcataagttttaatatgagaatgtaaaatttttaaactttcttcataagacattaacattttttatccttttaaaagtcctgcaccgcaaagtttggttgatctttctttggcataaattctttctttgtttatcacatcatacttccaaatgggcgcacttgctttaaaatcttcaacaaattcattaagaagtttaagtcctaattttctttgtttgcttaaaattcctgcaaaatacgagctttcatgtatcgctacatcgcctatagagtgagcaaaaagcaagctaataccatcaaaatctactcttttttgccactcatcaaaccatttttttaaaagcggttcataaatatcaaaactaagtgcctcaatacctccttcttcacgcacaataccacaaaaagtcagtaaagcaccgcagtttttatccttggaaaattcataccattggctataaattttaggaatatctaaagagccttgataaagtgtaaaatgtttcatttagcctccacaaactggcggtaaaagtgctattttatcaccatcttttaacttggtgttttcatcaaaaatgatttcatcatttaaagatacagcacaaagttctagccattcttttaaactctcatctttttgcaaaatttcttttaattcttttaaattttttacttcaagttctaaattttctttatttatggggcctaaaaattccacttttaccattttattcctttacttctaaatttcccatcattcctaaatcttcatgttctaaaatatggcaatgatacattctaagtcctttaaaatcttgtttcattctaagtcttaattcttcattaggacgcacatttatagtatctctgaaggctctaaattcggctttttgaactttgccattgagttttgatgagatgagttcaaattgcgtgccgtgtatgtggaaaggatgatccatgtgagatttatttatcactatccagtcttcaactactccaagcttggagcttaaatcaatgcgttttaaatcatagcttttgccattgattaaaaacatagacgcaagagcgatttttaattcgctttcactttttcccatcataccatgcatttgcatatgatcttcactcatgattatttctttaaattccttaggttcttctgaaggtttgaaaatttttaaattttttggaagttctacattttctttttttagactaatattagctaaaaatagggtattaggttcttcttttaccatcattttatccctatcataataagcactttctagcttaaaattcccatcttttggagcgtcgattaaaacttctgcacgagaagcaggacttaagaaaagttcttctttataaatagttttttctataagtccaccatcagtaccaacaagtataaacttagctccttgtatgcgtaaatttaaatatcttgccgcagtagcattataaatgcgtatgcgttcgtttgtggcgagtttgatttgaggtttaaattgtccattaatgagtacaaattctccttctctaccatttagccaatcatttaggttgttgttcggaatttgagcgttttcatcaagacgcaaatcgctaatcatcaaatctctttcttttaaatgacttaaagcatctttttttgctttgatcacaaaagcccctgctaaacccataaaaacttgtttagaagcggtataatgagggtgtggatgataccagtaagttcctgcgctatcttgaggaattttaaaacgatatattctttcttctcctgctaaaataggatcatgtgggcttccatcttgatcaggcggcacaggaacgccatgccaatgtatagttgtagcttctttgagtttgtttttgactaaaatttcaagtttatctccttcaaaaacttctatttttggagcaggcacgaggccattgtaagtataaaataaggtttttttacctttgataagctctatatgattttctttgatttctagggtagcacgaaaaatatttttttctttactttcatttttgagtaaaggcaaggcttttaaaatttctccttgggggaattgttttggatctaaaagttttaaattttttggagcaaagttgataaaagaagtatctaagtcatgatttatagaatgatttttatgcatggagtgcatatcgtgcataggatttgcataggctacacccatacttgctagagtgagtgcattaaattttaaaaaatttcttctattcattagtttttccttttgcttgattttttgtattatagtcattatttttttaactttagtaaatatttattttgaaaatttggtttaattttgttatgattttagcaatttaatcaaggaaaaataatgttttatgaaaaaattcaaactccagcttatattttagaagaagataaattaagaaaaaattgtgagcttttagcaagtgttggtgaaaaaagtggtgctaaagtgcttttagctttaaaaggttttgctttttcaggagcgatgaaaattgttggagaatacctaaaaggttgtacttgtagcggactttgggaagcaaaatttgctaaagaatacatggataaagaaattcatacttattcacctgcttttaaagaagatgaaataggtgaaatagccagtttatctcatcatatagtgtttaactctttagcccaatttcataaatttcaagctaaaacacaaaaaaattccttaggtcttcgttgtaatgttgaattttctctagccccaaaagaactttacaatccttgtggaagatactcaagacttggaattcgtgctaaagattttgaaaatgtggatttaaatgctatagaaggacttcattttcacgcactttgtgaagaaagtgctgatgctttagaagcagttttaaaggcttttgaagagaaatttggcaaatggatagggcaaatgaaatgggtgaattttggaggaggacatcacatcactaaaaaaggctatgatgttgaaaaacttattgctttgtgtaaaaatttcagtgataaatatggcgtgcaagtttatcttgaaccaggcgaagcggtgggttggcaaacaggaaatttggtggctagtgtagtagatatcatagaaaatgaaaaacaaattgctattttagatacttcaagcgaagcacatatgccagatactatcatcatgccttatacaagtgaagttttaaatgctagaattttggccacaagagaaaatgaaaaaatttcagacttaaaagaaagcgaattttcctatttgcttactggaaatacttgtttagcaggtgatgtaatgggagaatacgcctttgataaaaagcttaaaatcggcgataaaattgtttttttagatcaaattcattacaccattgtgaaaaacacaacttttaatggtataagacttccaaatctcatgcttttagaccgtaaaaatgaacttcaaatgataagagaattttcttataaggattattctttaagaaattagtattatttataatttgcataaaatgttaattttactcggaagagaatcaaagatgtaaattttatgcaaagtattttattttttcaaatataaaatcaactcaaatatctaattttcaatactttggtatgattttttaatattttaaatccttgtggaattttattgaaattcagtgatttttaaatcaaatagtattaagataaatcgatttaaaaatcggctttaaaatgaatattaggtatattttgcataatattcattcaagcaaaatttaaagctatttttgaaaattttgaatgcatgggagctttaatggatttggaaaaattaagattagctagaagtctttattatcaatatctaggagagctttttgttttttcattttctgaagaaagattgtcaaaattacaagagtatttaaagacaatgcaagaatgtttatttgatgaaaatttaaaatcaaattttgatatcttgcttaagcatttagatgatgaaaattctatacaagcattttttaaagaatatgatttgctttttttaagtcttaaaaatagcattccaacgactttttcttacatagaagaaggttttgaaaattcaaatcctttactttgcgtgcgtcaaattttagtcaaaagtaaaataagacgcaatgaaaaattttttaaagaaagtgaagatagtgttggattttgtttattgttgatgagtgaatttttaaggcaaaatgaagatgatttagccaaagagctttttgaaaaagtgatcaataaaagcattgatgagtttttaggcgatgttttcataaataaaaatgcgaatttatataaggaaattgcaagtattgcatcggcttttatggaatttgaaagactttgctttgaagtggaaaaacctgcaaaaataaattctaaaaaagtgcaaaacgatctatcgcgttcagaatttttaagaagagaagcaaataaacaaaggaggactcgtgaaaaatcgcagggaatttcttaaaaaatccgcttttgccttaggggctgctggagtgcttggtagcacgactttagctctagctaaagatgaagaaagaaaagatttggttaaaggtaaaagtaagaaaaaagaagtgctttttcaaagaagtgctaattgggaaaaatattatataaaggctgagtaatgtcaagtgtaggtgaaaatatcaagcttacgcgtcgttcttttcttaaaatggcagcactttcaagcctagcaacaccgttgcttgctagaagtgaaactttaagagaagcgagtgctgatgagcttaaagaagcgtatgaaggtagtaaaaaagtaaaaacagtttgtacagcctgttctgtaggctgtgggattattgcagaagtgcaaaatggtgtttgggtgcgtcaagaaatcgctcaagatcatcctgtgagttcaggtggacattgctgcaagggatctgatatgatcgatatggtgcgttcacatgtgcgtttaaaatatcctatgaaaaaagaaaatggagaatggaaacgcataagttatgagcaagctttaagtgagatcggagaaaaactagctgcttatcgtaaagaaaatcctgaaagtgttatgtttttaggttctgcaaaacttaataatgaacaagcttattatataagaaaatttgcagcattttttggaacgaacaatgtagatcatcaagctagaatttgacacagcgcaacagtcgccggtgtggcgaatacatttggttatggcgctatgacaaaccatcttggagacatccaaagaagtaaatgtatcattatcattggagcaaatccagcggtaaatcaccctgtgggttttagacatttcttaaaagcaaaagaaaaaggtgcaaagcttatcgttgtagatcctagatttacaaaaagtgcagcaaaagcggatatttatgcaagaattcgtccaggaactgacattgctttcatgtatggaatgttaaaaatcatttttgatgaaggcttggaagatacaaaatatcttgatgaaagagtttttggaattgataaaattcgtgaagaagcagcaaaatggacagctgaagaagtggaaaatgttacagggatctctaaagaacttttggtgcaaatcactcacgaagtagctaaaaacaaaccaactacgcttatttgggctatgggtttaactcaacatactgtaggaacttcaaatacacgtttagcacctattgtgcaaatggtacttggaaatataggtaaatttggtggtggagttaatatcttacgcggacacgataatgttcaaggtgcttcagatatggcttgtttgagcgaaaatttaccaggttattatcctttaaatgaagcgacttggagatactatgccaaaatttggggtgtggattatgagtggcttttaggaaattttgtaagcaaagattggatgcataaaactgggctttcacttgctagatggtgggcagcggctttaaatggaaaagatggaaatgatgctatcgataatgcaggaacgcctttaaaagctttagtagttatgggaaatggtattacttcgactgcacaacaagtaaaagttaaagaaggtttggaagctttagagcttttagttttagccgatccttttgtaaatgaagcagggattattgcagaaagaaaagatggaatttatcttttacctgcagcaacacagtttgaaacaagcggaagtgtaacagcaacaaatcgtagcggacaatggagatttaaagttgtagatccactttatgaaagcatggaagatcaagaaattttatttgagcttgctaaaaaattaggtttttatgaagactttaccaagactttacgcgatgaaaaaggtgagattgtttggcctgaaaatgcaacaagagaaattgcaaaagcagttagaagtatagggcttaatggttggagtcctgaaaggcttaaaaagcatactttatactgggataaatttgatgaggtaactttagaaggaaaagacgaagttgctggcgagtattacgggcttccttggccttgttggagtgataagcacccaggttctcctgtgctttataataccgacattgaagtagcaaaaggtggtatgggctttagaaacaattttggacttgaatatgaaggagagagtttacttgctaaaaatgcacctttaaattcacctattgatacaggttat

SEQ ID NO: 3809 - DNA, 22109 bp, synthetic construct
  misc_feature 1..22109: note = Synthetic
  source 1..22109: mol_type = other DNA
atccatggctgctgcattaagtgcaaaaccaccaaagccacagattcctaaaatccctatcttattagaatccaccttcgtgtgatttgccaaaaaatccaccgctgcactgaagtcatcggtatttatctcgggtgaggcgatattctttggtagatttgggtttgcctctgcactctcgcttgtataagaaggatcaaatgctagagtaataaagcccgcttctgccaaagtttgtgcatagaatcctgaagcttgttctttgactgctccaaaaggtccgcttagagcgatagcagggagctttgcgttgtttggtatatcttttggtatatacaaatcccctaccaaagtaatgccatagcgatttttaaagctcaccttttgcacctctaccttattgctttttgcaaaaactttgtcccatttgccttgtgtgtttgcttgtgccatactcacacctcctaataaaaagataaatgctccaataagaagcgatttcaaaacattaagtttcattataaaaatctccttaaataatgtagttttagattctatggcaaaagattttcatttttgagattacagaatctaaaaacatcaaagaaattataaaagatgagagctactctaagtcaagagttccatagcaaattttttctataatttcatcgataatttaaaaaggcttgagtattcgtaaaaagcaagaaaaagattctgtatttttggtcatcacaaatataaaaaagcattttaaagcttagtgcgagaaatcataaaggatttgcaccttattaaatcaatatagtaaaaggctttttgagatttgttttggagaagatttgtataaagagagtaaaatatagggaatgtatctgcaaaacctttcgtatcgctttagctttcaatacttcaaaaagagtgggagttaatacccccaactaaactgcgttttgtttttatctaatgccctaatagattccatatccgccgcactcaaagagaaatcaaagacattgatattttcttgcatatgcttgagctttgaggctttggggatagcgatgataccttgctgcactaagaatcttagggcaatttgtgccacgcttttgttgtatgcactagcgatttgtgtcaaagtgggattactaaaaaatccgcttttaccagcgataaaggggctccaagattctaaaatcgtcccataaggcttcatcgcctccaataacgctctttgctgatagtagatatgtgtctcgcattggttgatagcaggcataatctcacaagttttgataaactcaagatagactttttgggtaaagctagagattccaagtgctttgattataccctccttataggctagctccattgctttatacatttcttttgcctgtgcgtagggtgcgtggattaaaagcaaatcgatatatcctatatctagggctttgaggctagattctatactcttttttgcactttcaaaatccatatcactagagagttttgtcgtgataaaaaactcctctcttttgatgcctcttgagtgtatcgcttcccttatcgcagcccccacttctttttggttgccatacatttgtgcgctatcaaagaggcgataaccacaatccactgccgccaaaaatgtatcgatactcttaatatcatatgtcccaaagcctagcaggggcatttttagtccattatttaaagttacatattgcatatttgctccttgtgtgtttgtgaaaaaatctttagaatctgctgccaatatctgtgtgccaaatgtgccaaaggcaagagtagcacctaaaaatgtgcttgaatatcccaaaaattctcttcgctttatacatattcctaaaataaattatgcgtattataaatgatgagacctactctaagtcaatgggtttgtgaaaagatattgcaattttgaagaatttgtgcttatatgggtatttttgtgggtttttgtagttttgcattttgcaaggcagatttaatctattcaaaaatattttcgattcttaagagaatttaaaaggaaaagaaagcaaagtttgtaagcttagagtagagtttatgaaagattataaggggcgtgagagagggaagttatttagaatgctttttgtaaataaaaggtgcaattagagaaataattaatttttataatttagttttatttgaggtgattaaaacctaaaattgacttgatttgatagtaagagtatttaagatttttggaaatgaaatgtattaatgccaaaatcatctcttatataattttaaatttcaagtggattaatttgtaaaaatatggtgaatattttatgtaattccatctttgacttgcacaaaaacacagctttcaagctcttctttggtaatgttgcccttatttttataaaatcgcgtgatgatttggctattatttttttgtagcggagcgacaagaatcccgccttcttgaagctgattgaaaagttcttttggaacttctttgatagaggctgatagtaagattctatcatagggggcataagtgctccagccgttttgtccatcatcaagtttggtgttgatattattaagattgcaagattttatgcgaatccttgcttcattgaggagtttttcgattctttctatgctaaaaactctacgaatgaggcaactaagaatcgcagcttgatacccactcccacaaccaatctccaaaacgctatcagctccattgcattgaagatattctgtcatttttgccacagttagtggtgagctaatccattgactagcacccataggaagtgcatcaagtgaatatgcaagatgcacaaaaccttcagggacaaaaagttctcgattaatctttaaaagagcatcttgaacatctttgctaatagggaatttgtgcatgatttcacgcaccatttgggcagttttgattgattgcatcaaagtccaatatcaatgaatttacgcacttttgctacatcattgaaatttgctttaagatttataatttctttagaatcatcttgtgtaacatatccaaatggagtgatgattgcactccctccacccattgaatcatttttgctattactagccataacaaaactttgagtggtaatcgctaaagctttggtgagtgtttggaagtgatcttttctttcttttgcccattgtgcagggacaaaaattaaatcacaaccttttagtttttgccaaagttcaatgaatctcaattcaaagcaattaatagcaccacattgaatgccatcgattctaaaaggtgagatttcctctacatttccagcttgaaaatgtaaatgctcattgcctagtggaaaaagcttgtgcttgctttgtttgtggagaagttctccattgtgaaaaactttgagattattataaaaaccatctttgtatttttctatcatagtaatgatgatagttttttctccagagagttttaagagagtttcagtcgcagttttggcaaactcgcctgcttcttccatgcgttgataacagaagtttgtcaaagaaacttcaggggctaaaataatagaatcgctctcacactccaaaataagatttttgagatatgtaagattgtcttcaaagttttgttttgttttgaattgtaaggtataaagttgtttagaaatcatcaaaattaatacttcctttcgcgtaatttgtaacattgccttcaaagaaatttgttttttgttcattaaaggagctaaaagaatctacccatttaatagggtgctttgcattgtataaaacaggcagcccgacgcgtcttagtcggtcatctgcaagatatttgatatattcttgaataatttctgctgtaagccctagaatctgcccttgtgtaatgtattccccccaagcaatctcaacctttacagcctctctaaacatttcaagcacttcttcttctaaatctttggtgaaaaattcaggggattcttttttggtggagtttatcatattttgaaataaaagcaaatgtgtaacttcatctctttgtataaagcgtatcatttgcgcacttccgagcatttttccacttcttgctagagtgtagaaaaaggtaaaaccagaataaaagtaaatcccctctaaaatttgattagcaaacattgctttgataatatttcgctcagttggattggtagcaagttgttcataaacttcagcaatgtagtcattcttgcttctaagctgcatatccgttcgccacatttcatagatttcatcagtatttgcggagatagattctaccattacagcatagctttgagagtgcaaagcctcttcaaaagcttgtcttactaagatgaggttaatttctgggcttgtaatgtagggattgacattgtcaattaagttgtttgtctgcaaagaatccataaaaataagttgtgccaaagctctatcataacctattttttcttcaggagttagcccatctgcataatcgcgtttgtcttgagtcatattgacttcttcaggaaaccacgaattagccaacataactttccaaaggttgtatgcccattggtattttattttatttaattcaaatatgctagttgggttgcctccaaagattttgcgttcattgacactttcattggagtttggattgtaaatttttttgcgatttagcattcaagcctcctttataaacatttctttgattctaaattttgggattttatgtttgcgtattatatgattttttatttaaaataaattgatttaaatttctctaaaaaggaattagctagaatcgagaaaatttttctatcaagtttgcagttattttagaaaaaattaatggacaatgttttattatttgaatatatgagtatttattcatatattttgtaaattttatttatttggattgtggagtgggttatggaagttgcaaaacttaatatcagtggaatgcattgcagtgcttgttcttctacgattgaaaaaaatctcgaaaaaatagaagggataaaaaatatcaaaatcaatgcagtgagtggaagagcaaagatttcttatgagggcagttgtatttctgaacaaaagattattgagttaattacttcttatggttttcctgcttttagagataatgcaaaagagttggaaatcatttaccttgaaggtttgaaaaagcgtttgttggtagggattccgctttttgttgtgatttttgctttgcatatgggtggattccatggtatttggagttcaattattcaattagtattagcaacgattgtgcaagtgtattgtgcgtatcctttttataggggtgctaagagcgtttttaagactaaaagtgcggatatgaatgtattaatcgcacttgggacaagtgtggcttatttgtattcgttgtatttgtttattattagagatagtaatggatattattttgagggttctagtgcggttatttgctttgttttattaggggagtttctgaagtccaaagcaaagaaaaaagccggagatgaattagaatctctaactaaaatactgccccctaaagcaaggatattaaagggcgaaaatcaagaatggattagcattgataatatcaaaaagggagatcaatgtttggttgtagggggagagaagattccattagatgggaaaattatcaaaggcaatgcagaagttagtagcgcacatattaatggagaggaattaccgaagattctaggtgttggcagtgaagtggttggcggtagtttggttttgaatggggaaattgtggtggaatctctaaaagattctaatgaattttttgtttatgaaatgttagatttattagagctttcacaaactcaaaagccacctattggcaaaatggcagataaaattgcatcgatttttgtcccaagcattgtggtgttaagtgtggtggcatttttcttttggtggatgatgggagaagggtttgcctttagtttgtctattgcagcggcaattttggtggtttcttgtccttgtgctttggggcttgcagtgccactagcgattgtatgtgcgagtatgagagccaaaaagagcgagattcttattaaaacaccagaagtttatgaaagagcaagggagattaaaacaattgtttttgacaaaacaggcacactcactaaaggcgagatttctatcaaaaatgcagagtttattagtcaagattcaaaccttattgtttctttgtgctatgcgatgcaagaaaataatccacaccctattgcaaaggcttttgtggaatatttaaaagcaaaaaaagaaaggattgttttagaagaaaaggaatacatcatcgcaaaaggcgttagggcaaaatacgcaaatgatgagtattttttgggttctttggagtggattgaaacaataatagataaaaaaatcacacaaaaccgagagaatgttattgcatttagtaataaaagcgagattttggctttgttttatttgcaagattctattaaagagggtgcaagggaaatggtagaatctctacaaaatataggcatagaatctgtaattttgagtggagataatgtagagagtgtgaaaaaggttgctcaaaatatcgggattacagaatattatgcaggggtaagtccaatgcaaaaagcagaaattattaagcaacttcaggcaaaaggtggagtgtgttttgtcggagatgggattaatgatgcattagctctcaaagaggcaagttttggaatctcttttgctaatgccacagatttagcaaaagaagttggtgatatattgcttttgagagatgatttgagtttggtttataaagtctttgagatttcttttgcgacactgaaaaatatcaaagaaaatcttttctttgcttatgtttataatgtggttttgattcctattgcagcgggggttttgtatcctgcttttgggattgttttgcaaccagcatttgcaggaggggcgatggcatttagctcggtgagtgttgtagcaaatgctttgcgtatttctcgtttgaaactaaagggcgaataaatgtttaaaaagattcttgggtttttgctgatttttgcagtttgtttgaatgggttggagtattttattttggaagaggaataccattttaaagaaaataaaatttatgcaaaggaaatattcccacaaataacaaatgattttttggttttggagatacccaaaaattctagcaattatcaaatcaaaagttcgcagcttattacgctttttgaaaaagagggggtgcaggtaggtgcaaaatctgctgttgtgacttttaaaagaggaataaaaggagatgtggaggggattaaaaaatacattgtaggattatttttgcaagaatataaaaaaaataatatcaagataaaaaaaattgatttagagcagattactccgattgattttaatgcacaatctgttagggagattgattttcatccaaagcttttaaaacgcaaagaagggacttttgaggttgtggtggaggataatgggcgtaatagaaaagtgttttttaaatacaatgttgatgcgactttggaggggattattacagcatcagagattagtggcggacaaactatcacttatcaaaattcgcgtatagtggagattccttttgacaaagtgggtagtgatttgatgcagcaaggggaattagggaaagtggctgtgaggtcttatactccagaaaatgtgcttgtaaccaaagatagattgattgctaagagagtggttaaaaagggggataaaattattgtaagcgtgcaagaagagggtgtaattttggaatttattttagaagcacttaagaatgctgctatcggcgatgtaataaaggctaaagcattagaagggaagaaaacttatgaggtaaaaattatcgatgagggaaggggggagttgcagtgaagagggttattgtcggcattagtggagcaagtggagcgggacttggtttgaaatttttagaatcattacccaaagagatagaaaaatattgtgtgatttcagagggggcaaaacgagttttatcttcagaggaaaatattcaagaaacgcaaaagtttgagcaaatcaaaagcagagtttctaaggtatttttatttggagatgatgaactaggtgcgtgtattgcaagcggttcttttgtgtgtgaagcaatggtggtgattccttgctcgcaaaatactttagccaaaattgcttgtgggattagcgatactctaataacgcgttgtgctagtgtgatgataaaagagcaaagaaaattgcttttggcaccacgagagattccatttagccaaattgctttggagaatatgttgaagctatcgcaaattggggttacaatagcccctcccgtgtttggttattatgctgggaaaaatcttgatgaaatcgaaaatatgttgattggcaaatggtgtgataatctaggaatcccttttgaatatggacgatggcaaggctgtaattagcaatttagaattttaagggagtgtgtgttagtattttaattcaatttcaatagtttaaaggaataagatgatagaaaatcgctatcaaaactgcttgcccttccccctacaaaataacaatatagattctatttaccaaaaatccccaagacattttcaagattgctcgcatattaaacttacttatgttactcacttttattgtgatcaagataatatcgattctgtgatttctcttttgagagaatatgaatcttatgatcctaatcttttggatattgtaatgtttgtaatagtggatgatggttcgcctattgcttatgagattccaaaatttaatttgaatttgcgttggataaaaattaatgaaaatattccttggaatcaatctggagctaggaatctaggcgtaacttatgctaaaagcgataatatagtaatgacggatttggatcacaagatttatgaaaataccctatggtatatggcaaaccataaaccttgtgggaggaatttttataaaattaaatatgttgatagtaataagggtcattctaatacattttttatgagtcgtgctaggtttatgcgattttttggttacgatgaagaattttcagggcattatggggcagaggatttcaggtttgttaagtttcataaggcacatggttcaaggcaaatgtatttgccagataaatatcgagtagaaagaaataggaaagaaataaatagggaaacctcttatcattctttggtgagagatttgacgcattgtacgcctgtagatttgagaaaaaagcttgaaaatagatattttggtaatgaacaagggcattcaagaatctttttgaatttcacttggagatttttaagtgagcaaaggagaaacaatattccacagccaaagcccaaaaaatggtggtattatctttggtattggcgttggttggtcggatataaataaatatctataataggcatagactataaaagtgataaagataaaacgacttagtattcttaaagcagagcttgttatatttaaattaagcgtttttggtaaacactaaaatattcttatttcttgtgctttttaagaattatatttgggagtttagagttttagttaaaattcatttaaaaataatttggtttcctttttatctagcaaagagcaaataagttgagcaaaatatcaaaataaagagaatgtttgcgtaaaagagataaattgattctgtggatttttagataaaagccaacaagatatgtaaatctacatattgcttttatggcgaaataaaggaaaatcactagaaatcactaggatagactaaacattgtattttacgcagtttgtggaatgaatggaaacaaaaataaaaggatagaaaagtgtaaatggccgggagagagggaatctcacttttgcacaaatgcgtaagattctaaaaatcgatgagagaatccaatttaaagaggtggattacacagccaagaatcccgagaacaagaagtttgtggagtttaagaatctcaaaaaattctgtgagattctaggtgcgatagtaggggatagggcattggcagattctatcgcacgagatatgacgcttatcaaagatgaagaggagctagcacaaaaactgcgtggatatggcaaatttagccaagagcaaatcacgcaattaagtgcgttacactttagtcatcatatcagtctaagccttaaggcattaagcgagattttgccatttatgcgagagggaatgcggtatgatgaggcgtgccaagaagctaaattgcaagcaaagcacaatgacaaaaagagcaagtttttgccacccttttgtgagagtatctatgctgatgagctaacaaatccggtggtgcatagggcgatagcagagtatcgtaagattcttaatgctttgattgcaaaatatggaagtgtgcataagattcacattgagcttacgcgagatgtgggaaaaaacttccaagagagagaaaaatacaaaaaagagatagagagcaactataaagcaagggtgcaggctatgcaagagtgcgagaagctgggattgacactaagtgaggggaatatcctgaaattgcggctttttagggagcagaatgaaatatgtgtatatagcgggaggaaaatcactttagcaaatctcaaggagcaaggagcgttagaaatcgaccatattttgccttattcgcgaagtagcgatgatagctatatgaataaagtgctggtttttacaaatgagaatcaaaacaagggcaataaaacaccctatgaggcatttgggggagattctcaaaaatggggagagatagaatctctagcccttaggagtggctatccaaagaaaaaggcaaagcggattttggacaaaggctttggagatagagaggctgggtttaaaagtcgtaatatcgtggattctggctatatcgcgcgtttgattgctaactacactaaagagtatttgaaatttttgccgctagattctcatgaaaacacagcacttattgcaggagagaaagacagcaagattcatgtggaagcagtgaaaggtatgctaactgcgactatgcggcatttttggggattgggtagcaaaaaccgctatgagcatacccaccacgctgttgatgcgattatcattgcttatatcaatgcagcgatgatacagagattctcacaatttagacaaaaccaagaaagcttaaaggcaagattctatgctaaagagctagcaaaagaggagtttaagacacaaagggcgttttttgagccttttagcggctttagggagcaggtgctagcaaaagtggggcaaatctttgtttcacgtccgccaaggaagcgtgcaagaggggcgttgcatgaggaaacattttattcaatagatgataaaaaattatccgagacttatggtggcaagaaaggggtgcagagggcattgagcttaggcaaaatacgacagattgggacaaaaatcgtggcaaatggacctatggtgcgtgtggatatttttaagcacacacaaagcgggagattctatgctgtgcctatttatacgatggattttgcccttggaatcttgcctaataaggcggtagtgagtggcaaggataaagataggattatcaaagactggctagagatggattcttgctatgagttttgtttttcgctctttaaagatgatgtgatagaggtgcagaaaagagatatggaaaagccagagttggcgtattttgtgtctttagatgcatcagatgggaggattaaggttagacatcattgcaatgatattacgaagattaatgagaatcaaaagaagctttttagcgaagccatagaaaaagaggtggtgggtaggggaagcattcaaaatctcaaagtctttaaaaaatacaaggtttcgccgctaggggagataaaagaggcaaaatatgagccaaggcagcctatcgccctcaagacttctcctaagaaacatcggaagcaaaataatgcacaatgaaagataataaggagatacaatgggctatgatgaggcatttaaaaatgtcatcatatcaagtagagcaaaacttagcctgcaagataatcatttggtaatagcgggaaatgatgaggtggcaaaactctatatcaaggatttgcattgtgtggtgctagaaagccctcaaatcacgattacccaagcacttttgagtgcattagcagaatctaaagtgctggtgcttacctgtgataggacacatgctatcaatggagttttcacgccatttttggggcattttgccaatgcacaagtggcaagagaacaaatcgctgtgagcacagaatctaaggcaaagctttggcagcaaatcgtgcaaaataaaatcgctaatcaagcttctgtgctgcaatcttgtggctatatcacagaagcagtggagttggcgagaatgtgtgaaaaagtagaggcagatgatgctagtaatgtcgaggcgaaggcggcagcattgtattttaagacactttttgggatagggttttcacgcaaagccaaacacaagattcacaatgccttgcttgattatggctatgttatcgtgcggagctgtgtaatccgtagtgtgtgtatgagtgggctactcacttggagtgggataaagcatagcaatcagtttaatcaattcaatctctgtgatgatattatcgaggtgtttcgtccttttgtggatagatgtgtgcttgggcttttggaatctaggggcaaagatggcgattatgcggtggtgtgtgatttgagcgagttagattctaaaagctatctagagactatgactaaagaggacaaaagagcactcattgagaatctacaaagtgaggcaaaggtgggagagcagagtttcccactaagtcgggcgataaaccactatgtgcagcgatttaaaaatgctttgttgtatgggcaaccattggtggtggtttgtatggagtagggtatggtggaggataagtttatgcgtgtgctggtgatgtttgacctgcctactaagactaagaaagataggcagacaggcacgaagtttcgtaataatcttattaagcttggcttttttatgatgcaatttagcgtgtatatgcgaatctgtaagggtagtgcatctgcaaaagcctctatcaataatgtgaggaagtttgtcccgccaagggggagtatccgctgtcttatcatcacagagaagcagtttgattctatggagattttgctaggtggggtgggattcaatgagatgatgaatgagccaagaaatctcgtgctttttggatttgatgagaaaaagggagagtatgtgtatgcggataatgataaagatagcgatgaagagaagttattgcaaacaaaatcaaagaaaacaagaaatatacaaggaagtttatttgagttttgaagatagaatggtgcgctacttaggataatatgtgtagaatagtaacaatatagggaatataaaaaacaataaaatgtgaaaagtattatgtaatataaagtaaaaaagtcttggcaaaaagggatttttggaggtttttaatctcacaccctgcacctttactcctagtattgccaagaaatactaggtaggtttattttagtccctttttaaatcttcttttgctattgtagcataaaatcccaattttttggtctattttagcatagaaagatttaaaaagggactaaaacctaatcaacatttaactatgcaagaaattgattttagcatagaaagatttaaaaagggactaaaaccgtggcattttaaacatttctgaagttcttattttagcatagaaagatttaaaaagggactaaaacggcgatattcacattaataacgtcgttcgtattttagcatagaaagatttaaaaagggactaaaacccgttacctctgaatatccttctggttccgattttagcatagaaagatttaaaaagggactaaaacttctaaatatccttctggttccgaacaattattttagcatagaaagatttaaaaagggactaaaacttatgttcgattagatccatttggttatacattttagcatagaaagatttaaaaagggactaaaactagcggagatatctccaaccccgttaaataattttagcatagaaagatttaaaaagggactaaaactctagagcaatgaattctattggtcaagctattttagcatagaaagatttaaaaagggactaaaacaattaagtcgctttttgataatgttcttgcattttagcatagaaagatttaaaaagggactaaaacagaattatgaagcacaaaaggaatttgctcattttagcatagaaagatttaaaaagggactaaaaccgttttcgcattggtttaaaaaattttatcattttagcatagaaagatttaaaaagggactaaaacggaattcaatttaggacgcgaaagcccccaattttagcatagaaagatttaaaaagggactaaaacaatcaactcttatatagacttattccaacaattttagcatagaaagatttaaaaagggactaaaacgatgttgcctttgttaaattcaatgccattattttagcatagaaagatttaaaaagggactaaaacgaaaagaagtaaatttaatttaacacatacattttagcatagaaagatttaaaaagggactaaaacgtttccgttcgagatttaagagcttctagtattttagcatagaaagatttaaaaagggactaaaacgtttacagacattttgtcaactgtcctattattttagcatagaaagatttaaaaagggactaaaactctcctgatctatcatacgcacgtctaagaattttagcatagaaagatttaaaaagggactaaaacccgttacctctgaatatccttctggttccgattttagcatagaaagatttaaaaagggactaaaacttctaaatatccttctggttccgaacaattattttagcatagaaagatttaaaaagggactaaaacttatgttcgattagatccatttggttatacattttagcatagaaagatttaaaaagggactaaaactaactctctgcatttttaagcatatcccaaattttagcatagaaagatttaaaaagggactaaaacgagcgcgagttcttgaaacgttctcgcttgattttagcatagaaagatttataaagagactaaaactggggaagcttctccctttaggctttgatgattttagcatagaaagatttaaaataaccgaagcttcaaaccattactttattgtttttgatataatttaggttttttaaaatattttaaatgatgcagtttttgattgctataagataggtttgctatatttatattttggatttgtgcgataagctaatgtgcggtgaaaaattaatagagttttagattgtcttattttttggggtttttcgtaatttagactaaaaaagcaaggataacacactacaagattcaaacatattttttaagatttgaaggaaaaatcatggtatatactactttttaccaaagtcctattggtacaatacttttagcaagcaaagataataagcttataggttcttggatagaagggcagaaatattatttaggaaatcttaaggaatctacacaagaaaaaggtgacgaacctatcttattacaaactaaaatatggttagacaggtattttaatggagaacagcctcatacttttgaattagacttggcacctaatggaagtgtatttgctacaaatgtgtggaatatactatgccaaattccttatggagaagttatcacatatggagacatagcaaaaaaagtagcgcaaatagcacacaaagatacaatgtcagcccaagctgttggtggggcagtggggcataatcctatttctattattatcccttgtcatagggttgtaggcacaaatgggagtatgacgggttatgcaggaggaatagagaaaaaaatacagttattgcaacacgaaggcgtgaatcttaaatccctgcaaatcaaaagataaaccattttacataatttttgagaatttataaatgtttggcaagtaaaatcagactttgggctaatttaaaataataattttaagatatttgggtattattttagagataaaatttgcaaataaaaagataaatttatgcaataaggcattgtgtaggattgcaggatataaaagcttgagttttgatagagaagggctgtattgattttgtaaatgtagaagattttgtggtgcaggatttaagaagtaaaggataaaagaaatttagagggggtttgaaggttgaaagaaattgctttggaaaatgtttgagtttcttggtgtatttgcaagaaagattgaaatctaaaaatatattcaagaggacttaaaaggaggaaaaatggaagttgtgagtataaatatacctattgctgtgatgtttattacttattcggcattaatgctatttattggtttttatttttataggcaaaataaaagcactgaggattatttccttggtggtcgctctatgggtcctgtggtttctgccttaagtgctggagcttcggatatgagtgggtggctacttatgggtttgcccggggcattgtatgtgagtgggtttgtggatagttatattgctataggattgacaattggggcgagtttgaattggatttttgttgctaagaggcttagaatctacacaagtgtggtgtcaaattcgctgactattccggattattttgagacacgatttagtgatgataaacatattttgcgtgtggtttgtgccgcagttattcttattttctttaccttttatgtttcatctgggcttgtgagtggggcgaaactttttgaggaggtttttggcataaggtatgattatgcccttactactgggacttttatcattgtggcttacacctttttgggtggatataaggcggtttgttggacggatatgattcaaggcttgttgatgatattggcacttgtggtggtgccaattgtgatgtttttgcagcttgggagttttaaggaggtggcttcttatattgcacattcagatgaatctagcaaaaaaatcattcaaattcaaaatgatattccaaatattttaaaaaatatcaaaagcgtagaaactcaagcaaagatacaagtgctaattgaaagccttaatcaaacgcaagatagaagcattagctctgctaaacttgatgaaaagctcaaaacagattcgcagattcaagcattttttaacaatgatttaagcacagcaatattttcaagggattttgcaaaaaggcttagtgaggctttggaagctaatgactttgctaggcttgaaaatcttcttgctgcttggcaacacattccttttgtggcaaaggatcgcttaagttggcttagtggcgtttcacttgtggggattatctcggcacttgcgtgggggcttgggtattttgggcagcctcatattctggtgcgatttatgtcaattcgctccactaaagatattcccgcagcgacttttatcggcatagcttggatggcaatttgtcttattgctgcttgttttattggtatgcttggcgtggcgtatgtcaataaatttaatctttctttgcaagatcccgagcgtatttttatcgtgatgtcccaactgctatttaatccttggattgctgggatcttgcttagtgcgattttagcggcgattatgagcacggctagttcgcaacttttagtttcaagttctacaatagcggaagatttttacaaaaagattttcaagcaagaagcctcagaagcaatggtattaaggctgggcaaagtcggagtgcttgtagtggcacttattgcctttgttatctccacggacaaaaattctagtgtgctaagcattgtagcttatgcgtgggctgggtttggagcaagttttgggtcggtaatgcttttctcgctcttttggagtagaatgacaagaataggtgcgattgctggaatgattagcggtgcggttgttgtggtggcttggaaacagctttttgctgatacaggtgtgtatgagattattccgggatttgtggtggcatctttggcgattattatctttagtcttgcaagcaaagtgcgagatggcaccaaagctgcctatgacaaaatgctaaaaaatctctaaaatttggaataagtttgctacagaatctcacttgatagctttgagtagggctatcacagccctatcacaccaaccctctgcttagagtatgtagaatctagtgcgatttctatcatcgctattgcataatctgcatagcttacacgagattcacccttgctatttagctcaaattcttcgccgatgattttgtatttgccactttttggtgcatctgggataaataccgctggtgggctgacatagacccaatttatgccctttgatgcttttatcacatcaaaagcctctgtggtagccctcgccacaggcagatattcttttgggaaatctggcgtatccataagcatagttgtgtggcttgtatccatatacagactacctgcaccgcctactaccaagaatttcgcactattgcctgatagaatctgcaccaaatgctccatatgggctttgtgtaagctaagattttgccactcaccaaaggcgtcgattatcacatcaaagccttgcaaatcgctagattctaaggtaaaaatatctttttgcaccacgcacactttgctatcaaatcgtgctttactagaatctcgcacaaaggcactaacctctaagcccttatttatggcttcctctacgattaacttccctgctttgccatttgcgcacaaaactgctattttcatagtctatcctttataataaattttgctttaaaaagcacattggaatgataatagagtaagttgtaaaattcaagtaggaataattttataatgtaatagtatttttaatactattgtgtaaatatggagttttattgataaaaatttttaaaaattttagaatatcatagagaggttttatgaaaatttgctagaatctaagcataacttcataaaggaatcattatgacaaaatatcattcgccctgtccgattgagactacacttaatctcatcggtaataaatggaaattcctcattattcgcgatttattaagcgggacaaaacgctttggagaattaaagaaaagtatttcagcaaccaaaaatcaaaccatttcacaagcggttttgacacagaacttgcgagagctagaggaagcaaagatcctcacgcgcaaagtctatgcagaagtcccaccaagggtggaatatgccctaacgccactaggggagagcttgaaagagattttagaatctcttgctgtgtggggcgaaaaatacaaaaataaagaaaatctagcctaaagcaaaatgaattttattgtaaattagtattttctccctaagattccttgtgcttttttaaccatagagagatcaattacatttccttcgaaattaaaaggctctcccttgtgaattttggctaatcttaaaatttcttttgcccattcaattttttcttccccttgtgcaaagattgcattgatggtggcaatttgattgggataaaaggtcaaagagcctccaaaacccatagaataagcagattccatatttgcttttagcttggaaatatcgcgtgtgttgggaaaaactcggttgattggaggcaaaagattatagattctacttgctagagcgatttgaacgcgaacatagttgagtgcaaaatctttgccttccccatcttgaagtcccaaatccaaaatcatatcaaatgcgccaaatgcaagttgttttacgcaaggcatagaagctgtgaggttgatattttggactccccaagcactttcaataagaagtatcaaagggatttctccaacagcatttagcacagcttcaatatgtgccttttgctcggcttttgggagcattatcccataaagattggctagccccatttggtttaaaaaagccatatcctctgtaaaaaaatcgctttgtgcatcattaatgcggataaagaattttttgtttggatttgctttgctaaatgaaagtatgtttttgcgtcctgtgggtttttgctctggagtaacagaatcttctaagtcaaaaatgattgcttcagcaccactttgaaaagctgattcaaaattttcgattttagaggcagagacaaagaggaagcttttggctcttgggaagtcatatggcaaagtagaatgaggcattttgtattcctttgaagtaaagattttgtttaaaagtagctaagattataacaaaaatacaaaaaataattagagtttttggaaaatttagatgtttttattttgatttttgaagtgaaagtgtgaaaatgaaataaatcatattgtaagtttgaaaagcggggtcattggatgaaatgagcccctatggattcttctcttttgagtgcagattgtatgatgttttttgcggttaaaaggcggagtttcaaaagtctgcctatcccactttgtagcattacttctactccacctaaagcttcatttaagccactttttttgcggataatgcctactttattccacataagattgcgtaagagtgctttgagattttcatcttgttctttgtgtagaggttgtgtgtggaggggaaattctcttgctttaaaatcaaagtttttatttaaaatatcttgtgtagcccgacgcgagaatacaagcccttctaagagtgaattagaagcaagtcgattggctccatggacgccagtgcaagcacattcgccaacagcatagaggttttgcatacccaaaactttgccatctttgttggtttcaattccccccatacaataatgaaaagcgggagaaatagggattttgttgtttggaacttcatagcctacaagattgagattcctagcgatatttgggaatctttggtagaaaaaatcttttgaaaaattacttaaatccaaataaacttctaattcttcggattttgcattagggtattgtttttggagtttgagtttataatcaaaaatagaacgcgctaccttatctctaggtgcaagttcgcctttgtcgtcataatcaaataaaaatcttttcccccaaaaatctacaatataagccccttcgccccttaatgcctcactaagaagcatttttctagcatgaggagttttgacaaatacggttgggtgaaattgcagcatttccatatctttgagttttagcccattttctaaaatcattccatgtaattcactagagatggtataagcatttgtgtggtattcaaaaagtgctcctactccgccacttgctaaaataacattttttgcataaaggttgtaatttcctcttttggttagcacacttacaccgcaacaatgatcatcatcgattaacaattctgtaacggttgcatttttccacaaagtatgagtgatttgcgagatgaggtggctatggattactcttcctgtgcaatctccaccagcatgaattattcttgaagtgctatgtgcagcttctttggtgaagagcaaatttccgctttcatctctatcaaaaggcgtatttttggcaatcaaatcttccaaaacctctaaactttcttgactaagtgtcgttacagcattttcatcacacattcctgcaccagcttttagtgtatctttgatgtgtagagggatatctgctttgtcttttgcaacagcgattccgccttgtgcatagaaggtattgcattcccaaggttgatctttgcaaagaataagaactttgagatttttggggagattcaatgctgcatacaaaccagcaaccccagcccctacaataataacat

SEQ ID NO: 3810 - DNA, 22067 bp, synthetic construct
  misc_feature 1..22067: note = Synthetic
  source 1..22067: mol_type = other DNA
gctgatgtgggttggattacaggacatacttatgtagtttatgggcctttagcatgtggagcaacgactataatgcatgaaggaactcctacttatccaaattctgggcgttggtggagaatgatagaagagtatcaaataagcaaattctacacttcgccaactgccataagaatgcttcatgctgatgcacctgatgagccaagaaaatatgatttaagtacgcttgaagtgcttggaacggttggagagcctatcaatcctagtgcttggaagtggttttatgatgaaatagggggaactaaaagtcctatagtcgatacttggtggcaaacagaaacaggtgggcatatgatcacgcctttaccaggcgctactcctttaaaaccaggttgtgctaccttgcctttgccaggaatttttgcagaagttattgatgaagaaggcaataaaaaagatgaaggtgaagatggattgctttgtataaccaaaccttggccttcgatgattcgtggaatttggggtaatgatgaacgctatatagaaagttatttttctcaagctagaaaagatggaaaagctgtatattttagtggcgatggtgctttttatgataaaaatggttatataactatcacaggaagaacagatgatgtggttaatgttgcaggacatcgtataggaacggctgaaattgaaagcgctattgctaaacatccaagtgtagcagaatcagctgtagtgagtattttggatgcgattaagggcgagtcactgtttgcttttgtggttttaagtcctgcatccagttgtgatcttggcggagctatagaaactttaaaagaacttaatgacattttaagagtagaaataggacctatagctaaaatagaaaaaattctttatactccaggtttgccaaaaactagaagtggtaaaataatgagaagaattttaagaactatagcaagaggtgaagaaatcaaacaggatatttcaacgctcgaagattctggagtagtagaaatcattgttaaattagctaaggcagagtttgaataacaaggcaaaaagaactttgccttgttgcataaaaattcataaaaataagctataatgataaaaaaataaaaggaaatttttatgcttcaaacttgtattttccctgcggcaggttatgggacgagatttttacctgcaacaaaaactttacctaaagagatgttacctatcttaactaagcctttgatccattatggggttgatgaagctttggaagcaggaatggaaaatatgggctttgtcacaggacgtggaaaaagagctttggaggattattttgatatttcttatgaacttgagcatcaaatttcaggtacaaaaaaagaatacttgcttgatgaaattcgctctttgatcaatcgttgcacctttacttttacaagacaaaatcaaatgaaaggcttaggtgatgcggttttaaaaggtaaacctttggttggcgatgaagcttttggcgtaattttggctgatgatttgtgtgtcaatgaagaaggcttaaatgttatggctcaaatggtaaaaatttatgaaaaatatcgctgcaccatcatagctgtgatggaagtaccaaaagaacaagtttcaaactatggagtaatttctggaaattttgtagaagaaaatcttatcatggttaattctatgatagaaaaaccaagtcctgatgaagctctaagtaatcttgctatcataggaagatatattttaactcctgatatttttggaattttagaaaatactaaagcaggaaaaaatggcgaaattcaacttaccgacgcgcttttaactcaagcaaccaatggtatggttttagcttataaatttcaagggaaacgctttgattgtggaagtgtagaaggctttgtagaggcgacaaattatttttacgagaaaagtaaatgttaaacaatacacttttttttaaacaaagtgaaattcacactataagctcttatgcaaatcgtattaatgatgaggtaaaaagtggagatatagggtattatcatcttattgacacaagcttaagcctgattgatgagagtttggcttttatcaaagacaaagaacacataaaaaatattgttttagtgggaatgggaggttcaagttgtggtgtaaaagccttgcgtgatatgctttttaatgaaaaaagcaaccaaagagagctttttatactcgataacacaagttcacattcttttaataagacttcagaaaaaatcaagcttgaagaaagtttgttcttaatcatcagtaaaacaggtagcactatagaagttgtatcgctttttaaacttcttattgaacattttaaacttgatatgcaagaattaaaaaaatactttgtttttattaccgataaggattcaaaacttcatcaagaaggtgaaaatttaggtattaaatgcttttttatccctgcaaatgtaggaggtcgttttagcatactttcagctgtaggtatagttccactttgtttttgtggctataatgccaaagctcttttagaaggagctaaagcttgttttgaagatttttttactcataaaaaagatgaaattttacaaaaagcctatcattattgcacacacaaaaatgccaatatcaatgtacttttttcatatagcgatgcttttaaaggctttaatgaatggtatatccagcttattgctgaaagtttaggtaaaaagcaaggctacaaacgcataggtttaactcctattgcactcattggagcaagagatcagcatagttttttacaactcattatggatggacctaaaaataaaactgtaacttttttaaaaatcaaagacgctcaaaaagcgcctattatccctgatattcattttaaatttttagattctttaagtaacaaagtcaatcttcacgaacttttaaacgctcaatgtgatgcaactatgcacgctttaatcgctgaaaatttgagtgttgatgtgatagaacttgaaaaacttgacgcttggcatgcgggatatttgatgtattattatgaactttttacttcaacttgcggtgttatgctagggattaacacctatgatcaacctggtgtggaagttggaaagttgatcttaaaaaatatattaaattcttaatcaaaattcattaaaaaagagtataatgattttaagttaaaattataataaaaatttttaattaataataattattatttaagaattttatgttataattttaaaaattaaaaaaaggagtcaatcatgtcagttacaaaacaattattacaaatgcaagcagatgctcatcatctatgggttaaatttcataattatcactggaatgtaaaaggtttgcaatttttttctatacacgagtacacagaaaaagcttatgaagaaatggcagaactttttgatagttgtgctgaaagagttttacaacttggcgaaaaagctatcacttgccaaaaagttttaatggaaaatgcaaaaagtccaaaagttgcaaaagattgctttactccgcttgaagtcatagaactgatcaaacaagattatgaatatcttttagcagaatttaaaaaactcaatgaagcagcagaaaaagaaagtgataccacaacagctgcttttgcgcaagaaaatatcgcaaaatatgaaaaaagtctttggatgataggcgctactttacaaggtgcttgcaaaatgtaatttaaggggctttatgccccaattatacaaactaggttataatatccttttttaaaggataaaattgaaagtacttaattttttttatgaaaaccaccctaaatttgaagtaagttatgaaagaaaaaatcaaatttcaaaaccaaatattatcataaaaggcccacgattttgtggtaaaaaaacacttatttttaattttttatctcaatttaaagcaagtgaaattttgtttttagatttatatgatacacgctttgaaaaacaaagtttagaaagacttgctgattttctgaatgaaaatttacaaattaaaattctttgcctttataatttggattttatccctaatttagaaaaaattaaaattcccatcatcttaagtacaaatataaaagatttaaatataaatgggtttgaagagcttgaacttgattattttgattttgaagaatttattagtgtaagtaagaaaaatttacctataaataatttagtgggtctttttttgcaaagtggacgcagtaaatttggagaaaaaaacatacttctaagacaaagcttcactcttttagaattagaaattttaaagtatttagctttaaatttgggtcagcaaatcagtatttctaagatatttatagaactcaaaaaaagattaaaaacttcaaaagatagtgtttatcaagctataaaaaaattagaaaatacttatgtgatctatactttaaaacatgatgaaaaaaaacttcaaaagatttattttaaagattttggcctaagaaataatctttgtatttcaaaggatttttcacatttatttgaaaatttagttttaagcgagttatttaaatttaaagaagaatttttttataacaaatactttaacttttatagccaaatatctaaaattgcttatatttcaagtccaactttagatattgatttgattaaattacgtgctaagaaaattttaccaaaggctttagaacttggaatttttcatgtgatttttatcactctttcaagcgaggataatttttttgagcaaggggttaaatttgaagtcatatcttttgataaattttcacttggattttaggtgttgtttgagtttgtatcgtatttttcaaggttgtatcgtttgatgatttttgtaataagattgatataatatcccttgcgttcagaataagaatctaaagttttaatagcctctagccctgttatctctttgccttcgctttcaaatttagctcttacatcgcgaaacttttcataagcaaaatgacgatttaaatttaaaacataagagtcaacactatcttgcagactatcaaaaatcttaattttatgttttttatctggatgtcttaaatcaggaattaaacctttctcaccccaagtccattctccaaaaagattgtttgcttctcttgcgaagcgactggtacctgtagcactttcaactaaagcttgggctatacccatggattttggaattttttgaatacgttttttatattctgcaaaatcataaagattttcaatgcgatatttgttttttatcgtgataagtttttcaagatttatttggtttgaagtcctaaagcctgttttgtaagcatctttaaaaaaggcttcgataaaggctctttcttgttcaatttttttaaagctttgatcaaacatttcattcatttttataaaaaaaatttgtcttttttgatctatatcaagtttgtaatattcctctccaaatccactctttagatcatcagcaaaaagtgggattagaaaaagactaagaaaaattataattggcttcaaaacaatactttacctttccctcaaaaaataattcttcatttttatatgtaaaccccacctcttcaccacttttaggagttattttaactttattttgtacttttttatttaaaaatgccagataaaaacaagcccccattcctgtgccgcaagctaaggtttcatcttcaactccgcgttcataggtgcgaacttttaaatgattttcatctaaaatttttacaaaattaacattggcattatatttttgtctcattttttgacaaagcattgtatcaaattcatctaaattttgacaaaaatgtactagatgtggaactccagtatcgcaaagttgccaagtttttcctaattcttcaaaagtattttgcacgctttttattttgcctaaagatacttcaactttattttgatttacctttgcttttattactcctgcgccagttaaaaaactcatgttaggatttattttgttattatgatgtgcaaaatgtgccgcagcccttgagccattgccacacatagcagcccttgagccatcgttattataaaattcccattcaaagtcgtatttttcatgaggcaatatcacgataaagccatccgcacctataccctcataacgattacaaagttctttagctaaagcacttctatcttcttttctatcagcatttgttatgacaaaatcattcccacttgcacaatatttataaaatttcacatttttcctttagaaatttcttgtattactttaacacattcttgcctaaaatcggcataagaattagtatttttaatgataaaatctgcttttttaagtttttcttcaatatctatttgagaatcaagtcttgcttttgcagcttctaagctgagcttatctctttgcatgattcttttaaggcttaattctttaggtgtgtaaattactatgactttgcctaaattttcataagcaccgctttcaaaaaaaagaggaatttctacaaaaaaagatttattttctttatctagaatttgcatttgttctaaaattttagctcgaattttaggatgagtgaaattttctaaggtttttttagcttctttgttgttaaaaacaatttctccaagggtttttctatcgattttcttttcttttgtgagtaaattttttaagctaaagggagaaaaaatcttttcaagttctaaagtattttcatctaaaatttcatgagcgattttgtctgcgctaatgcttttaaagcctaaagaattcgctatttctataaaagtgcttttaccacaagcaattgaagcggttacaaaaaaagtatttttcatcttatgccttattaaaacttttttcgttaaaatacctttttagttcttaaaggaaaataaatgaaaatttcatatgaagatgcaggcgtaagtatagataatggaaatgcctttgtagaggctataaaacctttggttaaagaaacttttaatgataatgttgtaggtggaattggttcttttgctggtgcttttagaatgccaagtggttttaaaaagcctgtgattttaggtgcaacagatggggttggtaccaagcttcgcttggcaattgatgctaaaaaatatgatactatagggcaagatttagtagcaatgtgtgtgaatgatttgatttgtaattttgctacgcctttgtttttcctagattattatgctacagccaagctcgaagtagaagtagcaaaggctgttgtatcaggcattgccaagggatgtaagatggcaaattgtgcattaattggcggagaaactgctgaaatgcctggaatgtatgcaaaagatgattttgatcttgcgggttttgcagtgggtatggctgaagaagatgagattgatagaagtaaatttgttaaaaatggtgatattttattggcacttcctagttcaggacttcattcaaatggttattctttagctagaaaagtactttttgaaagtttaaaattaaaatttgatgacaagatagagggtaaaaatttaattgatattttgttagaacctacaaggatttatgtgcgtgattttcttacgctaaagccttatatcagtgctctagctcatattacagggggtggtttagtagaaaatttaccacgcgttttacctcgtggtatgggtgcaactatacgcaaacatcatcttaaaactcctgaaattttttatactataggacaggctgtagaagaaagcgaaatgtatagaagctttaacatgggagtaggtttagtaatggttgtagattcttctaatgtaagtaagattttagaaaattcagatgcctttattatcggcgaaatttgcattaatgaaggtgttgttttagaatgaaaataaagcgtcaatacgctttatttttgtattttaagttctatttttgtagtgctttgttcttttggcaaaggattggtttgtgctagataaaaggctacaagtatatttacaagcatagcaataagtaaaagaggagtggttcgttttataatatccattggagctacttttgcaaatccagctaaagctatgattccgcctgctattggtgaagctgcacgacctaaacaagatgcaatttctataggtaaaactagagtaataggcgcaatgcctaattttgtagctatatcaggagctagtttgccaaaagcattaaaagcagcaattccacttcccataatcactgtggcaaaataaactaaaaagcttaaaatagctatactcaaaagaattccaaaccatgcaaaatttcctgttccaagatttgaaaccgcgttagcaaggatattaactccaccaagtgctttaataccttcagcaaatactccagcggcgatgattatgcttacgactgagataaaaatttcagccatagcttttaaaatcaccatcatatcttcgcctaattttctagcatttctgtgtcttgcaaattcaacaagaaaaactaaagaaatgcttacaaaatttgctgtcacaacatcgagcttgatagtaaaaaaatacgctgtaaataaaaatacaacaggtaaccaaggaaagagtatgtaaaaagtagggcatttaggatcaatgatttgcggaatttcaacttcatcatttaaaacacctttttctttatctcttttatcaatccaagcaaaataaaaaggaatcaagatggcaataactacaacataggcaatcacactataaatttggtaatttaaaaaaagccctacgacattatcactttgtcctaccatatctgccatattgattgaatttccatcttttggaccataatcaagtgcaattaaagaaagcacacatacagctgtaataggacggattttaagtgagattaaaacgggataaatacatgctaacaaaagcaaaagcaatccagcatagctagaaatgacgatttttaaagccattccaacaacaaaagttccacttaaaatcaagtatttattttttttcctaagggtttatttgctaaaaaagcaagttttgccgaagcattgatatgtttcatataggcagcaaagcctgccacactcatgataataagtcctactccagaaagctgacttttaaaagtcgttgtgataaaagcatagctatcaagtaaaacattcaaaaagcttgtatgttctctacttggagcttttggtataggtgttcctgtgatataaaaagcaaaaataagcaagataatacctgaaagaaaaaatacaaaaatgggattgtattttttgagtatataataagcaacaacaattaccgctaaaagtgtagaacatatcataaaaattggcatgatttctcctaaggttattattagcttttattttattttagctaaaatttaactaataaatatttttcatttaaaattttacttattttttgcattataaaattaataatatgtatagtttggttactgaaaggtttatgtttgtataaaaaatgatttttatattataattataaacaaatcataaatattaaaaaggatctagtgtggcaagaattttggcatttgatataggaataagctctattggctgggcatttagcgaaaatgatgagttaaaagattgcggagttaggatttttacaaaggctgaaaatcctaaaacaggagaatccttagccttccaagacgccttgcaagaagtgctagaaaacgccttgctagacgcaaagcaaggctaaatcacttaaaacatttaatcgcaaatgaatttaagttaaattacaaagattatcaaagctttgatgaaagtttagccaaggcctataaaggctctttaattagcccttatgagttaagatttagagctttaaacgagcttttaaataagcaagattttgcaagagtgattttacatattgcaaaaaggcgtggttatgataatataaaaaatagcgataatgaagaaaagagtgagattttaaaagctatcaagcaaaatgaagaaaaactagcaaattatcaaagtgtgggcgagtatctttataaagagtattttcaaaaattcaaagaaaattccaaagaatttataaatgttagaaataaaaaagaaagttatgaacgctgcatagcgcaaagttttttaaaagatgaattaaagcttatttttaaaaaacaaagagaatttggcttttctttttcaaaaaaatttgaagaagaggtgcttagtgtagcattttataaaagggctttaaaagatttttctcatttggtgggaaattgtagtttttttaccgatgaaaaaagagcgccaaaaaattcgcccttagcctttatgtttgtagcgcttacaagaattatcaatcttttaaacaatcttaaaaatactgaaggaattttatatacaaaagatgatttaaacacgcttttgaatgaagttctaaaaaacggcactctaacttataaacaaacaaaaaagcttttgggtttaagtgatgattatgaatttaaaggagaaaaaggaacttattttattgagtttaaaaaatataaagaatttataaaagccctaggtgatcatagtttaagccaagatgatttaaatgaaatagcaaaagatattacccttataaaagatgagattaagcttaaaaaggctttagcaaaatacgatttaaatcaaaatcaaattgatagtttaagcaaattggaatttaaagaccatttaaatataagttttaaagccttaaaacttatcactcctttaatgcttgaaggtaaaaaatacgatgaagcttgtaatgagcttaatttaaaagtagcaatcaatgaagataaaaaagactttttacccgcatttaatgaaacttattataaagatgaggtaactaatcctgtggttttaagggcgattaaagaatacagaaaggtcttaaatgctttacttaaaaaatacggcaaagtgcataaaataaacattgaattagcaagagaagtaggtaaaaatcacagccaaagagctaaaatagaaaaagagcaaaatgaaaactacaaggccaaaaaagacgccgaacttgaatgtgaaaaactaggcttaaaaataaatagtaaaaatattttaaaattaagattatttaaagaacaaaaagaattttgtgcttatagtggggaaaagattaaaattagcgatttgcaagatgaaaaaatgcttgaaattgaccatatttacccttattctagaagttttgatgattcttatatgaataaggttttagtttttaccaagcaaaaccaagaaaaacttaataaaaccccctttgaagcctttggcaatgatagtacaaaatggcagaaaattgaagttttggcaaaaaatttacctgaaaaaaagcaaaaaagaattttagataaaaactataaagacaaagagcaaaaagactttaaagatagaaatctaaacgatactcgctatatcgcaaggcttgttttaaactatactaaagattatttagattttttacctttaagcgatgatgaaaatacaaagttaaacgacacacaaaaaggctcaaaagtgcatgtagaagcaaaaagcggtatgctaacatcggctttaagacacacttggggctttagcactaaggatagaaataatcatcttcatcacgccatcgatgcagtaattattgcttatgcaaacaactctatcgtaaaggctttttcagattttaaaaaagagcaagaaagcaacagtgcagaactttatgcaaaaaaaattagtgaattagattataaaaacaaaaggaagttttttgagccttttagtggttttaggcaaaaggttttagataaaattgatgaaatttttgtctcaaaacctgagagaaaaaagccaagcggagctttacatgaagaaacatttagaaaagaagaagaattctatcaatcatacggcgaaaagaaggagttttaaaagccctagagcttggtaaaatccgcaaagtaaatggtaaaattgttaaaaatggcgatatgtttagagtggatatttttaaacacaaaaagacaaataaattttatgctgtgccaatttatactatggattttgccttaaaagtattgccaaataaagctgtagcacgaagtaaaaaaggtgagataaaagactggattttaatagatgaaaattatgagttttgcttttctttatacaaagatagtttgattttaattcaaactaaagatatgcaagagccagaacttgtttattttaatgcttttacaagctctactgttagtttgattgtttcaaaacacgataataaatttgaaacgctaagcaaaaatcaaaaaatattgtttaaaaatacaaatgaaaaagaagtaatcgcaaaaagcataggaattcaaaatctaaaagtatttgaaaaatacatagtttcagcacttggagaagtgacaaaggctgagtttagacaaagagaagattttaaaaaatgagttacgatgaagcttttaaaacactgctttaaattatggctatgcaatcattagggcttgtattattagagcagtttgcataagtgggcttttgccttggcttggcataaagcacgataatatttataatgcctttgcactttgtgatgatttgatagaagtgtttagagctagtgttgatgattgtgttttagaacttgtgggtgaaagtgagtttttaagcaaagatgataaaagagcattgattggcaatttacaaagtaaaattaattttgatgggcaaaattatcctttaaacagagcgataaatcattatgtggcaaattttaaaaatgctttattgtatgaagatgagctaaagatagtgaaatttgatgattgaagataaatttatgcgcgtgcttttgatgtttgatgtaccaactaaaagtaaaaaagagcaaaaactagcaagtaaatttagaaacaatcttataaaattaggttattttatgctgcaatttagcgtttatatgcgtatttgcaagggtttaagttctgcaaaaagttctattgaaaatgtaaaaaagattttgccaccttatggaaatgtaagggctttaatcatcactgaaaagcagtttgataaaatggaacttttgcttggtggcatagtttttaatgaaaaagttaataacgaaaccaatttaacgctttttgatatagatagtcatggagaatttaaatacaaaaattcaaataatgaagaaatacaactaaacaaaaaacaagaaaaataccatcagcaaaatttatttgaattttaagcggttttaggggattgtaaccccgcagagtcccgcactctttattttagtccctttttaaatttcttgtaaatattgcagcataattttgctatttttcatcaaaaattctcgaaaatctttaaaatttcattatttgataaaggaatattttatcataaaaaatttaaaaagggactaaaaccctagtggattgaaactctgctagggctaattactccactaaaatgaggttgcaaatttgaaacttattgaaatttagggttgattaaaatcgaaataaaattatttaaataattttaaggcataaagataatatccactaaactttcattttctaaaatttcacattcttttggtaccaccataagggcagctttattgttaagattgtttataatcgcactagaaccttctttcttaccttcaagattggctaaaatgcgtccatttttaaactctatattgcaagcgacaaattccaaataaggtgtttttttcttgtaacttccttgtaaaaaggctttgcaaatatagtctttaggttgaagtaaccaagagtttaaaatctctcttgcgtaaagattaaacattaccatagccgagtaaggaaaacctggtaaggcgatgatgaatttttcattagccttagctattttgatatgtctgcctggttttatgtcggctttatcgatgatgatttcatattctttgacggctttttttaaaaagtcaaaatctcccatagaaactccgcccgtcgtaaccaaaatatcacaactttgcaaagcactttcaagggtagaaaaagtggctttttcatcatcttttaaaagaggaaaaacccttgtatcgcaatttaaatttttagctaaattagctatggcgatatgatttgaagagcggatttgagcaggattttccaaggcttctcctagatctttgatctcacttccgctacttaaaacccctacaataggctttataaacacactaatgtgaaaaaatccaagttcagctaaaagagctatctcgctataatttaaccttgtgccttttttgagtaaaatttcatcttttttatagttttctcctaccgcacgcacggcaaaagcttgagaaacttttttttctataaaaagagtatcattttctacgcgtacattttcaatagggactaaagtatcacttccttcactcatgagtgaacctgtaaaggtttttacacaagtgccattttgcacgctaaattgtggcatagtgcccgcaggtgtgaggcctaaaatttttaaaggcttatcttgatcttcaaatttgatcgcataaccatccatagccgaagttggaaattcaggctgatttttaagggcttttatgtcttgagctaaaatgcgtcctaaacactctgtaagagctattttttcaatcttttcataggttttgatatgagagtgtaaaatttttaaactttcttcataagacattagcattttttatccttttaaaagtcctgcaccgcaaagtttggttgatctttctttggcgtaaattctttctttatttatcacatcatacttccaaatgggtgcacttgctttaaaatcttcaacaaattcattaagaagcttaagtcctaattttctttgtttgcttaaaattcctgcaaaataagagctttcatgaactgccacatcgcctatagagtgagcaaaaagcaagctaataccatcaaaatctactcttttttgccactcatcaaaccatttttttaaaagcggttcataaatatcaaaactaagtgcctcaatgcctccttcttcacgcacaataccacaaaaagtcagcaaagcaccgcagtttttattcttggcaaattcataccattggctataaattttaggaatatctaaagaaccttgatagagtgtaaaatgtttcatttaacccccacaaactggtggtaaaagtgctattttatcaccatcttttaacttagtgttttcatcaaaaatgatttcatcgtttaaagatacggcacaaagttctagccattcttttaaactctcatctttttgcaaaatttcttttaattcttttaaattttttacctcaaactctaaattgtctttatttatggggcctaaaaattccacttttaccattttattcctttacttctaaatttcccatcattcctaaatcttcatgttctaaaatatggcaatgatacattctaagtcctttaaaatcttgtttcattctaaatcttaactcttcattaggacgcacatttatagtatctcttaaggctctaaattcagctttttgaacttttccattgagttttgatgagatgagttcaaattgcgtgccgtgtatgtggaaaggatgatccatgtgagatttatttatcactatccagtcttcaactactccaagtttggagcttaaatcaatgcgttttaaatcatagcttttgccattgattaaaaacatagacgcaagagcgatttttaattcgctttcactttttcccatcataccatgcatttgcatatgatcttcactcatgattatttctttaaattccttaggttcttctgaaggtttgaaaatttttaaattttttggaagttctacattttctttttttaggttaatattggctagaaatagggtattaggttcttcttttaccatcattttatccctatcataataagcactttctagcttaaaattcccatcttttggagcgtcgattaaaacttctacacgagaagcaggacttaaaaaaagttcttctttataaatagctttttctataagtccaccatcagtaccaacaagtataaacttagctccttgtatgcgtaaatttaaatatcttgccgcagtagcattataaatgcgtatgcgttcgtttgtggcgagtttgattttaggtttaaattgtccattgatgagtacaaattctccttctctaccatttagccaatcatttaggttgttgtttggaatttgagcgttttcatcaagacgcaaatcgctaatcatcaaatctttttcttttaaatgacttaaagcatctttttttgctttgatcacaaaagcccctgctaaacccataaaaacttgtttagaagtggtataatgagggtgtggatgataccagtaagttcctgcgctatcttgaggaatttcaaaacgatatattctttcttctcctgctaagataggatcatgtgggcttccatcttgatcaggtggcacaggaacgccatgccaatgtatagttgtagcttccttgagtttgtttttgactaaaatttcaagtttatctccttcaaaaacttctatttttggagcaggtactagaccattgtaagtataaaataaggtttttttacctttgataagctctatatgattttctttgatttctagggtagcacgaaaaatatttttttctttactttcatttttgagtaaaggcaaggcttttaaaatttctccttgggggaattgttttggatctaaaagctttaaattttttggagcaaagtttataaaagaagtatctaagtcatgatttatagaatgatttttatgcatggagtgcatatcgtgcataggatttgcataggctacacccatacttgctagagtaagtgtattaaattttaaaaaatttcttctattcattagtttttccttttgcttgattttttgtattatagtcattatttttttagttttagtaaatatttattttgaaaatttggtttaattttgttatgattttagcaatttaatcaaggaaaaataatgttttatgaaaatattcaaaccccagcttatattttagaagaagataaattaagaaaaaattgcgagcttttagcaagtgttggcgaaaaaagtggtgctaaagtgcttttagctttaaaaggttttgctttttcaggagcgatgaaaattgttggagaatacctaaaaggttgtacttgtagcggactttgggaagcaaaatttgctaaagaatacatggataaagaaattcatacttattcacctgcttttaaagaagatgaaataggtgaaatagccagtttatctcatcatatagtgtttaattctttagctcaatttcataaatttcaaagcaaaacacaaaaaaattccttaggtcttcgttgtaatgttgaattttctctagccccaaaagaactttacaatccttgtggaagatactcaagacttggaattcgtgctaaagattttgaaaatgtggatttaaatgctatagaaggacttcattttcacgcactttgtgaagaaagtgctgacgctttagaagctgttttaaaggtctttgaagagaaatttggtaaatggatagggcaaatgaaatgggtgaattttggaggaggacatcacatcactaaaaaaggctatgatgttgaaaaacttattgctttgtgtaaaaatttcagtgataaatacggtgtgcaagtttatcttgaaccaggtgaagcggtgggttggcaaacaggaaatttggtggctagtgtagtagatatcatagaaaatgaaaaacaaattgctattttagatacttcaagcgaagcacatatgccagatactatcatcatgccttatacaagtgaagttttaaatgctagaattttagccacaagagaaaatgaaaaaatttcagacttaaaagaaaacgaattttcctatttgcttactggaaatacttgtttagcaggtgatgtaatgggagaatacgcttttgataaaaagcttaaaatcggcgataaaattgtttttttagatcaaattcattacaccattgtgaaaaacacaacttttaatggtataagacttccaaatctcatgcttttaaatgcaaaaaatgaacttcaaatgataagagaattttcttataaggattattctttaagaaattagtattatttataatttgcataaaatgttaattttactcggaagagaatcaaagatataaattttatgcaaagtattttattttttcaaatataaaatcaacttaaatatctaatttttaatactttggtatgattttttaagattttaaatccttgtggaattttattgaaattcagtgatttttaaatcaaatagtattaagataaatcgatttaaaaatcggctttaaaatgaatattaggtatattttgcataatattcattcaagcaaaatttaaagctatttttgaaaattttgaatgcatggaggctttaatggatttggaaaaattaagattagctagaagtctttattatcaatgtctaggagagctttttgttttttcattttctgaagaaagattgtcaaaattacaagagtatttaaagacaatgcaagaatgtttatttgatgaaaatttaaaatcaaatttcgatatcttgcttaagcatttagatgatgaaaattctatacaagtattttttaaagaatatgatttgctttttttaagtcttaaaaatagcatcccaacgactttttcttacatagaagaaggttttgaaaattcaaatcctttactttgcgtgcgtcaaattttagtcaaaagtaaaataagacgcaatgaaaaattttttaaagaaagtgaagatagtgttggattttgtttattgttgatgagtgaatttttaaggcaaaatgaagatgatttagccaaagaactttttgaaaaagtgatcaataaaaacatcgatgagtttttaggtgatgttttcatgaataaaaatgcgaatttatacaaggaaatttcaagtattgcattggcttttatggaatttgaaagactttgctttgaagtagaaaaacctgtaaaaataaattctaaaaaagtgcaaaacgatctatcgcgttcagaatttttaagaagagaagcaaataaacaaaggaggactcgtgaaaaatcgcagggaatttcttaaaaaatccgcttttgccttaggggctgctggagtgcttggtagtacgactttagctctagctaaagatgaagaaagaaaagatttagttaaaggtaaaagtaagaaaaaagaagtgctttttcaaagaagtgctaattgggaaaattattatataaaggctgagtaatgtcaagtgtaggtgaaaatatcaagcttacgcgtcgttcttttcttaaaatggcagcactttcaagcctagcaacaccgttgcttgctagaagtgaaactttaagagaagcgagtgctgatgagcttaaagaagcgtacgaaggtagtaaaaaagtaaaaacagtttgtacagcctgttctgtaggctgtgggattattgcagaagtgcaaaatggtgtttgggtgcgtcaagaaattgctcaagatcatcctgtgagttcaggtggacattgctgcaagggatctgatatgatcgatatggtgcgttcacatgtgcgtttaaaatatcctatgaaaaaagaaaatggagaatggaaacgtataagttatgagcaagctttaagtgagattggagaaaaactagctgcttatcgtaaagaaaatcctgaaagtgttatgtttttaggttctgcaaaaatgagcaatgaacaagcttattatgtgcgtaaatttgcagcgttttttggaacgaacaatgtagatcatcaagctagaatttgacacagcgcaacagtcgccggtgtggcgaatacatttggttatggcgctatgacaaaccatcttggagacattcaaagaagtaaatgtatcattatcattggggcaaatccagcggtaaatcaccctgtgggttttagacatttcttaaaagcaaaagaaaaaggcgcaaagcttattgttgtagatcctagatttacaaaaagtgcagctaaggcagatatttatgcaagaattcgtccgggaactgacattgctttcatgtatggaatgctaaaaattatctttgatgaaggtttagaagatacaaaatatctcgatgaaagagtttttggaatcgataagattcgtgaagaagcagcaaaatggacagctgaagaagtagaaaatgttacagggatctctaaagaacttttggtgcaaatcactcatgaagtagctaaaaacaaaccaactacgcttatttgggctatgggtttaactcaacatactgtaggaacttcaaatacacgtttagcacctattgtacaaatggtacttggaaatataggtaaatttggcggcggagttaatatcttacgcggacacgataatgttcaaggtgcttcggatatggcttgtttaagcgaaaatttacctggttattatcctttaaatgaagcgacttggagatactatgccaaaatttggggcgtggattatgagtggcttttaggaaattttgtaagtaaagattggatgcataaaaccggactttcacttgctagatggtgggcagcagctttaaatggaaaagatggcaatgatgctatcgataatgcaggaacgcctttaaaagctttagtagttatgggaaatggtatcacttcaaccgcacaacaagctaaggttaaagaaggtttagaagctttagagcttttagttttggctgatccttttgtaaatgaagcagggattatcgcagaaagaaaagatggaatttatcttttacctgcagcaacacagtttgaaacaagcggaagtgtaacagcaacaaatcgtagcggacaatggagatttaaagttgtagatccactttatgaaagcatggaagatcaagaaattttatttgagcttgctaaaaaattaggcttttatgaaaactttaccaagactttacgcgatgaaaaaggtgagatcgtttggcctgaaaatgcaacaagagaaattgcaaaagcagttagaagtatagggcttaatggttggagtcctgaaaggcttaaaaagcatactttatactgggataaatttgatgaggtaactttagaaggaaaagacgaagttgctggcgagtattacgggcttccttggccttgttggagtgataagcacccaggttctcctgtgctttataataccgacattgaagtagcaaaaggtggtatgggctttagaaacaattttggacttgagtatgaaggagagagtttacttgctaaaaatgcacctttaaattcgcctattgatacaggttatccacaaattactaaagataatatagaaaaagttttaggcattactttaagtgctcaagaaaaagaaaaaatgggatcaacttggtcttatgatgatagcaatatcatagcaactaaatgtatagaaaaaggcatagttccttatggaaatgctaaagctagagctgtagtttggacttttaaagataaaattccactccaccgtgagcctttacattctccaagaaacgatttggtgcaaaaatatccaagttttgaagatcaaaaagcactttatcgcgtggatactaaatttgtttctgtgcaacaagctaaggattattctaaagaattcccgcttaatcttgttactgcaagacttgtgaatttaaatggtgcgggtatggaaaatagagcatctatgtatctaacgcgtttaacacctgaaatgttttgtgagatcaatcctgaatta

SEQ ID NO: 3811 - DNA, 22061 bp, synthetic construct
  source 1..22061: mol_type = other DNA
  misc_feature 1..22061: note = Synthetic
taattatgcaaccttcaaaaacttatgagagtttttggcaagagaaaagtaataaagaaaaataattaagtaataaattatgaaagaaagtagggaaaagttaatgtatattgtcataactacaactaataatatagataatgctagaaaactaagtaaagttttgcttaaaaaaaggcttgcagcctgcatccagcaaagtaaaattaaaagttactatatatggcagaataaaaatataaaagataaagaaattttattaatcctaaaaacaaaaaagaataaattaaaagatataaaaaagatttttaaaaaatatcataactataaagttcctgaatttataagcataaaaatagataatgtaagtagttcttacctaaaatggcttaaagacactatctaatctaagtattgtttgataatgctccatttaacaactaaatcttttagcttatatcttgcgtttgctgagctgcttgaaggaagtgtaaatatgtctataaaatattgcttagttagatgtggataaaatctaataagaatcttattagatataatcccattgcaaaatattgcttttatatttggcaaaattggttctaaattgtttggagtgatgttcttaaggctatcatcttttgagtctaaaatctcacatttatatataatatcccataatgcaattttattagttagtaaaaataaagttttggattctattgtcagaagtttagaataacaaaaaatttcttctaaaatattccaaaaacgatttttaggattaccataataaaattctacattcctagatataacagagggaaatgaacccaaaatcaatattttagaattattatcatagattggcaaaaatggatgaattagtctcttatctcccatgaaatatccttatttataaaaaaataattttatcattttataaattattttttagagaatttaaaatatatttaaattagcattatatatattattatataatgctgttaggctagtttttaagcattaaaaaaagttacttaaagtaaaattattgattaaaattatatgttgcaaatatttttaaaaattaaactttagttacaatttatttacatttcattaatttaaatttaagtagggaaaatggctaattcttacatatataacacaataaaagagctaaaagaaatattaaataatgatttaagtatgaattatgagagtgatatttgcattgataattcattacttgtagtaggagatagtgccttaaaagatgagtttataaaagaggctaaagataagtttagtatagaatccgttagttatattgatagctttagtggaaatttaggtagttttaatgtaaaaataaatgaagagattcttaatacctctcaaattgtcttttttaataaatttgatatttataaaccacaacttggaattacttttgcaaatgaatatgaaagtagagattctttaattttagaattagaaaatttaataggagagtttagctacgaaaatacaatactttatagtaaagataaatgtcaatatcatcatagagataaaaatgaattctcatactgcaagtcctgtgtggaagtttgcccaaatatgtcaattagctctaatgatgaaaaaagggaattaatattttcaaatattgattgtattttatgcggtaaatgcgtagcagtatgccctagtggtgcaatggaaaaaacaaatacctcactttataatctaaataaagccataaaattatataaaaataaaataattctaatatgtaataataacaatttagaagaagaggttgataaaatactagcaacttcaagaaaagacatacttccacttcctttgccaaatataaatatgttaaatgaggtgtatcttctatctatactgcaagaaagtgcaaatgtatgtgtaataagtggaaatatagaatctctattaaaagaaagtatagattttataaattatttatatataaaattatttaataaaaaagctatttttagcaatatagatgatattttaaagctatcttctactactttagaacactatagctatgaagtagatagagatgaatttagtagagaaatattttctaatcgcttaaaatactttataaaggataaaaattttggagtaatagaaaatacaaaatcaatcctttatacaaatctaacaatcaaccaagatatttgcacactatgtatgtcctgtgtagaatcttgtaatacaaaagcattaattaattcaaaagataatttctctcttttattaaacccatctatttgcactgcttgtgggtattgtgtagataattgtcctgaaaagtgcatagagatgccattacaaggtgtagagttaaaagaaaacttctttacttataacactatagcaaaagatgagccttttaaatgcgtagagtgtggtaaggtatttgcaagtatgaagtccattgctaaagtaaaatcaatgatagcacctctttttggtaatgacaatgtaagaaaaagaactttagagtgttgcagtgattgtaaagttaaagtaatgtttaaggcttaattatgttaaagaaaaaagaaaactcaaattcaaatataaatgatgcaagaatcttatattatgatttctttgctggattatttatttatgatttactagattacagaagtgaattattattagaacaaattaaaattctaaaacaaattgaagaagatgaaaaaaaagagcattttagtatcatagaatctagtataaaagaatatagcacaaaaaacctactacttgaatatactaatctttttatgctgccttttaatacaaatattaatacaaaaaaagttaatgataaagaagaaagtaatgcagctatgctttatttatcatattatttagatggtagtattgcaggggttggtttaagtatagctaaagagaaagttaaaaaaagtaaaattagactaaatgatgttagttttaaagaaaatgaagaacattttggattcttattgttattttgtaaaaaactactacaaaataaagaattttctttacaaaaagaggttttaaaagagtgtttatatccaatgtataataatatatgtaaaagtttagaacaactcggagaggaatatttatactatcatatttcaattatattaaaagagtttttagactttgagagttcggtaggttaaattgactagagtttttataaaaaggaagattctagtgggtttaacccaaaacatttaagaaggatgaaacatgaatccacggcgaaaatttctaaaaactactgctaaagcaggtgctataacagcggttgctggaatagccattagtgcttgttcttcaaataaatccagcactaaaataactagaggaaagagtaaaaaagaagaggttttataccaaaaaagcccatattgggaagcatactataaagtagcacattaaaaataaggaggatgtatgagcaacaatagacgaactttcttgaagctttctttgcttggttctatggcaggcgtaggtcaagttttaggtagtgatgatacaagagtattaagagatgctacaacaaaagaattaaaagagaattttccaaattctaaaaaaataaaaactatatgcacacattgttctgttggttgtggaattatagctgaagttgtagatggaacttgggtaagacaagaagttgcacaagaccaccctgtttcacaaggagggcattgttgtaaaggtgcagatatgattgatagagtaagaagtgctactcgccttagataccctattgaaaaagtaaatggagtttggcaaaaaactacttgggataactctatggataaaattgctaaaaagttaagtgaagttagagaaaaatatggtcctgatagtgttatgtttattggtagtgcaaaagttagcaatgaacaaagctattatattagaaaatttactgcattttttggaacaaacaatatagatcatcaagctagagtttgacattccccaacagtcgctggtgtggcgaatacttttggatatggtggaatgacaaaccatatagctgatatgatgttctctaagtttatattaataattggagcaaatcctgctgtaaatcaccctgtatcaatggtgcatattttaagggcaaaagaagctggagctaagattgtatgtgttgatcctcattttagcaaaactgcagcaaaagcaaatgaatatgtaagaattagaagtggaactgatgtagctcttgtctatggaatgataaatgtcattgtaaaaaataacttatatgataaaaaatacctacaagagagagtgtatggttatgaagaaatatttaaagaagcacaaaaatatccaccagagcttgtagcagacataacaggcattccttctgatacaataataagacttgcaaaagaaatggcaaaagcaaaacctgcaagcctaatttggaatcagggactaacacaacataccgttggaacaaacaatactagaataatgccaatcttacaaatgatattaggcaatataggcaaaagaggtggtggtgtaaatatattaagagggcacgacaatgttcaaggtgcaagtgatatgaacaatctatcagattctcttccgggatattatggcttaggagaaggtccttggagacatttttgcaaacattggtatgtagattatgaatggatgaaaagtagatttaaaagtaaggaaatgatggaaaaaacaggatatgctttatctacttggagatttggtgtattagatgaggaaaactatgcaaataacggagatacccaaattaaagcaatgattgtaattggtaatggaatctcaactactacattgctagataaaacaaaagaagcactagataaacttgaattattagttttcattgacccttatgttaatgatgtagctgtaataactgatagaaaagataacctattcttacttcctgctgcttcacaaatggaaacaagtggttctgtggcttctacaaatagaggctatcaatggagatatcaagtaattaaacctatgtttgagtgtagagaagaccacgagatactatttgatttagcagaaagacttggttttaaagaaaaatatcaaagagctttatatgaaaatgctaagaaagatggacgaactgaatttatttggcctgatgatgcaacaacagaaatggcacaaagtattagaagcataggattacaaggacttagtgcaaaaagattaaaagagcattgtgataattggcatatgtttgatagcattacacttgagggaaaaggtcctatgaaagggcaatattatgcactaccttggccttgctggagtgaaaaacatcctggaactccaataatgtatgctgatgatatacctgttatgaaaggtggtatgggctttagagttaattgggggctaaatgcaccagatggaactaatatgttaagcaatagagggcttccaaattctaaaattaaaggacatcctgcaattagtgctgaaaatatagaagatgtgcttggaataaaattaactaaagaagaaaaagagattgtaaaaggcacaacttttgccactgataacagcaatatattagtttctaaagcattagaagcaggaatatgcccttatggcaatggaaaagctagaatgatagtttggaattggtatgacaagattccaatacatagagaacctctacatagctttaggaatgatttaattgataaatacccaagtttcccagataaaaaagataactttagagcaaatataaaatatatttcaagacaaaaagaaaaagattggaaaagtgaattcccgctcaatatgctaacaggaaggctagtggcacatatgggaacaggaacagaaactagaagtgcgaaatacttagctgaagtgcaaggcgaaatgtttgttgaaattcaccctgatacagcattaaaccttggtattagagatggagatatggtatgggttcatggaacatcatacactaagattctagttaaagctagacattcttatcgtgtaaatgaagattgtgtattcttgccacaaaatttctctggagtatattctggtaaaagcctacttgatttataccctgaaggaactaaaccttatgcaataggtgaagctgcaagtttagtaactagttatggatttgattataatactgcttgtccagagacaaaatgcggtctatgcagaattgaaaaagcttaaaggaggattaaatgagtgaaactacattagggggctttaacgcccaaaaccacgctagaattaaattctattgcgatgagcttagatgtatagactgccacggctgtgatgtagcctgtaaagaagcacatcacttacctgttggagtaaatagaagaagagttatatctataaatgatggcattgtaggaaaagaaaaatctatctcgattgcttgtatgcactgctctgatgcaccatgtgcacaagtatgtcctgttgattgcttttatattagggctgatggaattgtcttacacgataaaaagacctgcataggatgtggatactgcctatatgcctgtccttttggagcaccacaatttccaaaatcagatgtatttggttctcgtggggctatggataaatgcacattctgtgctggaggacctgaagaaacacacagcaaagaagaatatgatttatatgggcaaaatagaattgctgaaggaaaagtccctgcatgtgctgcaatgtgttctacaaaagcattaatagctggtaatagcgatgaggtaagcactattattagaactagagtttttaaaaaagggcaaaatgctaacacttcatcatatatgtggagtgcggcatataaggaataaaaatgaaattaataaaattaatattaatagcttttttatgtctatcgtgggtaaaagctttagattatgttgctttagattcttctttagaagaatctaaagggattcatatagaagatgattctaaagatagagaaaactttaataaagttaataagcatatatatggtaaaaatcaaattgaagcaattaaaaattgggggattgatacaatcagtgcaggtgtatcactaggaaataatctaaactttgaaggtggcagtattgatcctatgacaagtggagaaaaaatcaaaggaataagaggcttaaatggtttaggagaattatttacaatattacaaaataaatactttagtctagtattttttattttaattataatcgtgccactagcattttttggacattttataatagtaggacaaaggaaatttaaccaccatcaaaaactacaagttttttcaaaatttaacattatagtgcattggggtgctgccataccatttgtattaatatgcttaacggggcttattatggtatttggttcatatcttggaggtggtatttttgtaagacttgcaagagatttgcacggattagcaacaattatatttattatatttggcttaatgatgttttcaatgtggtttaaggaagcattgtttaaaaaatatgatattgattggtttaaaataatgggaggatacctaagccaagaaaataaacctatacctgctggcaagtttaatgctggacaaaaaatgtggttttggatagctacacttggtggcggtgctatggcactcacaggggcagttatgttctttcaatgtgctgatataaatactttgcgtttaatggcaatacttcataacttaattggttttatgataattgctatgttaattactcatatttatatgagtttatttgcaatagagggagcaatagaatctatcataaatggtaaaatgggcgaagaagaattgtctattttacatagcatttactataaagaattagttgattctaaaaaaatagatagtatgagagtttaattgctgttaaataaatttactatacaagtcccaattgcaaaaataaataatgatgatattatcatcaaaaatgatattatcatcaaagaagaaagagttagcttttacctaaatggcaataaaataatttctacaatgtgtcttccaaacgagcaggatttccacatagtaggttttttgatgaatgaaggagttttagaatctattgatgatataaattctattaaaatctcaaaagatggtttaagcgtttatttaaatgcgaaaataaatgaagataatatatcgaacttatactatgaaaaaacccttacatctggctgttgtgttggtgtgagtgctaattttgaaggaaaaattgtagaaaagtttatatcatccaaaattagttttagtatcgataaaataaaatctattatagaagaatttgattataatagtaagctttttaatctcacaggttgcgtacataaagtagctattatttgtgataataaaaagtttataagtgaagatatagggagacataatgctgttgataaggcaataggaaaggcaaggttaaaaaaagctaatctaaataatgccattctaattgtaagtggaagactctcaatggaaatggtaataaaatgtgctatgagtgatattcctgtggtaatatcaagagctgcaactactgccctaggagtaaaaagtgcccaaaaattaggtattacattaattggttttgctagaaatgggaattttaatatatatacacataaaagcagaatcttaacttaaaaattgtatattgttatagatattacaagatacttaaggagaggtaatatgaaaattttgggttttgatatagggatagcaagcgttggttgggcttatgtggaggagaatgaattaagagattgtggggtgagaatcttcaccaaagccgaaaattcaacaggagaatctctagccctaccacgtagagaggcacgagggacaaggaggaggctaaaacgtagaaagcaaaggctaaatgaactaaaaaggctgctttgcaagcagtttaacttcaatctaaatgattattgtagcaatgatggggagctagcaaaggcttaccaaacgaccaaagacaccaaaagcccttatgaactccgcgccctagccctagagcagaagctagattctaaagacttagtgcgtgtgattttacacattgctaaacatcgtggctatgggaataaacacgcaaagcgagacttagaagcagaggagaaaattaaagcaaaaatagaaaaagaagaccaagaaatcacgcaaaaagccacacaagaaaaacaatccaccacaacaaagggagattcaaaaaaagagcaagagcaagtattaaaggcactttatcgcaatgaaacagcacttaagcattatcaaactgtgggtcaatatttctataaagaatttaaagaaaaggggcaaaggatacgcaatacaaccaataattatcagcatacaatgcgacaggattggctaaagaaagagttagagcttatttttgaaaaacaaaaagagtttggcgcgaagtttagtgagggatttgaaaataaaattatagaaatcgcattttttcaaagggatttaaaaagctttgaggataaagtaggtcaatgcacattttatcccaatgagcctcgcgcccctaaagattctctaagtgcgatagagtttgttacgcttacgcgcattattaacacattaaaaaatcttgaagaaaaaagtaagaatcttggtattggcgaagtgtatggcaaagacaaaataaaagagattctaaacatcgtgctagataaaggcgagataagctacaagaaattgcgtgagattctagggcttaatgagcaaatcacatttaaagataataagcttgattacgcaaaagatatgaaagaagagcaaaaggtaaaattgattgaatttaagaatctaaaggactttaaaaaggcaataggagggagcttccaagcttttgggagctttgaaacttttgatagaaaagaattagacttgatagccacagatattgccgttattaagagtagagaaaatctagcaaagaaacttgaaaattatccctccctcacacaagagcaaagagaatctctaagtgagcttaatttttcaaaacatatcaatttaagccttagggcattggagaaaatcctgccctttatgagagagggcttgcgttataatgaggcggtagaaaaggcgggattacaagagcatagaaaacataagcaaaagagtgattttctacccccactacaagattatgaaccctatcttgcaaatcctgtagtagagagggctttgagtgaatatcgcaaggtgctaaatgccctgcttagaaaatatggacaagtgcataagattcacctagaatttacgcgtgaggcaaaactaagtagcaaagaaaggcaaaaatatgaaaaagagcaaagagagaattttgcaagaaatcaggaggcagaaaagcaatgtgaggctattggactgcctcttaatgacgcaaaaaatatccttaagatgaaactttggatagagcaaaggcaactttgtgcttatagcggagaaaaaatcacgatagagcatttaaaagattccacaatgctagaaattgaccatatctacccttattctcgtagttatgatgatagctacaataataaggtgctttgtttagctagagaaaatcaaaacaaaggcaatcacacgccttttgaagcctttggtaaagacacagaaaaatgggataggattctaagcctagcaagcaagctccctaagccaaaatatcgtagaatctctaacaagcaatttaaagataaagaagcgggatttcttgcaagaaatattgttgatacaagctatattgcaagattagcaagtgaatacaccaagcattcattaaatttcctgcccctaagtgaagatgaagtgatgattacgggagaaaaggatagcaaaaagcatgtcgaggtagtaagcggaagcttgacagcaacgcttaggcattattggggcttagggggtaaaaatggggataaagatagggataatcacctccaccacgtagtcgatgcaatcattattgcctatacgaatgcaaaagttatcaaggcattttcagactttagaaagcttcaagaacaaaatagggcgaaattctatgctaaagagattgctcaatctaaagataaaaccaaaaaaggatttgagccgccctgtgaaaactttagaaataaaatccaagaaaaagtggattctatctttgtctctaagccaccacgaaagagggctagaggagcattgcacgaagagactttttattctttaaatgacgcttctttgctaaagtcttatggcggacaagagggagtgcaaagggcattagagctagggaaaatccgccgcattggcacaaaggttgttagcaatggagagatgaagcgagtagatatttttaaagacaaaaagggtaaattctatggagtgcctatttatacgatggattttgcattaggcattttgcctaataaagcagtcataagtggtaaaaaagatggtgttatcaaggattggctagaaatggattctaattatgaattttgctttagtctctttaaagatgatttgattttggtgcaaaaaagtgaaatggaagagccagagttatgctattatgtggggtttgattcctgtagtcccagaattattgttgataaacataataagtgttataaaaatatgagtgataatgagaaaaaattatttacgctaaaagaaagagaaagaaacaataaaaaagaagaacaaaaacaagatgatgaaaataaggagcaaaaaataattggcggaagattgggtattcaaaacctcaaaacctttaaaaaatatcaagtctcgccgctaggagaagttaaagaagtagggaaagaaacaagacaagccattgctttaaaatctactaagcacattaagcaagactaaggagggagctaatgtttgatactgcttttcgcacgctctttcttagcactcccgctaagctaagtctagcagataaacatctatgtatcactaaagaaagtgatgagataaaaattcccctatctgatattttatgtatcattttagaatctcatcaaatcaccttgactaatgccctcatcaacgcccttgccttaaataagattatcgtttatacctgtgatagctcccatttgcctagtggaatctttatgccatttttggggcattataaaagctctagggttttagaaacgcagctaaagacctcaaaacaacaaaaatcaatactatggcagcaaatcatcaaggcaaagattgacaatcaagcaagattcttagcaatgctcaataaagcagaagtaagcacattacaatcccttgcaaaaagcgtgtatttaggggattctagtaataatgaagctaaggcagcggcgatttattttaaggctctttttggcagagatttctctaggaaaacccaaatatttgaggataaaaatatcggcgttatcaatgccgcacttaattatggctatgcgattgtgagaggagcgattgtgcgaagcctgtgtgcaagtgggcttaatcctgctcttggcatatttcacgctaatcaatttaatccctttaatctcgctgatgacttgatagagccttatagaatctttgtggattcccttgtagaaaagataagaaagctcggtgaattggacgaaaatctctccttagaaaatcgcttggaactcgcagagattcttagcacacaagtctgcataggagaaaaatactatccactttatcgggcagtaatagcaagcgtgcaaagcctattaaatgcgataggcaaaaatgtggcattagccctaccctgctttgaaaaggataaatctaatggaagagaaatttatgagagtgctagtgatgtttgatatgccgacaagcacaaaagaggacagaaaggcttgcacgcagtttcgcacaaagctcatcaaagagggctttatgatgctacaatttagcgtctatatgagaatctgcaagggcgtggcaagtgccaatagccatttggataggctggatttgattctgccgcctaaggggcatatcagggcgctcatactcactgaaaaacaatttgataatatgcgacttttgctaggcaaaagaagtgaaaatgagaaagccaataaaccaagacaactaacacttttttaggtgatgtttttagctaaaacttgttaatgatgagtgatttaaatgataggttttgataatattttttactgacactttttagctaacacttttttggatagcatttgttagctaacacttttttaggtgatagtatttaagataatgcttattgatgataaagtgatttttagctaaaacttgtttaactgatattttttaaatgatatgttttcacctttttaactaaaacttttaggtgataaatgcttttaactgacaccttttattagagatgataaatgtttttagctagtgtttttaggtgataaatgctttttaactaatattttttaacgatgaatatttttagatgatatttctagctagtgttttttactgacactttttagatgatatttttagatagattcttagctggtatttttagatgatgaatgattttttagctaatgtttaaaagcaaattccctctgtctatccaaatgctgtgccttaccaagccttatttttgtgatttgtttgtaatttagctttgcataaatgctatttaaaaatattatttatgccctatcttttttatcaatatcaatttattagcaatataaaactctttaaattaaatatttcaatttgatgggagagcattgataataatcaatggaaattgataataacttgcctgataaaaagaatcttaataaaaaagtttgcaaaaaaatttgatagaaaaggcttaacaaaaataggaagtataatttgatagtctatatttagattaaagtagaaaatcatattaaatagaaaatatcatatcaaatttaaggtagaaaaaagtagaaaatcggttgggcatcttatgccctgggtatgttgtaaagccctaaagggtttatacacagaaacctgcgggagaccgataaactcccttattttagccacttattaaattctttagaggaattatatcctagtttttcttaaaaaactaccctcttaatatttacgacctctacaatcgcttgaaatatcctaaaacacgctattttaagctagtctattttagcataaaagaatttaataagtggctaaaacaatactagtaaaacaaataatgtatatttaattttagcataaaagaatttaataagtggctaaaactcaagtcgatcttctgtgaagtccataagtattttagcataaaagaatttaataagtggctaaaacacaaatcctcttttaatcgacgaaacaaaattttagcataaaagaatttaataagtggctaaaactttaaaattttttactaaaaccttattctcattttagcataaaagaatttaataagtggctaaaactttaatttcttacaaaaaagtatgcaaggtattttagcataaaagaatttaataagtggctaaaacaacaaaataaaactttaaaaaaatgtatcaattttagcataaaagaatttaataagtggctaaaactaaagctttttgttagctaaccttgtaactattttagcataaaagaatttaataagtggctaaaacctgtaagcatagaagctattgttggtaaaaattttagcataaaagaatttaataagtggctaaaactatgctttaggacagctttcaattatagtaattttagcataaaagaatttaataagtggctaaaacaaagcttgatgatagctttattttaagcttattttagcataaaagaatttaataagtggctaaaactaaaaaagcaaaatgcagcggggggatgatattttagcataaaagaatttaataagtggctaaaactacttttatgctattttaaaatcattgtttattttagcataaaagaatttaataagtggctaaaactaaatctactagcttaatatgtccagcataattttagcataaaagaatttaataagtggctaaaacctaaagaattaataaaaatatgcaaactaattttagcataaaagaatttaataagtggctaaaacatatgcaaatataaaaagtaataatcatttattttagcataaaagaatttaataagtggctaaaacttatttgtgatgtatcttttatttatttctattttagcataaaagaatttaataagtggctaaaactaaatctactagcttaatatgtccagcataattttagcataaaagaatttaataagtggctaaaacctaaagaattaataaaaatatgcaaactaattttagcataaaagaatttaataagtggctaaaacccactgccatacattagactcatcttggttattttagcataaaagaatttaataagtggctaaaactttgtaatttatcattgcctctaaaaagataattttagcataaaagaatttaataagtggctaaaaccttatcatcacaaatatataaaatatattcattttagcataaaagaatttaataagtggctaaaacagagatagggttcttgcgtgtaataatatgattttagcataaaagaatttaataagtggctaaaactttacaccgattacatcccaatgttgtgtcattttagcataaaagaatttaataagtggctaaaacttagccatagcacaaagctcataaaaagtaattttagcataaaagaatttaataagtggctaaaacaaatatcatacaaattagcttaccacttaaactacactaaagtaaattgctaaagatgttagaataaatcctaaaccaaatgctattaatgcctcttttctctttcgcttacaaaatgaggtcataataagcccagatagataaaaaagcattaatgatatagcaaaaccaatagcaataatatcaaagtaataagcaccttttgctttatgcattaaaagcaagattccatataatcctctatctattacacgaacctgtggctctccttgtttattcttaacaatagaggcactatacttcatactacccatagtggggcttcctctttgaatttttacttcagtattttttggaatttttaaattattatcttgcaatacttttataataaattctttttcttttcctgctttaggtggctctttaatactaaattcatatatacttgcacctgcattctctttaatatcaaatatatatccaacacctgtaattacataaattacacaagcaggcaaaaaaaacaagcttaaatatgtatgtatttgcatccaatttttattagtcattataaactttcccaaaaaccttctccttaaaaattataattaattaaattataaaataatgattgtgaaatgaatgtgaaattcatctcactataatgttatgtattttaaaaatctgctttaaatgttagccaatagcttctgctaggaagtattctttgataagaattaatataattttgattattgccattttgatatagcacataatcttcaaaatttacatcaagtaaattgtttatagcaaatgtaaagctgtaattctctaagaatctataagttgcccctaagtctagcaaatgataatctttataatattttccgacaacacttctagcacttgtgtttcttagactataagaagttggtgttttaaagtttcccgtccatcgtaaatatatatcaaaatattcatatctatatgaaggtttgattgtaaatttatgtctagctatattattaacaggagaacctttagggacaaaattattacctgttcctgtatctcttagtgtttgtgtatgtgtaaagccatagctcatatcaagcccaaagccatatattggctttagttttaatgctgcctctgcgccagccattaaagatttgtcaatattacgataagttttacaattattttcatttgtgcattcactatctgtaaaagcaatagcctcaatttgatctctaaagtcagtataaaatcctgttagtgtaataaatactggatttaaatcaaatatagtgctaaattcatagttatagctctgctctggctttaaatccttattaccaaaagttcctctctgactagcatcaaaagtccaaccatcataaagatatgcaagattaggagctctaactccacttgtaacacctaatttaaaagttaaaaaatttgttggatttacattaatatagaatcttggatttggtattgctgtataaatatcactataattatatcttaagcccaaagtagtgctaagatactcaaatgggatatattcaccctctgcaaaaatagatacttcattcatgtggcgagaaaattttgtgcttttattaataagctgctcatatagataattaagccctccattgaagactaaaactccataatcttcaaagtcaaagcttctattatatgtgctatttaagattatatctttattatctctcttagaattccaatttagagagcttcctttagagccaccaataggaatattagtgtgtggtgcccaaaatgtttgtgagtattgaatatagcttgttaaattaccccaattataatttgcactatgatttaatacagaattgattttataaaagtctctaattgcagttatttgattaactgaagtatttagagagcctgtccttgcaaagtaagtctctgcgtctaaataaatattattattttcattaatagtccaatttagcctacctcctgcattccaattttgaaagcccgtagcagaccaagtcgtatatggatttatatgttgcggactaccaaccatattatttcttaaagattctggctttaagaaagcattttgaccaccatacttatagccacctctaacattaaatgataaaactttctctataataggagcactaatataaccatttatcccataaatattaccaaaagttttataatgctctgccaatcttgtttctagctgaactccacctgtgattttatctacatttttctttgtaataatatttataacaccacccattgcgtcacttccatatattaatgatgcaggaccacgtataacctctatcctatcaatcatacttggagggggcataaagctagtaaatgttccactaaatccatttgcatcaaagccttgagcgacattttgtctcttaccatctatcaaaattaaagtataaccagaatctaaacccctcattgagatagtatttccgcctgtctttcctgcctctacataaactccgggaatatcttgcacaacatcacctaaatccctaataggacgagttaatatctcttctttagggataacactaatacttgctggagcatttttaatcttttgttcatatccacttgcagaaactacactctcacctatatacacctcttctaaatcttctgcatttaaaataccaataaataaaatactaaataaaaatagattaaaaaacataattttaattcctctcaaaataatataaaaattgagaatggatattaatattataaaaattaaagaaggcttaatattaagaattgttattaatatttaacaaaacgaaataatatcttattaaatatttattaaagtaggtttattttttgctaattttacttgtaagaaaaaatattgctagaagtataataaccccaaatattgggaatatataaggattgctatcataagtttttttaataaaatctcccataacatagctaagaactccaactaaaattgcccatataaatgaagcaaaaaaattatatatcataaatttattattactatatttactaatgccaattaccataggaacaattgtcttaattccataaacatatttatgaatgaaaataattataaagtcatatttttttatccaaatactaattaatgcaatttttcttttatggttttttaggtatttcataacttcagctttttgatacctagatatataaaaaagcacactagagccaattaaatttgctgttcctgctacaaaaatacaaagataaatatttaatgaatttatagattctatcactccactagataatattcctgctgctaaaagtgctataaatcctcccccaagagaataaaaaaataatattatataaccccatacaccgatagacccacttagattttgcaagatttcttccaaagtattccttgataatttaaatactagattctagcataaagctaaaataactcataataataaatatatcattattttggaataaatcttgctttaaaattatcaaagtttaattaggataatttatatggaaaatggtttctacaacgctaccggtggaatggttacacaatttaatagacttgatgtaatctcaaacaacctagcaaatacaaatactaatggctttaaaagagatgatgttgtaattggtgattttatgagattatatgaagaatacaaacacgaattacctctcaaaaatcacacaagagaagcagcaaagtttctaaaccgcacactaaatcgcgttcctattgtggtagaagaatatagcgatataagtattggaggattcgctaagactgaaaatccacttgatttagcactaaataataaaaatgctttttttgcaattcaaactccaaatggagtaagatatacgcgagatggtgctttcacaatagataataatggcattttagttacaaaacaaggctatcctgttttatcaaaagagggtatagatgaagagggatttataacaattgatgcttcaaataacaacttggaagtaagcaaaaatggagatatattcattagaaatctaagcaatgagaacataggtaatccagaaccaataggaaatattgcaatagtaaattttatcaatccaaaattccttaaaaaagtaggttctaatctctacgaacttccacaagatagaattaatgagagacaaaatataaatgataataatgcaatactaagtggttttattgaaaaaagtaatattaatcctgttattgaaatgacagcattaattagcacaaatagacttgtagatatttattctaaagtaatgaaaacatatcaagatgacctagctactgaagctataaataaactagcacaaaatagagcataataaaacaaaaggagttaattatgattagagcattatatactgcttcaacaggaatgattggaatgcaaacacaggttgatacaacctcaaacaatatagcaaatgttagcaccataggctataaaaagcaaagagcagaatttgcagatttattttatcaaactatgcaatatgcagggacttctactagtgaaactaccattgcaccaacaggtattgaaataggacttggagtaagacctatatctattgcaaaacatttctcacaaggaagcccaaaagaaactgaaaataacctagatattgcaataacaggaaaaggattctttcaaatagaacttccagatgggacaatagcatacactagaaatggaagttttaagcttgataatgaagggaatatcgtaaatagcgagggttatagactaatcccaaatatcaccattccagaagatgcaacaaagataaatattggcacagatgggactattagcgttgtacaagcaaactctaccgagctaaatactctagggcagattgaaacaactacttttataaaccctgcaggattacactctatgggagacaatctatatattaatacaaatgcttcgggtgagcctataaatggcattccggggactgaaggatttggaatgctaaggcagggatttattgaaatgagtaatgtgaagttagtagaagaaatggtagatttaatcacaggacaaagagcttatgaggcaaactctaagacaatacaaactgcagattctatgcttcagacaataaattcattaaaaagagcttaaattaaatttaaatctaacactataaaacttaatatttattattaagttttaattaatgtttaatattaaaatattttttaagcttgattatgatagctttacatttataaatcatttacttttaatgattatgaaatatcttaagctaaggaggatttaaaatgagagcaatattcttactattagtattttttagtggctatatctatgcctatccctttatctgcttccaagatataggcaagagtttctattatagtaaaaaagataagaaaacgatatataggtatcaacattgcttaagtcagaaagattttcaaaaagttgctatatgcgtacatgcaataacaggaaaaagcaatggtaaagatggcacaatgtgtgagaggaattttaattcaaaaaccggggtagctgatccaggtggctgggtatatgagcctgattataatcttattaatggtaaatggactgtaaactggcaaggctgtagagatatgtatggacctgctggtataataaataatgtggctatacctgcagcaggaagagtggtccattataaaaaggaaactttacttcaccaggatagttgtcttcaaggagggaaaatacctgtaaaagcttcgcccgtaactccaccacctaagcctacgccaccaccaactcctactaaattaatcattaaagatgaatttgcaaatgaggatataactaaaattcataccaaaatttcaggtaattctgcagtatttcatatatttaaagaaaatagtcataacagacttggatcgggatt

SEQ ID NO: 3812 - DNA, 22019 bp, synthetic construct
  variation 9893..9907: note = note, n is a, c, g, or t
  variation 4541..4569: note = note, n is a, c, g, or t
  source 1..22019: mol_type = other DNA
  misc_feature 1..22019: note = Synthetic
gctaaaatagaaaaaattctttatactccaggtttgccaaaaactagaagtggtaaaataatgagaagaattttaagaactatagcaagaggtgaagaaatcaaacaggatatttcaacacttgaagattctaaagtagtagaaaccattgttaaattagctaaggcagagtttgaataacaaggtaaaaagaactttgcctagttgcatgaaaattcataaaaataagctataatgataaaaaaataaaaggaaatttttatgcttcaaacttgtattttccctgcggcaggttatgggacgagatttttacctgcaacaaaaactttacctaaagagatgttacctatcttaaccaagcctttgatccattatggagttgatgaagctttagaagcaggaatggaaaatatgggatttgtcacagggcgtggaaaaagagctttggaggattattttgatatttcttatgaacttgaacatcaaatttcaggtacaaaaaaagaatacttacttgatgaaattcgctctttgatcaatcgttgtacctttacttttacaagacaaaatcaaatgaaaggcttaggtgatgcggttttaaaaggtagacctttggttggcgatgaagcttttggcgtaattttggctgatgatttgtgtgttaatgaagaaggcttaaatgttatggctcaaatggtaaaaatttatgaaaaatatcgctgcaccatcatagctgtgatggaagtaccaaaagagcaagtttcaaactatggagtaatttctggaaattttgtagaagaaaatcttatcatggttaattctatgatagaaaaaccaagtcctgatgaagctccaagtaatcttgctatcataggaagatatattttaactcctgatatttttggaattttagaaaatactaaagcgggaaaaaatggtgaagtccaacttaccgacgcgcttttaactcaagcaaccaatagtatggttttagcttataaatttcaaggaaaacgctttgactgtggaagtgtagaaggctttgtagaagcgacaaattatttttacgagaaaagtaaatgttaaacaatacacttttttttaagcaaagtgaaattcacactataagttcttatgcaaatcgtattaatgatgaggtaaaaagtggagatatagggtattatcatcttattgatacaagtttgaatttaatcgatgagagtttggcttttatcaaagacaaagaatacataaaaaatatcgttttagtgggaatgggtggttcaagttgtggtgtaaaagccttgcgtgatatgctttttaatgaaaaaagcaaccaaagagaactttttatactcgataacacaagttcacattcttttaataagactttagaaaaaatcaagcttgaggaaagtttgtttttaatcatcagcaaaacaggtagtactatagaagttgtatcgctttttaaacttcttattgagtattttaaacttgatatgcaagaattaaaaaaatactttgtttttattaccgataaggattcaaaacttcatcaagaaggtgaaaatttaggtattaaatgcttttttatccctgtaaatgtaggaggtcgttttagcatactttcagctgtaggtatagttccactttgtttttgtggctataatgccaaagctcttttagaaggagctaaagcttgttttgaagatttttttactcataaaaaagatgaaattttacaaaaagcctatcattattgcacacacaaaaatgccaatatcaatgtacttttttcatatagcgatgcttttaaaggctttaatgaatggtatatccagcttattgctgaaagtttaggtaaaaagcaaggctataaacgcataggtttaactcctattgcactcattggagcaagagatcagcatagttttttacaactcattatggatggacctaaaaataaaactgtaacttttttaaaaatcaaagacgctcaaaaagcacctattatccctgatattcattttaaatttttagattctttaagcaataaagtcaatcttcacgaacttttaaacgctcaatgtgatgcaactatgcacgctttaatcgctgaaaatttgagtgttgatgtgatagaacttgaaaaacttgacgcttggcatgcgggatatttgatgtattattatgaactttttacttcaacttgcggtgttatgttagggattaacacttatgatcaacctggtgtggaagttggaaagttgatcttaaaaaatatattaaattcttaatcaaaattcattaaaaaagagtataatgattttaaattaaaattataataaaaatttttaattaataataattattatttaagaattttatgttataattttaaaaattaaaaaaaggagtcaatcatgtcagttacaaaacaattattacaaatgcaagcagatgctcatcatctatgggttaaatttcataattatcactggaatgtaaaaggtttgcaatttttttctatacacgagtacacagaaaaagcttatgaagaaatggcagaactttttgatagttgtgctgaaagagttttacaacttggcgaaaaagctatcacttgccaaaaagttttaatggaaaatgcaaaaagtccaaaagttgcaaaagattgctttactccgcttgaagtcatagaactgatcaaacaagattatgaatatcttttagcagaatttaaaaaactcaatgaagcagcagaaaaagaaagtgataccacaacagctgcttttgcgcaagaaaatatcgcaaaatatgaaaaaagtctttggatgataggcgctactttacaaggtgcttgcaaaatgtaatttaaggggctttatgccccaattatacaaactaggttataatatccttttttaaaggataaaattgaaagtacttaattttttttatgaaaaccaccctaaatttgaagtaagttatgaaagaaaaaatcaaatttcaaaaccaaatattatcataaaaggcccacgattttgtggtaaaaaaacacttatttttaattttttatctcaatttaaagcaagtgaaattttgtttttagatttatatgatacacgctttgaaaaacaaagtttagaaagacttgctgattttttgaatgaaaatttacaaattaaaattctttgcctttataatttggattttatccctaatttagaaaaaattaaaattcccatcatcttaagtacaaatataaaagatttaaatataaatgggtttgaagaacttgaacttgattattttgattttgaagaatttattagtgtaagtaagaaaaatttacctataaataatttagtaggtctttttttgcaaagtggacgcagtaaatttggagaaaaaaacatacttctaagacaaagctttactcttttagaattagaaattttaaagtatttagctttaaatttgggtcagcaaatcagtatttctaagatatttatacaacttaaaaaaatattaaaaacttcaaaagatagtgtttatcaggctataaaaaaattagaaaatacttatgtgatctatactttaaaacatgatgaaaaaaaacttcaaaagatttattttaaagattttggcctaagaaataatctttgtatttcaaaggatttttcacatttatttgaaaatttagttttaagtgagttatttaaatttaaagaagaatttttttataacaaatactttaacttttatagccaaatatctaaaattgcttatatttcaagtccaactttagatattgatttgattaaattacgtgctaagaaaattttaccaaaggctttagaacttggaatttttcatgtgatttttatcactctttcaagtgaggatagtttttttgaacaaggggttaaatttgaagtcatatcttttgataaattttcacttggattttaggtgttgtttgagtttgtatcgtatttttcaaggttgtatcgtttgatgatttttgtaataagattgatataatatcccttgcgttcagaataagaatctaaagttttaatagcctctagtcctgttatctctttgccttcgcttgcaaatttagctcttgcatcgcgaaacttttcataagcaaaatgacgatttaaatttaaaacataagagtaaacactatcttgcagactatcaaaaatcttaattttatgttttttatctggatgtcttaaatcaggaattaaacctttctcaccccaagtccattctccaaaaagattatttgcttctcttgcgaagcgacttgtacctgtagcactttcaactaaagcttgggctatacccatggattttggaattttttgaatacgttttttatattctgcaaaatcataaagattttcaatgcgatatttgttttttatcgtgataagtttttcaagatttgtttgatttgaagtcctaaagcctgttttgtaagcatctttaaaaaaggcttcaataaaagctctttcttgttnnnnnnnnnnnnnnnnnnnnnnnnnnnnncaaaatcataaagattttcaatacgatatttgttttttatcatgataagtttttcaagatttatttggtttgaagtcctaaagcctgttttgtaagcatctttaaaaaaggcttcgataaaagctctttcttgttcaatttttttaaagctttgatcaaacatttcattcatttttataaaaaaaatttgtcttttttgatctatatcaagtttgtaatattcctctccaaagccattttttagatcatcagcaaaaagtgggattagaaaaagactaagaaaaattataattggcttcaaaacaatactttacctttccttcaaaaaacaattcttcatttttatatgtaaacccaacctcttcaccacttttaggagttattttaactttattttgtacttttttatttaaaaatgccagataaaaacaagcccccattcctgtgccacaagctaaggtttcatcttcaactccgcgttcatacgtacgaacttttaaatgattttcatctaaaatttttacaaaattaacattggcattatatttttgtctcattttttgacaaagtattgtatcaaattcatctaaattttgacaaaaatgcactagatgtggaactccagtgtcgcaaagttgccaagtttttcctaattcttcaaaagtattttgcacgctttttattttgcctaaagatacttcaactttatcttgatttacctttgcttttattattcctgcaccggttaaaaaactcatgttaggatttattttgttaatatgatgtgcaaaatgtgccgcagcccttgagccattgccacacatagcagcccttgagccatcgttattataaaattcccattcaaagtcgtatttttcatgaggcaatatcacgataaagccatccccacctatgccctcataacgattgcaaagttctttagctaaagtacttctatcttcttttctatcagcatttgttatgacaaaatcattcccacttgcacaatatttataaaatttcacatttttcctttggaaatttcttgtattactttaacacattcttgcctaaaatcggcataagaattagtatttttaatgataaaatctgcttttttaagtttttcttcaatatctatttgagaatcaagtcttgcttttgcagcttctaagctgagcttatctctttgcatgattcttttaaggcttaattctttaggtgtgtaaattacaatgactttgcctaaattttcataagcaccgctttcaaaaaaaagaggaatttctacaaaaaaagctttattttctttatctagaatttgtatttgttctaaaattttagctcgaattttaggatgagtgaaattttctaagatttttttagcttctttattgttaaaaacaatttctccaaggatttttctatcgattttcttttcttttgtgagtaaattttttaaactaaagggagaaaaaatcttttcaagttctaaagcattttcatctaaaattttatgagcgattttgtctgcgctaatgcttttaaagtctaaagaattcgctatttctataaaagtgcttttaccacaagcaattgaagcggttacaaaaaaagcatttttcatcttatgccttattaaaacttttttcgttaaaatacctttttagttcttaaaggaaaataaatgaaaatttcatatgaagatgcaggcgtaagtatagataatggaaatacctttgtagaggctataaaacctttggttaaagaaacttttaatgataatgttgtaggtggaattggttcttttgctggtgcttttagaatgccaagtggttttaaaaagcctgtgattttaggtgcaacagatggggttggtaccaagcttcgcttggcaattgatgctaaaaaatatgatactatagggcaagatttagtagcaatgtgtgtgaatgatttgatttgtaattttgctacgcctttgtttttcttagattattatgctacagctaagcttgaagtagaagtagcaaaggctgttgtatcaggcattgccaagggatgtaagatggcaaattgtgcattaattggcggagaaactgctgaaatgcctggaatgtatgcaaaagatgattttgatcttgcgggttttgctgtgggtatggctgaagaagatgagattgatagaagtaaatttgttaaaaatggtgatattttattggcacttcctagttcaggacttcattcaaatggttattctttagctagaaaagtactttttgaaagtttaaaattaaaatttgatgacaagatagagggtaaaaatttaattgatattttgttagaacctacaaggatttatgtgcgtgattttcttacactaaagccttatatcagtgctctagcacatattacagggggtggtttagtagaaaatttaccacgcgttttacctcgtggtatgggtgcaactatacgcaaacatcatcttaaaactcctgaaattttttatactataggacaggctgtagaagaaagcgaaatgtatagaagctttaacatgggagtgggtttagtaatggttgtagatccttctaatgtaagtaaggttttagaaaattcagatgcctttattatcggcgaaatttgcattaatgaaggtattgttttagaatgaaaataaagcgttaatacgctttatttttgtattttaagttctatttttgtagtgttttgttcttttggcaaaggattggtttgtgctagataaaaggctacaagtacatttacaagcatagcgataagtaaaagaggagtggtccgttttataatatccattggagctacttttgcaaatccagctaaagctatgattccgcctgctattggtgaagctgcacgacctaaacaagatgcaatttctataggtaaaactagagtaataggtgcaacgcctaattttgtagctatatcaggagctagttttccaaaagcattaaaagcggcaattccacttcccataatcactgtggcaaaataaactaaaaagcttaaaatagctatactcaaaagaattccaaaccatgcaaaatttcctgttccaagatttgaaaccgcgttagtaaggatattaactccaccaagtgctttaatgcctttagcacatactccagcggcgatgattatgcttacgactaagataaaaatttcagccatagtcttttaaaatcaccatcatatcttcgcctaattttctagcatttctgtgtcttgcaaattcaacaagaaaaactaaagaaatgcttacaaaatttgctgttacaacatcgagcttgatagtaaaaaaatacgctgtaaataaaaatacaacaggtaaccaaggaaagagtatgtaaaaagtaggacatttaggatcaatgatttgcggaatttcaacttcatcatttaaaacacctttttctttatctcttttatcaatccaagcaaaataaaaaggaatcaagatggcaataactacaacataggcaatcacactataaatttggtaatttaaaaaaagccctacgacattatcactttgtcctaccatatctgccatattgattgaatttccatcttttggaccataatcaagtgcaattaaagaaagcgcacatacagttgtaataggacggattttaagtgagattaaaacaggataaatacatgctaacaaaagcaaaagcaatccagcatagctagaaatgacgatttttaaagccattccaacaacaaaagttccacttaaaattaagtatttattttttgatttttcctaagggtttatttgctaaaaaagcaagttttgctgaagcattaatatgtttcatataagcagcaaaacctgccacactcatgataataagtcctactccagaaagctgacttttaaaagtcgctgtgataaaagcataactatcaagtaaaacatttaaaagcttgtatactctctgcttggagcttttggtataggtgttcctgtgatataaaaagcaaaaataagcaagataatatttgaaagaaaaatacaaaaatgggatcgtatttttttgagtatatcataaaaattagcatagggtctattgaatttacaataaattggattttatctaaatttttaaataaaaaatattttttatttaaaaattacttgttttttgtattataaaattaacatatatagtttggttactgaaaagtttatgtttgtttaaaaaatgatttttgtattataattatacacaaatcataaatattaaaaaggatctagtgtggcaagaattttggcatttgatataggaataagctctattggctgggcatttagtgaaaatgatgagttaaaagattgtggagttaggatttttacaaaggctgaaaatcccaaaacaggagaatccttagccttgccaagacgccttgcaagaagtgctagaaaacgccttgctagacgcaaagcaaggctaaatcacttaaaacatttaatcgcaaatgaatttaagttaaattacgaagattatcaaagctttgatgaaagtttagccaaggcttataaaggatctttaattagcccttatgagttaagatttagagctttaaacgagcttttaagtaagcaagattttgcaagagtgattttacatattgcaaaaaggcgtggctatgatgatattaaaaatagtgatgataaagaaaaaggtgcgattttaaaagctatcaagcaaaatgaagaaaaactagcaaattatcaaagtgtgggcgagtatctttataaagagtattttcaaaaattcaaagaaaattccaaagaatttacaaatgttagaaataaaaaagaaagttatgaacgctgcatagcgcaaagttttttaaaagatgaattaaagcttatttttaaaaaacaaagagaatttggcttttctttttcaaaaaaatttgaagaagaggtgcttagtgtagcattttataaaagggctttaaaagatttttctcatttggtgggaaattgtagtttttttaccgatgaaaaaagagcgccaaaaaattcgcccttagcttttatgtttgtagcacttacaagaattatcaatcttttaaacaatcttaaaaatactgaaggaattttatatacaaaagatgatttaaacgcccttttgaatgaagttttaaaaaacggcactctaacttataaacaaacaaaaaagcttttgggcttaagcgatgattatgaatttaaaggggaaaaaggaacttattttattgagtttaaaaaatataaagaattnnnnnnnnnnnnnnngaaggaattttatatacaaaagatgatttaaacacgcttttgaatgaagttttaaaaaacggcactctaacttataaacaaacaaaaaagcttttgggtttaagtgatgattatgaatttaaaggagaaaaaggaacttattttattgagtttaaaaaatataaagaatttataaaagccctaggtgatcatagtttaagccaagatgatttaaatgaaatagcaaaagatattacccttataaaagatgagattaagcttaaaaaggctttagcaaaatatgatttaaatcaaaatcaaattgatagtttaagcaaattggaatttaaagaccatttaaatataagttttaaagccttaaaacttatcactcctttaatgcttgaaggtaaaaaatacgatgaagcttgtaatgagcttaatttaaaagtagcaatcaatgaagataaaaaagattttttacccgcatttaatgaaacttattataaagatgaggtaactaatcctgtggttttaagagcgattaaagaatacagaaaggtcttaaatgctttacttaaaaaatacggcaaagtgcataaaataaacattgaattagcaagagaagtaggtaaaaattacagccaaagagctaaaatagaaaaagagcaaaatgaaaactacaaggccaaaaaagacgccgaacttgaatgtgaaaaactaggcttaaaaataaatagcaaaaatattttaaaattaagattatttaaagaacaaaaagaattttgtgcttatagtggagaaaagattaaaattagtgatttgcaagatgaaaaaatgcttgaaattgatcacatttacccttattctagaagttttgatgattcttatatgaataaagttttagtttttaccaagcaaaatcaagaaaaacttaatcaaaccccctttgaagcctttggcaatgatagtgcaaaatggcagaaaattgaagttttagcaaaaaatttacctactaaaaagcaaaaaagaattttagataaaaattacaaagacaaagagcaaaaagactttaaagatagaaatctaaacgatactcgctacatcgcaaggcttgttttaaactacactaaagattatttagattttttacctttaagcgatgatgaaaatacaaagttaaacgacacacaaaaaggctcaaaagtgcatgtagaagcaaaaagcggtatgcttacatcggctttaagacacacttggggctttagcgctaaggatagaaataaccatcttcatcacgccatcgatgcagtaattattgcttatgcaaacaactctatcgtaaaggctttttcagattttaaaaaagagcaagaaagcaacagtgcagaactttatgcaaaaaaaattagtgaattagattataaaaacaaaaggaagttttttgagccttttagtggttttaggcaaaaggttttagataaaattgatgaaatttttgtctcaaaacctgagagaaaaaagccaagtggagctttacatgaagaaacatttagaaaagaagaagaattctatcaatcatacggcggaaaagaaggagttttaaaagccctagagcttggtaaaatccgcaaagtaaatggtaaaatagttaaaaatggcgatatgtttagagtggatatttttaaacacaaaaagacaaataaattttatgctgtgccaatttatactatggattttgctttaaaagtattaccaaataaagctgtagcacgaagtaaaaaaggtgagataaaagactggattttaatggatgaaaattatgagttttgcttttctttatacaaagatagtttgattttaattcaaactaaagatatgcaagagccagaatttgtttattataatgcttttacaagctctactgttagtttgattgtttcaaaacacgataataaatttgaaacgctaagcaaaaatcaaaaaatattgtttaaaaatgcaaatgaaaaagaagtaatcgcaaaaagcataggaattcaaaatctaaaagtatttgaaaaatacatagtttcagcacttggggaagttacaaaggctgagtttagacaaagagaagattttaaaaaatgagttacgatgaagcttttaaaacactgcttattagctctaatgccaagctaaatttagagctaaatcatcttgtgattaagcaagatgaaaatatagccaaattgtttttaaaagatataaatatcatcgttttagaaagcttacaagtaagcattagttccgcactttttaacgcttttgcaaggcataaatcatcttgctaacctgcgatgaaactcatagtataaatggtgttttactccttttttagggcattttcaaagtgcaaaaatcgcaaaagagcaaatgaatgtaagtgctcaaaaaaaggctattttatggcaaaaaatcattaaaaataaaatcctaaatcaagcctttatcttaaaaaaatacaataaaatagagcaaagcaatgagcttataaatttggctaaaaaagtaagcttaaatgatagtaaaaatattgaagctgttgcggcggcgctttattttaaaactttgtttggtacttctttttcaagagatgagctttgctttgaaaattctgctttaaattatggctatgcaatcattagggcttgtattattagagcagtttgcataagtgggcttttgccttggcttggcataaagcacgataatatttataattcttttgcgctttgtgatgatttgatagaagtgtttagggctagtgttgatgattgtgttttaaagcttaagggtgaaagtgagtttttaagcaaagatgacaaaagagcgttgattggcaatttacaaagcaaaatcaattttgatgggcaaaattatcctttaaacagagcgataaatcattatgtggcaaattttaaaaatgctttattgtatgaagatgaactaaagatagtgaaatttgatgattgaagataaatttatgcgtgtgcttttgatgtttgatgtacctactaaaagtaaaaaagagcaaaaactagcaagtaaatttagaaataatcttataaaattaggttattttatgctgtaatttagtgtttatatgcgtatttgcaagggtttaagttctgcaaaaagttctattgaaaatgtaaaaaagattttgccaccttatggaaatgtaagggctttaatcatcactgaaaagcaatttgataaaatggagcttttgcttggtggcatagtttttaacgaaaaagttaataacgaaaccaatttaacgctttttgatatagatagtcatggagaatttaaatataaaaattcaaataatgaagaaattcaaataaacaaaaaacaagaaaaatatcatcagcaaaatttatttgaattttaaaagcggttttaggggattgtaaccccgcagagtcccgcaaactctttattttagtccctttttaaatttcttatgagattatagcataatttttgctatttttcatgaaaaaaccccgaaattttcattatctggtaaatatctattttaccataaagaaatttaaaaagggactaaaataaaccctagtggattgaaactccgctagggctaattactccactaaaaggaggttgcgaatttgaaacttattgaaatttagggttgattaaaatcgaaataaaattatttaaataattttaaggcataaagataatatccactaaactttcattttctaaaatttcacattcttttggcaccaccataagggcagctttattgttaagattgtttataatcgcactagagccttcttttttgccttcaagattggctaaaatgcgtccattttcaaactttatgttacaagcgacaaattccaaataaggtgtttttttcttgtaacttccttgtaaaaaggctttgcaaatatagtctttaggctgaagtaaccaagagtttaaaatctctcttgcgtaaagattaaacattaccatagccgagtaaggaaaacctggtaaggcgatgatgaatttttcattagccttagctattttgatatgtctacctggttttatgtcggctttatcgatgatgatttcgtattctttgatggctttttttaaaaagtcaaaatctcccatagaaaccccgcccgttgtaaccaaaatatcacaactttgcaaagcactttcaagggtggaaaaagtggctttctcatcatcttttaaaagaggaaaaacccttgtatcgcaatttaaatttttagctaaattagctatggcgatatgatttgaagagcggatttgagcaggattttccaaggcttctcctagatctttgatctcacttccactacttaaaacccctacaataggctttataaacacactaatgtgaaaaaatccaagttcagctaaaagagctatctcgctataatttaactttgtgccttttttgagtaaaatttcatcttttttatagttttctcctaccgcacgcacggcaaaagcttggggaacttttttttctataaaaagagtatcattttctacgcgtacattttcaacaggggctaaagtatcgcttccttcgctcatgagtgagcctgtaaaggtttttacacaagtaccattttgcacgctaaattgtggcatagtacccgcaggtgtgatacctaaaatttttaaaggcttatcttgatcttcaaatttgatcgcataaccatccatagccgaagttggaaattcgggctgatttttaggggcttttatgtcttgagctaaaatgcgtcctaaacactctgtaagagctattttttcaatcttttcataagttttaatatgagaatgtaaaatttttaaactttcttcataagacattaacattttttatccttttaaaagtcctgcaccgcaaagtttggttgatctttctttggcataaattctttctttgtttatcacatcatacttccaaatgggcgcacttgctttaaaatcttcaacaaattcattaagaagtttaagtcctaattttctttgtttgcttaaaattcctgcaaaatacgagctttcatgtatcgctacatcgcctatagagtgagcaaaaagcaagctaataccatcaaaatctactcttttttgccactcatcaaaccatttttttaaaagcggttcataaatatcaaaactaagtgcctcaatacctccttcttcacgcacaataccacaaaaagtcagtaaagcaccgcagtttttatccttggaaaattcataccattggctataaattttaggaatatctaaagagccttgataaagtgtaaaatgtttcatttagcctccacaaactggcggtaaaagtgctattttatcaccatcttttaacttggtgttttcatcaaaaatgatttcatcatttaaagatacagcacaaagttctagccattcttttaaactctcatctttttgcaaaatttcttttaattcttttaaattttttacttcaagttctaaattttctttatttatagggcctaaaaattccacttttaccattttattcctttacttctaaatttcccatcattcctaaatcttcatgttctaaaatatggcaatgatacattctaagtcctttaaaatcttgtttcattctaagtcttaactcttcattaggacgcacatttatagtatctctgaaggctctaaattcggctttttgaactttgccattgagttttgatgagatgagttcaaattgcgtgccgtgtatgtggaaaggatgatccatgtgagatttatttatcactatccagtcttcaactactccaagcttggagcttaaatcaatgcgttttaaatcatagcttttgccattgattaaaaacatagacgcaagagcgatttttaattcattttcactttttcccatcattccatgcatttgcatatgatcttcactcatgattatttctttaaattccttaggttcttctaaaggtttgaaaatttttaaattttttggaagttctaatttttctttttttaggctaatactagctaaaaatagggtattaggttcttcttttaccatcattttatccctatcataataagcactttctagtctaaattccccatcttttggagcgtcgattaaaacttctacacgagaagcaggacttaagaaaagttcttctttataaatagctttttctataagtccaccatcagtaccaacaagtataaacttagctccttgtatgcgtaaatttaaatatcttgctgcagtagcattataaatgcgtatgcgttcgtttgtggcgagtttgattttaggtttaaattgtccattgatgagtacaaattctccttctctaccatttagccaatcatttaggttgttgtttggaatttgagcgttttcatcaagacgcaaatcgctaatcatcaaatctttttcttttaaatgacttaaagcatctttttttgctttgatcacaaaagctcctgctaaacccataaaaacttgtttagaagccgtataatgaggatgtggatgataccagtaagttcctgcgctatcttgaggaatttcaaaacgatatattctttcttctcctgctaagataggatcatgtgggcttccatcttgatcaggtggcacaggaacgccatgccaatgtatagttgtagcttctttgagtttgtttttgactaaaatttcaagtttatctccttcaaaaacttctatttttggagcaggcacgaggccattgtaagtataaaataaggtttttttacctttgataagctctatatgattttctttgatttctagggtagcacgaaaaatatttttttctttacttttatttttgagtaaaggcaaggcttttaaaatttctccttgggggaattgttttggatctaaaagctttaaattttttggagcaaagtttataaaagaagtatctaagtcatgatttatagaatgatttttatgcatggagtgcatatcgtgcataggatttgcataggctacacccatacttgctagagtaagtgcattaaattttaaaaaatttcttctattcattagtttttccttttgcttgattttttgtattatagtcattatttttttaactttagtaaatatttattttgaaaatttggtttaattttgttatgattttagcaatttaatcaaggaaaaataatgttttatgaaaaaattcaaactccagcttatattttagaagaagataaattaagaaaaaattgtgagcttttagcaagtgttggtgaaaaaagtggtgctaaagtgcttttagctttaaaaggttttgctttttcaggagcgatgaaaattgttggagaatacctaaaaggttgtacttgtagcggactttgggaagcaaaatttgctaaagaatacatggataaagaaattcatacttattcacctgcttttaaagaagatgaaataggtgaaatagccagtttatctcatcatatagtgtttaactctttagcccaatttcataaatttcaagctaaaacacaaaaaaattccttaggtcttcgttgtaatgttgaattttctctagccccaaaagaactttacaatccttgtggaagatactcaagacttggaattcgtgctaaagattttgaaaatgtggatttaaatgctatagaaggacttcattttcacgcactttgtgaagaaagtgctgatgctttagaagcagttttaaaggcttttgaagagaaatttggcaaatggatagggcaaatgaaatgggtgaattttggaggaggacatcacatcactaaaaaaggctatgatgttgaaaaacttattgctttgtgtaaaaatttcagtgataaatatggcgtgcaagtttatcttgaaccaggcgaagcggtgggttggcaaacaggaaatttggtggctagtgtagtagatatcatagaaaatgaaaaacaaattgctattttagatacttcaagcgaagcacatatgccagatactatcatcatgccttatacaagtgaagttttaaatgctagaattttggccacaagagaaaatgaaaaaatttcagacttaaaagaaagcgaattttcctatttgcttactggaaatacttgtttagcaggtgatgtaatgggagaatacgcctttgataaaaagcttaaaatcggcgataaaattgtttttttagatcaaattcattacaccattgtgaaaaacacaacttttaatggtataagacttccaaatctcatgcttttagaccgtaaaaatgaacttcaaatgataagagaattttcttataaggattattctttaagaaattagtattatttataatttgcataaaatgttaattttactcggaagagaatcaaagatgtaaattttatgcaaagtattttattttttcaaatataaaatcaactcaaatatctaattttcaatactttggtatgattttttaatattttaaatccttgtggaattttattgaaattcagtgatttttaaatcaaatagtattaagataaatcgatttaaaaatcggctttaaaatgaatattaggtatattttgcataatattcattcaagcaaaatttaaagctatttttgaaaattttgaatgcatgggagctttaatggatttggaaaaattaagattagctagaagtctttattatcaatgtctaggagagctttttgttttttcattttctgaagaaagattgtcaaaattacaagagtatttaaagacaatgcaagaatgtttatttgatgaaaatttaaaatcaaattttgatatcttgcttaagcatttagatgatgaaaattctatacaagcattttttaaagaatatgatttgctttttttaagtcttaaaaatagcattccaacgactttttcttacatagaagaaggttttgaaaattcaaatcctttactttgcgtgcgtcaaattttagtcaaaagtaaaataagacgcaatgaaaaattttttaaagaaagtgaagatagtgttggattttgtttattgttgatgagtgaatttttaaggcaaaatgaagatgatttagccaaagagctttttaaaaaagtgatcaataaaagcattgatgagtttttaggcaatgttttcatgaataaaaatgcgaatttatataaggaaattgcaagtattgcatcggcttttatggaatttgaaagactttgctttgaagtggaaaaacctgcaaaaataaattctaaaaaagtgcaaaacgatctatcgcgttcagaatttttaagaagagaagcaaataaacaaaggaggactcgtgaaaaatcgcagggaatttcttaaaaaatccgcttttgccttaggggctgctggagtgcttggtagcacgactttagctctagctaaagatgaagaaagaaaagatttggttaaaggtaaaagcaagaaaaaagaagtgctttttcaaagaagtgctaattgggaaaattattatataaaggctgagtaatgtcaagtgtaggtgaaaatatcaagcttacgcgtcgttcttttcttaaaatggcagcactttcaagcctagcaacaccgttgcttgctagaagtgaaactttaagagaagcgagtgctgatgagcttaaagaagcgtatgaaggtagtaaaaaagtaaaaacagtttgtacagcctgttctgtaggctgtgggattattgcagaagtgcaaaatggtgtttgggtgcgtcaagaaattgctcaagatcatcctgtgagttcaggtggacattgctgcaagggatctgatatgatcgatatggtgcgttcacatgtgcgtttaaaatatcctatgaaaaaagaaaatggagaatggaaacgcataagttatgagcaagctttaagtgagatcggagaaaaactagctgcttatcgtaaagaaaatcctgaaagtgttatgtttttaggttctgcaaaacttaataatgaacaagcttattatataagaaaatttgcagcattttttggaacgaacaatgtagatcatcaagctagaatttgacacagcgcaacagtcgccggtgtggcgaatacatttggttatggcgctatgacaaaccatcttggagacattcaaagaagtaaatgtatcattatcattggggcaaatccagcggtaaatcatcctgtgggttttagacatttcttaaaagcaaaagaaaaaggtgcaaagcttatcgttgtagatcctagatttacaaaaagtgcggcaaaagcggatatttatgcaagaattcgtccaggaaccgacattgctttcatgtatggaatgctaaaaatcatctttgatgaaggcttagaagatacaaaatatcttgatgaaagagtttttggaatcgataaaattcgcgaagaagcagcaaaatggacagccgaagaagtagaaaatgttacagggatctctaaagaacttttggtgcaaatcactcacgaagtagctaaaaacaaaccaactacgcttatttgggctatgggtttaactcaacacactgtaggaacttcaaatacacgtttagcacctattgtgcaaatggtacttggaaatataggtaaatttggtggtggagttaatatcttacgcggacacgataatgttcaaggtgcttcagatatggcttgtttgagcgaaaatttaccaggttattatcctttaaatgaagcgacttggagatactatgccaaaatttggggtgtggattatgagtggcttttaggaaattttgtaagcaaagattggatgcataaaactgggctttcacttgctagatggtgggcagcggctttaaatggaaaagatggaaatgatgctatcgataatgcaggaacgcctttaaaagctttagtagttatgggaaatggtattacttcgactgcacaacaagtaaaagttaaagaaggtttggaagctttagagcttttagttttagctgatccttttgtaaatgaagcagggattattgcagaaagaaaagatggaatttatcttttacctgcagcaacacagtttgaaacaagcggaagtgtaacagcaacaaatcgtagcggacaatggagatttaaagttgtagatccactttatgaaagcatggaagatcaagaaattttatttgagcttgctaaaaaattaggtttttatgaagactttaccaagactttacgcgatgaaaaaggtgagattgtttggcctgaaaatgcaacaagagaaattgcaaaagcagttagaagtatagggcttaatggttggagtcctgaaaggcttaaaaagcatactttatactgggataaatttgatgaggtaactttagaaggaaaagacgaagttgctggcgagtattacgggcttccttggccttgttggagtgataagcacccaggttctcctgtgctttataataccgacattgaagtagcaaaaggtggtatgggctttagaaacaattttggacttgaatatgaaggagagagtttacttgctaaaaatgcacctttaaattcgcctattaatacaggttatccacaaattactaaagataatatagaaaaagttttaggtattattttaagtgctcaagaaaaagaaaaaatgggatcaacttggtcttatgatgatagcaatatcatagcaactaaatgtatagaaaaaggcatagttccttatggaaatgctaaagctagagctgtagtttggacttttaaagataaaattccactccaccgtgagcctttacattctccaagaaacgatttggtgcaaaaatatccaagttttgaagatcaaaaagcgctttaccgcgtggatactaaatttgtttctgtgcaacaagctaaggattattctaaagaattcccgcttaatcttgttactgcaagacttgtgaatttaaatggtgcaggtatggaaaatagagcatctatgtatctaacgcgtttaacacctgaaatgttttgtgagatcaatcctgaattagcaaaagagcaagacattaaagca

SEQ ID NO: 3813 - DNA, 22019 bp, synthetic construct
  source 1..22019: mol_type = other DNA
  misc_feature 1..22019: note = Synthetic
gtccaacggcacattattctatgggtggaattgaagtggctaaatttgaagatatgagtactaaaattgctggaatttatgtaggtggagaagcttcttgtatttctatacatggagccaatagactagggggaaattctttagccgatgcagttgtaactgggcatttagcaggcattggtgcgacaaattatgccaaagatgcaagttttggaaaaggggcaaaaactcatgaacttgctcaaaaatggcaggctagatttaaagaaattacaaataatggcggaaatggtcaagaaatgtatgaattgcgagaagagctaggaagtcaaaattgggataatatggggatttttagaactcaagaaaaactcgatcttctagcaaaaaatttagaagatatacaagcaagatatgaaaaaattcgcattccaaatcctaatgaagtgatgaatactgcttttacagattatgtagagcttggtaatttgattttactttctcgctgtgcttgtttagcagctagaaatagacttgaaagtcgtggggctcatactagagaagattatccaaagcgagatgataaaaatttcttaaaacatagcattgtaaatttagaaaatgatgaattaaaacttagttataaagatgtcgtggtaactgagttttcacttgatggaaggagagtacaatgaaaatcatcatagatcgttttaatggcaaggaaaaatatgaacaaagttatgatattgatgataaggatatacaaggaaaaactctgctctctcttttgctttttattaaaaaaacaaaagatattactttaaattttaccgcctcttgtcaatctgcgatttgtggggcttgtgcagttcgtgtgaatgggcattcttatcttgcttgtgatactaaaatgcaagatttgttaaaagaatatgataatccttcaagtatacgcatttctccgcttggaaattttagagtaatttctgatttaattgtggattgggagccttctatagaaaatttaagaaaaattcgtcctgccatggtggcaaaaaatgaattttcagcggaaaagggctgtaaacaaagtcaagaagaatttgatcgtattagcaagcaatgggattgtattttatgtggtagctgtgcttcagagtgtaataaattagaagcagatagtagcgattatatgcaaccttttgtttttactcatgcttggcgtgcagcggcagactctcgaggtaaggatcctatgttgcatgtaaaacccagcgtaatgaatggactttggctttgtgttcattgtcaagagtgcgctgatcgttgtccaaagggtataagttcagtaagtgatatagcaaatttaagagtgatggcgattaaaaaaggtttaaatgaaggcttagggcctgatcatgctgaagctttttataaagatttagttgaaggttcaggacgcttgaatgaaatttatcttgctttgcgttctgagggtgttataggttctatgggtaaaacagatatagcttttaaacttatgcgtgcaggaaaaatgaatcctatgcatgtttttggcgaggatgaaatagaaggacataaagatttggttaaaatgataaaggcggcacaagaagctgctgttaaggagtaaaatatgcaaaaagaatacgctttttttccaggttgtgttttatctcaagctgcaaaagaatctaaaatttcacttgaagctattgcacctattttgggttggaagttgaatgaaattaaggggtggagttgttgtggggcttctcaagcgcagtgtgttgatcctattgcgactttggtagctaatgcaagaaatattgctttagcagaagagatgaaaatgccaatgcttacaacttgtagtacttgtatgctaactttaactaaagcaaaaaatactcttgataagggtgcaaaagaacgcatcaatacttttttagcacaaggtggaatgaaatatcaaggttcaacgcctattacaagtcttttgtgggagctttatgaggatttggataatttaaaaagcaaggtgaaaaagccgctttcaaatttaaaagtagctttattttatggttgccatagtttaagacctgaagatgctttcggtaaaaaagaaagttcaaccaatccaaaaagttttgaaagtgtagtagaagttttaggggctaaaatagttccttttgaaaaacgccttgattgttgtggttttcatgcttcttatcctgcagaaaaatctgtgaaaaaaatgtctagtcaaattgtcaataatgcaagtgaaaatcaagctgattgtgttgtaacaccttgtccactttgtcaaatgcagcttgatatctatcaagaaagatttcaagattatactagttctaaagcaagattgccgatgattcatttatcacaattagtaggacttgcattaggactttctaaagaaatggttggtttagattataatattattgatgcaagtaaaattgcataaaaacatgggcaaaaagcccatgtttaaagatttaattccattcttaaagaatgctcccaaaaagccacttccaagcgtgttgcagtatgaaaaatttcgctgagtttttggaatttttgcgcactaacacttgaagtataagaattaacaaaatcttcaaattctttagcttcattttgaaaattttcacttccataggtcaaaatccattccttgtaaggatgatcttttaaattttcattttttaaacgatttataatttcagcacctatttttgcatagcctatagcgcaagcactaagagcaactaacatatctaaaaaatctccattttcacctacgcttaacatataacgcgaataggctatattgactaaactttcatcttttatattgagttcatctgcattaatgccaagagataaaattgcacgatgaagctccatttctccttcaactatataattttgaaatttcatagcaaaacgaagttcttttgcggtatttgagttaagtgctaatcttgcataacattttgcgtaattaagcaaataaatataatcttgcttgagataaaaaagaaaattttcttgctttaggcttttatcttccaattttttaacaaaatcatgatgtagataagcattccaaattttttgattttctttgattaaattagagaaaagcatcatttttcctttatgttttaatattttattttcaagtataatgaaaaactataaatattttaagctttttatagtaaaatacgctttattttaattttttgaaggagagcaaatggcaacatttgatgatgtaaaagcagtagtagtagagcaattaagtattgatgcagatgcagttaaaatggaatcaaaaattattgaagatttaggtgctgattctttagatgttgtagagcttattatggctttagaagaaaaatttgaagtagaaattccagatagtgatgctgaaaaattaattaaaattgaagatgttgtaaattatattgacaatctaaaaaaataatttttttcttgcaaggagcttattcttgaaaagagttgtagttacaggtattggcatgatcaatgcccttggtttagataaagaaagttcatttaaagcaatttgcaatggagaaagcggagtaaataaaattactctttttgatgccacagactttcctgttcaaattgcagctgaagttaaaaattttgatccattagaggttgttgatggcaaagaagtaaaaaaaattgaccgtttcatacaacttggaattaaagcagcaagagaagcaatgcaggatgctggatttagcgaagaattagacaaagaagaatttggcattgtttcggctgctggtatcggaggtttgcctaacatagaaaaaaattccattatttgttccgagcgaggtccgcgtaaaatttccccttttttcataccttcagcacttgtaaatatgttaggaggtttgatttctatagagcatggacttaaagggccaaatatttcttgtgttacagcttgtgcagcaggaactcatgctataggagaagcttataaaagtatagctttgggaaatgctaaaaagatgttagtcataggtgcagaagctgcgatttgtcctgtgggtataggtggttttgcttcaatgaaagctttatcaactagaaatgaagatccacagcatgcttcaagaccatttgacaaagaaagagatggttttgtcatgggagaaggtgctggagctttagtttttgaggaatatgaagaggctaaaaaacgcggtgctacaatttatgctgaattaattggatttggagaaagtgcagatgcacatcatattacttcaccaactttagatgggcctttaagagctatgaaaaaagctttaaatatggcagggaatccaaaggtagattatatcaatgcacatggaacttcaacccctgtaaatgacaaaaatgaaacagcagcaattaaagagctttttggcaataatatcccgcttataagttccaccaaaggacaaacaggtcattgcttgggtgccgcaggtgcaattgaagcagttattagtgttatggccttaagagatggggtagttccacctacaatcaatcagctcgtaaaagatgatgaatgtgatcttgattatgttccaaatatatcaagaaaagtagatttaaaagtggtgatgagtaattcttttggttttggtggcacaaatggctgtgttgtatttaaaaaagtagattaatatggcttcttatttagattttgaaaaaaatattcagcaaattgatgaggatattatcaatgctcagattaaaggagatactgaagctgtatcgattttaaagaaaaatcttgaaaaagaaatttctaaaacttataagaatttaagtgattttcaacgtttgcaattagcgcgtcatccagatcgcccttatgctcttgactatattgaacttattttaaatgacgctcacgaaatacatggtgatcgtgcctttagagatgatcctgctattgtttgttttatgggttatttaggagagaaaaaaataattgtaattggtgagcaaaaaggacgtggaacaaaagataaaatcgctagaaattttgggatgccacatcctgaaggatatcgtaaagccttaagagtagcaagacttgcagagaaatttcaaattcctattttatttttgatagatactccaggtgcttatcctggaataggtgctgaagaaagagggcaaagtgaagctatcgctagaaatttatatgaattaagtgatttgaaaataccgaccattgctatagttatcggagaaggcggtagtggaggggcgttagctataggggttgcagatagacttgcaatgatgaaaaattctgttttttcagtaatttctcctgaaggttgtgctgcaatactttggaatgatcctgcaaaaagtgaagctgcaaccaaggctatgaaggtaacggctgatgatttaaaatctcaaggtttaattgatgatgttatagatgaacctacaaatggtgcacatcgcaataaagaagctgcagcagtagctattgctgattatgtaaaaaaatctctaaatgaacttgaaaatattgacgtacgagaactttctgcaaatcgtatgcagaaaattttaaagcttggagcctatcaagaggcttaggcttttacttcgcttttttaaataattttattatttataattgttatcaaaattaagttaattaaaagtattctttttttatacttcaaaaatgattttaaatatcaaaataattatttttaaaggaattaatttgactcaaattaaaaatatgaaatttaaaaaaagtttactgtgttttttaattttatctggagctttgttaaaagcagaagaaaaatatcaacttaatgatgttgtggttagtgctagtggttttgaacaagatttggttgatgcgcctgctagtatttctatcattacaaaagaagagcttgaaaaaaagccaattaaggatataggggaggctataggagatattccaggtgtagatgtgactatgaataaaacaggcacttatgattttagcatacgaggttttggtagttcttatactctagttttaattgatggaaaacgtcaaagtgttgcaaatggattttatgataatggctttagtggcagtgagtcaggttatcttccacctttatctatgatagagcgtattgaggttatacgtggtccagcttctacgctttatggcagtgatgctgtaggcggtgtgataaatattatcactaagaaaaatcctgataagactgaggcgaatatagaatttaacactcttttgcaacagcactctaatcactatggcaatgctgggggatttaatgcttatgtagcaactcctttgattgaagatacattatcaatttctgcaaggttgaagtattatgataaggcagcttctgatttaaaatggcctacaccggtttggaataatagtcaacaaagacctgataattatcaaattgctagccatagtccaggtgcttttactagtttaggttttggttctaggcttaattggacagtagatgataaaaataatatatattttgatatagaacgatatattaatgaaatttcagtgaattctacaagtagtagggctattaaaagtgaaagacaactttttaaggataatattgttttaaatcatgatggtaactatgattttggttcaactaactcatatttacaatatggtagcactaaggataaggagctgcatagccaaatttgggtaggagaaggtaaggttgttttaccttggaatttaggtcaatacggtaatttagtaaatacctttggtgcaaggattgattatgagatgttaaaaaatgatcaagcaagcgcaggtagtcaaataagaggtaaaaatcttgatcaaaccacggttgcgctttatggggaaaatgagtattttataacagatgatttgatttttactacaggtttgcgttatatttatagcgatttgtttgattctgaatttacgcctagggtttatttggtttatcacttaaatgataatatagcctttaaaggaggtgtttcaaaaggctataaaactcctgctgctaaggagttgacaaatggatattataattatagcaatgacaatgcttattttggaaaccctgacttaaaaccagaagaaagtataaattatgaattgggtgttgattttaggatatttgattttgcacattattctatcacaggatttattactgattttacaaatcaaatcagtagtgaagatttaacaggtatgcaaaatggtattaattgtagcaatggcactgtttgtacgcgtcctattaatcttggaaaaacacagactaaaggtatagaatttgcatttaataccaaaacttacaatggctttagcctaaattcaagttatacttttatggataatcgctacaaagatggtcaaaaaaattggtttggtggtgatagaatagagaatttaccaaggcatatagcaatgttaaaattaaactatgagcgaggtaaatttagctcctatataaaaacacgagcaagacttgatactatagccaaagcaaaaggtggcggtaatggtagtttgccatggcaaaaatataagcctttttatatagtagatttagggataaattataaaatcaataagcaatctagcttaagttttgtagtacaaaatctttttgataaaaatttctttgatccgcaagttactaaatgggctggagccaatcctgctggatatgcaaatcgttatcaagactatacagaaggaaggagtttttggttgagttataaatatgatttttaattttttaaggctttaattacctttatattttcaaaaaagcaaaaataaagtacaatgtgaaaaataaataaaaggttttattatggcgtttaaaaatttaaaagaactttcttttgaaaaatcaaattatattaagcctaagagatttgcttatgaaagtaatggtaagttttgtacttgggattttatagaatctaaagatagtgtttcagtgcttttgtatcataaagaattagaaagttttatttttgtacgccaatttcgtataccactttggtatcatcaaatgcatgataaagattatgtaaaagatgataatatgggctatactatagagctttgttctgggcttgtggataaaaaattatctttagaggaaatagcaaaagaagaatgtatagaagaactaggatatgctcctaaaaatttagaaaaaataggagatttttatacagggtttggttcaggtgtaagcaagcaaagcttttatttcgcagaagttgatgaaaaagataaaatttcttcaggaggtggagttgatgatgaagagattgaagctgtttatgttaaggtgcaggattttgaaaaaaaatgtaaaaatataataagaacgcctttgcttgattttgcttatatgtggtttttaaaggagaagtgggaaaaatattaaagattatttaggttaaaccttaaaaaggttcaacctaggatttaatgatctgattcatcaagcatttctttaaatacattgaaaagatcaagcgatgcattttcagcaacttcgcatttattaattatgctgtgttgagtaatatctttgctaatatcttctgtatttgctattgttatagcattattcatattttcatgaactttttcatgtggctcgttaatttttaagaagcttttattttgcccaaatctttcttttcctgtgctagcaagccattttcctaagcgacaagatgtatgatcggctaattgctttcctgatttggaaaaaatttctttataaccatttaatttaaaagctatatgatctagttttgctaaagatacgaaagcttctgaagcgataccaactgcatttgaattagtagaatgcgcttcatttactaagtgggtaaatttttcggaaaaactcataatatgagcattagaatctatagaaattttttcaacttgctcactttgagtatacatttcatttgcattttgctttagaaggttgatattcatttcaacttctgtggttgctttttgtgttttttcagctagttttcttacttcatcggcaacaacagcaaaaccacgcccatgttcacctgcgcgtgcagcttctatggcagcgttaagagctaaaagattggtttgatcggaaacatctttaattagattaattacattagtaatttcatctacacttctatgcaatgttcctgcaacatctcttgttttattggctgattctgtaatatcccctaaggaagcattgatagaattagcaatatggttaagttcatccatttcagcaagagaagttttagaatagctagagataacttctgccttatttacattttctaacatatcgccttgaacaatagtaatattttttaaaaccccagttaataaaacatttaaaagatctgttttaagtttagactctaaagccgcttgttctaatgatgtaattttattttttaattctaaattttccgattgaaatttttcaattttatgtgcaagatttttattttcttcttcaagtttttgaagatcagaatggtttattttacttccaaacattgttttgccttattttttataatttgctagatattggctaagttcatcttttacatgaagcttttctttttttaaagttgaaatttccatgctgctaagagaagttctaccttcttctgcatctttaatcatgtcatcaagttcattatgacgatcaaatagtttatcaaaatgagcatctttaccttttagctctgacattaattctctatattcatgtagcataaaccttataaacaaacaaaaaagcttttgggcttaagcgatgattatgaatttaaaggagaaaaaggaacttattttattgagtttaaaaaatacaaagaatttataaaagccctaggtgagcataatttaagccaagatgatttaaatgaaatagcaaaagatatcactcttataaaagatgagattaaacttaaaaaggctttagcaaaatacgatttaaatcaaaatcaaattgatagcttaagcaaattggaatttaaagaccatttaaatataagttttaaagccttaaaacttatcactcctttaatgcttgaaggtaaaaaatacgatgaagcttgcaatgagcttaatttaaaagtagcaatcaatgaagataaaaaagactttttacccgcatttaatgaaacttattacaaagatgaagtaactaatcctgtggttttaagggcgattaaagaatatagaaaaatcttaaatgccttacttaaaaaatacggtaaagtgcataaaataaacattgaattagcaagagaagtaggtaaaaatcacagccaaagagctaaaatagaaaaagagcaaaacgaaaactacaaggccaaaaaagacgccgaaattgaatgtgaaaaactaggcttaaaaataaatagcaaaaatattttaaaattaagattatttaaagaacaaaaagaattttgtgcttatagtggagaaaagattaaacttagtgatttgcaagatgaaaaaatgcttgaaattgaccatatttacccttattctagaagttttgatgattcttatatgaataaagttttagtttttaccaagcaaaatcaagaaaagcttaataaaaccccctttgaagcctttggcaatgatagtacaaaatggcagaaaattgaagttttggcaaaaaatttacctgaaaaaaagcaaaaaagaattttagataaaaattacaaagacaaagagcaaaaagactttaaagatagaaatctaaacgatactcgctacatcgcaaggcttgttttaaactacactaaagattatttagattttttacctttaagcgatgatgaaaatacaaaattaaacgatacgcaaaaaggctcaaaagtgcatgtagaagcaaaaagcggtatgctaacatcggctttaaggcacacttggggctttagcgctaaggatagaaacaaccatcttcatcacgccatcgatgcagcaattattgcttatgcaaacaattctatcgtaaaggctttttcagattttaaaaaagagcaagaaagcaacagtgtagaactttatgcaaaaaaaattagtgaattagattataaaaacaaaaggaagttttttgagccttttagtggttttaggcaaaaggttttagataaaattgatgaaatttttgtctcaaaacctgagagaaaaaagccaagtggagctttacatgaagaaacatttagaaaagaagaagaattctatcaatcatacggcggaaaagaaggagttttaaaagccctagagcttggtaaaatccgcaaagtaaatggtaaaattgttaaaaatggcgatatgtttagagtggatatttttaaacacaaaaagacaaataaattttatgctgtgccaatttatactatggattttgctttaaaagtattaccaaataaagctgtagcgcgaagtaaaaaaggtgagataaaagactggattttaatggatgaaaattatgagttttgcttttctttatacaaagatagtttgattttaattcaaactaaagatatgcaagagccagaacttgtttattttaatgcttttacaagctctactgttagtttgattgtttcaaaacacgataataaatttgaaacgctaagcaaaaatcaaaaaatattgtttaaaaatgcaaatgaaaaagaagtaatcgcaaaaagcataggaattcaaaatctaaaagtatttgaaaaatacatagtttcagcacttggagaagtgacaaaggctgagtttagacaaagagaagattttaaaaaatgagttacgatgaagcttttaaaacactgcttattagctctaatgccaagctaaatttagagctaaatcatcttgtgattaagcaagatgaaaatatagccaaattgtttttaaaggatataaacatcatcgttttagaaagcttacaagtaagccttagttccgcactttttaacgcttttgcaaggcataaaattatcttattaacctgcgatgaaactcatagtataaatggtgtttttactccttttttagggcattttcaaagtgcaaaaatcgcaaaagagcaaatgaatgtaagtgctcaaaaaaaggctattttatggcaaaaaatcattaaaaacaaaatcctaaatcaagcctttgttttgaaaaaacacaataaaatagggcaaagcaatgagcttataaatttggctaaaaaagtaagcttaaatgatagtaaaaatatcgaagctgttgcagcggcgctttattttaaaactttgtttggcgtttctttttcaagagatgagctttgctttgaaaattctgctttaaattatggctatgcaatcattagggcttgtattattagagcagtttgtataagtgggcttttgccttggcttggcataaagcacgataatatttataattcttttgcactttgtgatgatttgatagaagtttttagggctagtgttgatgattgtgttttaaagcttaagggtgaaagtgagtttttaagcaaagatgacaaaagagcgttgattggcaatttacaaagcaaaatcaattttgatgggcaaaattatcctttaaacagagcgataaatcattatgtggcgaattttaaaaatgctttattgtatgaagatgagctaaagatagtgaaatttgatgattgaagataaatttatgcgcgtgcttttgatgtttgatgtacctactaaaagtaaaaaagagcaaaaactagcaagtaaatttagaaacaatcttataaaattaggttattttatgctgcaatttagcgtttatatgcgtatttgcaagggtttaagttctgcaaaaagttctattgaaaatgtaaaaaagattttgccaccttatggaaatgtaagggctttaatcatcactgaaaagcaatttgataaaatggagcttttgcttggtggcatagtttttaatgaaaaagttaataacgaaactaatttaacgctttttgatatagatagtcatggagaatttaaatacaaaaattcaaataatgaagaaatacaactaaacaaaaaacaagaaaaatatcatcagcaaaatttatttgaattttaaaagcggttttaggggattgtaaccccgcagagtcccgcaaactctttattttagtccctttttaaatttcttattgagattatagcataatttttgctatttttcatgaaaaaaccccgaaattttcattatctggtaaatatcattttaccaagaccaagaagcagagtatcaaaatacattttaccataaagaaatttaaaaagggactaaaacaagccaacttgatgggttactaataaatcaattttaccataaagaaatttaaaaagggactaaaaaccctagtggattgaaactctgctagggctaattacttcactaaaaggaggtgcaaatttgaaacttattgaaatttagggttgattaaaatcgaaataaaattatttaaataattttaaggcataaagataatatctactaaactttcattttctaaaatttcacattcttttggtactaccataagggcagctttattgttaagattgtttataatcgcactagagccttctttcttaccttcaagattggctaaaatgcgtccatttttaaattccacattacaagcgacaaattccaaataaggtgtttttttcttgtagcttccttgtaaaaaggctttgcaaatatagtctttaggctgaagtaaccaagagtttaaaatctctcttgcgtaaagattaaacattaccatagccgagtaaggaaaacctggtaaggcgatgatgaatttttcattagccttggctattttgatatgtctacctggttttatgtcggctttatcgatgatgatttcgtattcttttacagctttttttaaaaagtcaaaatctcccatagaaactccgcctgttgtaatcaaaatatcacaactttgcaaagcactttcaagggtagaaaaagtggctttttcatcatcttttaaaagtggaaaaacccttgtatcgcaatttaaatttttagctaaattagctatggcgatatgatttgaagagcggatttgagcaggattttccaaggcttctcctagatctttgatctcacttccactacttaaaacccctacaataggctttataaacacactaatgtgaaaaaatccaagttcagccaaaagagctatttcgctataatttaactttgtgccttttttgagtaaaatttcatcttttttatagttttctcctactgcacgcacggcaaaagcttggggaacttttttttctataaaaagagtatcattttctacgcgtacattttcaacagggactaaagtatcacttccttcactcataagtgaacctgtaaaggtttttacacaagtaccattttgcacgctaaattgtggcatagtgcctgcaggtgtgaggcctaaaatttttaaaggcttatcttgatcttcaaatttgatcgcataaccatccatagccgaagttggaaattcaggctgatttttaggggcttttatgtcttgagctaaaatgcgtcctaaacactctgtaagagctattttttcaatcttttcataagttttgatatgagagtgtaaaatttttaaactttcttcataagacattaacattttttatccttttaaaagtcctgcaccgcaaagtttggttgatctttctttggcataaattctttctttgtttatcacatcatacttccaaataggtgcacttgctttaaaatcttcaacaaattcattaagaagtttaagtcctaattttctttgtttgcttaaaattcctgcaaaataagagctttcatgaaccgccacatcgcctatagagtgagcaaaaagcaagctaatatcatcaaaatctactcttttttgccactcatcaaaccatttttttaaaagcggttcataaatatcaaaactaagtgcctcaatgcctccttcttcacgcacaataccacaaaaagtcagcaaagcaccgcagtttttatccttggcaaattcataccattggctataaattttaggaatatctaaagaaccttgatagagtgtaaaatgtttcatttaacccccacaaactggcggtaaaagtgctattttatcaccatcttttaacttagtgttttcatcaaaaatgatttcatcgtttaaagatacggcacaaagttctagccattcttttaaactctcatctttttgcaaaatttcttttaattcttttaaattttttacctcaagctctaaattttctttatttatggggcctaaaaattccacttttatcattttattcctttacttctaaatttcccatcattcctaaatcttcatgttctaaaatatgacaatgatacattctaagtcctttaaaatcttgtttcattctaagtcttaactcttcattaggacgcacatttatagtatctcttaaggctctaaattcggctttttgaactttgccattgagttttgatgagatgagttcaaattgcgtgccgtgtatgtggaaaggatgatccatgtgagatttgtttatcactatccagtcttcaactactccaagtttggagcttaaatcaatgcgttttaaatcatagcttttgccattgattaaaaacatagacgcaagagcgatttttaattcgctttcactttttcccatcataccatgcatttgcatatgatcttcactcatgattatttctttaaattccttaggttcttctgaaggtttgaaaatttttaaattttttggaagttctacattttctttttttagactaatattagctaaaaatagggtattaggttcttcttttaccatcattttatccctatcataataagcactttctagcttaaaattcccatcttttggagcgtcgattaaaacttctacgcgagaagcaggacttaagaaaagttcttctttataaatagctttttctataagtccaccatcagtaccaacaagtataaacttagctccttgtatgcgtaaatttaaatatcttgctgcagtagcattataaatgcgtatgcgttcgtttgtggcgagtttgattttaggtttaaattgtccattaatgagtacaaattctccttctctaccatttagccaatcatttaggttgttgttcggaatttgagcgttttcatcaagacgcaaatcgctaatcatcaaatctttttcttttaaatgacttaaagcatctttttttgctttgatcacaaaagcccctgctaagcccataaaaacttgtttagaagtggtataatgagggtgtggatgataccagtaagttcctgcgctatcttgaggaatttcaaaatgatatattctttcttttcctgctaagataggatcatgtgggcttccatcttgatcaggtggcacaggaacgccatgccaatgtatagttgtagcttccttgagtttgtttttgactaaaatttcaagtttatctccttcaaaaacttctatttttggagcaggtactagaccattgtaagtataaaataaggtttttttacctttgataagctctatatgattttctttgatttctagggtagcacgaaaaatatttttttctttactttcatttttgagcaaaggcaaggcttttaaaatttctccttgggggaattgttttggatctaaaagttttaaattttttggagcaaagttgataaaagaagtatctaagtcatgatttatagaatgatttttatgcatagagtgcatatcgtgcataggatttgcataggctacacccatacttgctagagtaagtgcattaaattttaaaaaatttcttctattcattagtttttccttttgcttgattttttgtattatagtcattatttttttagttttagtaaatatttattttgaaaatttgatttaattttgttatgattttagcaatttaatcaaggaaaaataatgttttatgaaaaaattcaaactccagcttatattttagaagaagataaattaagaaaaaactgtgagcttttagcaagtgttggtgaaaaaagtggtgctaaagtgcttttagctttaaaaggttttgctttttcaggagcgatgaaaattgttggagaatacctaaaaggttgtacttgtagcggactttgggaagcaaaatttgctaaagaatacatggataaagaaattcatacttattcacctgcttttaaagaagatgaaataggtgaaatagccagtttatctcatcatatagtgtttaattctttagctcaatttcataaatttcaaagcaaaacacaaaaaaattccttaggtcttcgttgcaatgttgaattttctctagccccaaaagaactttacaatccttgtggaagatactcaagacttggaattcgtgctaaagattttgaaaatgtggatttaaatgctatagaaggacttcattttcacgcactttgtgaagaaagtgctgacgctttagaagctgttttaaaggtctttaaagagaaatttggtaaatggatagggcaaatgaaatgggtgaattttggaggaggacatcacatcaccaaaaaaggctatgatgttgaaaaacttattgctttgtgtaaaaatttcagcgataaatatggtgtacaagtttatcttgaaccaggtgaagcggtaggttggcaaacaggaaatttggttgctagtgtagtagatatcatagaaaatgaaaaacaaattgccattttagatacttcaagcgaagcacatatgccagatactatcatcatgccttatacaagtgaagttttaaatgctagaattttagccacaagagaaaatgaaaaaatttcagacttaaaagaaaacgaatttgcctatttacttactggaaatacttgtttagcgggtgatgtaatgggagagtacgcttttgataaaaagcttaaaatcggcgataaaattgtttttttagatcaaattcattacaccattgtgaaaaacacaacttttaatggtataagacttccaaatctcatgcttttagaccataaaaatgaacttcaaatgataagagaattttcttataaggattattctttaagaaattagtattatttataatttgcataaaatattaattttactcggaagagaatcaaagatataaattttatgcaaagtattttattttttcaaatataaaatcaactcaaatatctaattttcaatactttgatatgattttttaagattttaaatccttgtggaattttattgaaattcagtgatttttaaatcaaatagtattaagataaatcgatttaaaaatcggctttaaaatgaatattaggtatattttgcataatattcattcaagcaaaatttaaagctatttttgaaaattttgaatgcatggaggctttaatggatttggaaaaattaagattagctagaagtctttattatcaatgtctaggagagctttttgttttttcattttctgaagaaagattgtcaaaattacaagagtatttaaagacaatgcaagaatgtttatttgatgaaaatttaaaatcaaattttgatatcttgcttaagcatttagatgatgaaaattctatacaagcattttttaaagaatacgatttgctttttttaagtcttaaaaacagcattccaacgactttttcttacatagaagaaggttttgaaaattcaaatcctttactttgcgtgcgtcaaattttagtcaaaagtaaaataagacgcaatgaaaaattttttaaagaaagtgaagatagtgttggattttgtttattgttgatgagtgaatttttaaggcaaaatgaagatgatttagctaaagagctttttgaaaaagtgatcaataaaagcattgatgagtttttaggcgatgttttcatgaataaaaatgcgaatttatataaggaaattgcaagtattgcgatggcttttatggaatttgaaagactttgctttgaagtggaaaaacctgcaaaaataaattctaaaaaagtgcaaaatgatctatcgcgttcggaatttttaagaagagaagcaaataaacaaaggaggactcgtgaaaaatcgcagggaatttcttaaaaaatccgcttttgccttaggggctgctggagtgcttggtagcacaactttagctctagctaaagatgaagaaagaaaagatttggttaaaggtaaaagcaagaaaaaagaagtgctttttcaaagaagtgctaattgggaaaattattatataaaggctgagtaatgtcaagtgtaggtgaaaatatcaagcttacgcgtcgttcttttcttaaaatggcagcactttcaagtctagcaacaccgttgcttgctagaagtgaaactttaagagaagcgagtgctgatgagcttaaagaagcttatgaaggtagtaaaaaagtaaaaacagtttgtacagcctgttctgtaggctgtgggattattgcagaagtgcaaaatggtgtttgggtgcgtcaagaaatcgctcaagatcatcctgtgagttcaggtggacattgctgcaagggatctgatatgatcgatatggtgcgttcacatgtgcgtttaaaatatcctatgaaaaaagaaaatggagaatggaaacgcataagttatgagcaagctttaagtgagatcggagaaaaactagctgcttatcgtaaagaaaatcctgaaagtgttatgtttttaggttctgcaaaaatgagcaatgaacaagcttattatgtacgtaaatttgcagcgttttttggaacaaacaatgtagatcatcaagctagaatttgacacagcgcaacagtcgccggtgtggcgaatacatttggttatggcgctatgacaaaccatcttggagacattcaaagaagtaaatgtatcattatcattggggcaaatccagcggtaaatcatcctgtgggttttagacatttcttaaaagcaaaagaaaaaggtgcaaagcttatcgttgtagatcctagatttacaaaaagtgcagcaaaagcggatatttatgcaagaattcgtccaggaactgacattgctttcatgtatggaatgctaaaaatcatctttgatgaaggtttagaagatacaaaatatcttgatgaaagagtttttggaatcgataaaattcgtgaagaagcggcaaaatggacagctgaagaggtggaaaatgttacaggaatttctaaagaacttttggtgcaaatcactcacgaagtagctaaaaacaaaccaactacgcttatttgggctatgggtttaactcaacacactgtaggaacttcaaatacacgtttagcacctattgtgcaaatggtacttggaaatataggtaaatttggtggtggagttaatatcttacgcggacatgataatgttcaaggtgcttcagatatggcttgtttgagcgaaaatttaccaggttattatcctttaaatgaagcgacttggagatactatgccaaaatttggggtgtggattatgagtggcttttaggaaattttgtaagcaaagattggatgcataaaaccggactttcacttgctagatggtgggcagcggctttaaatggaaaagatggaaatgatgctatcgataacgcaggaacgcctttaaaagctttagtagttatgggaaatggtatcacttcgactgcacaacaagtaaaagttaaagaaggtttggaagctttagagcttttagttttagccgatccttttgtaaatgaagcaggcattattgcagaaagaaaagatggaatttatcttttacctgcagcaacacagtttgaaacaagcggaagtgtaacagcaacaaatcgtagcggacaatggagatttaaagttgtagatccactttatgaaagcatggaagatcaagaaattttatttgagcttgctaaaaaattaggtttttatgaagactttaccaagactttacgcgatgaaaaaggtgagattgtttggcctgaaaatgcaacaagagaaattgcaaaagcagttagaagtatagggcttaatggttggagtcctgaaaggcttaaaaagcatactttatactgggataaatttgatgaggtaactttagaaggaaaagatgaagttgctggtgagtattacgggcttccttggccttgttggagtgataagcacccaggttctcctgtactttataataccgacattgaagtcgcaaaaggtggtatgggctttagaaataattttggacttgagtatgaaggagagagtttacttgctaaaaatgcgcctttaaattcacctattgatacaggttatccacaaattactaaagataatatagaaaaagttttaggtattactttaagtgcccaagaaaaagaaaaaatgggatcaacttggtcttatgatgatagcaatatcatagcaactaaatgtatagaaaaaggcatagttccttatggaaatgctaaagctagagctgtagtttggacttttaaagataaaattccactccaccgtgagcctttacattctccaagaaacgatttggtgcaaaaatatccaagttttgaagatcaaaaagcgctttaccgcgtggatactaaatttgtgtctgtgcaacaagctaaggattattctaaagaattcccgcttaatcttgttactgcaagacttgtgaatttaaatggtgc

SEQ ID NO: 3814 - DNA, 22016 bp, synthetic construct
  misc_feature 1..22016: note = Synthetic
  source 1..22016: mol_type = other DNA
ctagtttgactgcttgagatgctttgctttggtttataccgtggaaaatttctattttgtattcttgcttgatttgaagatcattttttaaaaaaatttcatctttatcaaaaagagttaattctttttcagagattttttcccattctaaatctccaaaacgatattgtgtagaaaacgccaataaactaaaatcaagctcatttaagctaaggtttgttcgtgaagctacgcttaaaagctctcgagctggattttctgtataggcaataattttttcatccaaagccaaaactttccccttgtaaaaaattaagaatgtaattatagtcaatttttaatcaattttagttaaaatagttctctttatattttgaaatttatgaaaaatttaatgaagagtttagtatttaaaaattttattatcaatgctttaggaattttattttcaagaattttagggcttgctagagatgttttaatagcgctttttttaggagcagggctttatagtgatattttttttgtggctttaaaaatgcctgctttttttagaagaatttttgcagaaggggcttttggacaaagttttttgcctaattttgtaaaagcgaaaaaaaaaggagctttttgcgttagtgtaatgatgcaatttagccttatagtttttttattttgtcttttggtaagttttttctcctctttttttaccaagctttttgcttttgggtttaacgcagatactatagctttagcggctcctttggtggcgattaatttttggtatttgttttttatttttttagttacttttttaggagctattttaaattatagacaaaaatttttcattacctctttttctgcggcattatttaacttaagtattgttatagctgccttttttgtggataaaaatgcaccgcaaaatacactttattatttttcttatgcaacggttttaagtggggtggcacagcttattttacatttgcttgttttaaaaaacaatcctgtaatacgtgctatgactttaagtataaaatttaaaaaagccaaggcgaaattacaaggtttttatggcaatttttttcatggagttttaggttcttctgcgactcaatttagctcattgcttgatacaactatagctagttttttaatgagcgggagtatttcttatctttattatgcaaatcgtgtcttccaactccccctggcactttttgctattgctttaactcaagtttcttttccaaaaattttaaaacatttaaaaagtgatcaagaaaatttagccttaaaatttatgcaaagagcattagcacttttaagcattttgcttattgcttctagtattgtaggttctgtgtttgctttggaaatttcaaagcttttatttgaaagaggaaatttcactcacgaagatagtgtgattacggcttatgttttgattgcttatcttatagggcttttaccttttggtttgcaaaagcttttttctttgtggctttatgcaaaatttaaacaaaaaacagcagcttggatcgcggtaaaatctttaattatcagtgctttatgttctatggcttttatatttttgattaaagatgaaagtttaaaggttattgcagtggcactttcaagctctattagtgctttttatttgcttggagctaatatcaaagaatttggttttaagaaattttttgctttaatatctattaaaatttgcttattggttatagttgctttgattgtttttacgatcttgcttattttgattaaaccttatattttaagtttttttataggaatttttacaagttttaaaggagtttttaatgagattattagatagtgtaacaaaagagaaaataaaacttgataaaaaagatattagtatttacttatgcgggcctacggtttatgatgatgcacatttaggacatgcaagaagtagtgtttgttttgatcttttgcgtagagttttacttgctcagggcaatagggtaaaatttgctagaaattatacagatattgatgataagattttgaaaaaaatgacacaaagtggtcaaactttagaggaaattacggaattttatatcaaaagttatgaagaggatatgagggctttaaatgtattagatcctgattttaagcctcgtgcaacgcattatataacagctatgcttgatttgattaaaaagcttgctaaggatgggtttgtttatactctagaagatggaatttactttgatacaagtaaagatgaaaaatatttaagcctatcaaatcgcaatttagaagaaaatatttctcgtctaagtaatgaagtgcaaaaaagaaatgaaagcgattttgtgctttggaaatttgatgaaaatttttacgaaaatgaatttggcaaagggcgtccaggttggcatactgaatgtgttgctatgattgattctatttttgaaaatactcttgatatacatgctggagggatagatttgctttttcctcatcatgaaaatgaagctgcgcaatgtcgttgtggatgtaagagaaaattagcaaatatttggcttcacaatggttttgtaaaaatcgatggcgaaaaaatgagtaaaagtttaaataatagtttttttataaaagatgctttaaaagaatttatgggcgaagttttaagattttatcttttgagttctcattatagatctcattttaattattctttatcggatttagaaaatgctaaaaaacgtttagataaattttatcgccttaaaaaaagattggatttaggtgaaatttctgattttgatgttttaaatgatattgaaataaaaagcgaaattgctaagcaaattttagagattttaaatgatgatttaaatgtttctaaagccttggctcttttggatgattttatcagtagtgcaaatttagagttggataaagaaagcaaaaataaaattttaaaacaaaatatcaaagaagctttaagtgagctagctaaaatttttggctttggttttatggatacaactttatattttcaatggggtgtaagcaaagaagaacgagaagagattgaaaagttaattttagaaagaactgaggctaagaaaagcaaagattttaacacagctgatacaataagggaacaactaagtagtaaaaaaatcactcttttagatactccaaatggaacaatttgggagaaaataaatgcataatgagatgaatttaaaagaggttttaatacgctttaagcccttttataaaagatattggaagcaatttgctatagctatttttggtatgattttagcaagcggaggaactgctggaagtttttatgctttagagcctattttaaattatattttcgttgaaaaaaatgaagctttactttatacagtgccttttttgctagtattgatgtatttttttaaaaatcttggaacttatctacaaagtttttatgtttcctttataggaacagatatgttaagagtattgcgtgctagggttttaaaaaatgttttacgcttggatatggatttttttaaacgctacagaagtggagagcttgtaagtcgttgtactaatgatattaatgcacttcaaagtatagtatcaaacattattcctgatttttttagagagcttttaactgctataggactgcttgcggtagtcttgtatcaaagtcctactttagctttttttgctttagtgattttgcctttagctatttttcctttggtatggtttgctaaaaaacttaaaaaatatgcaagaaatatacaagaaacaaattcggatttactttcttatttgggtgaaattttttcaaatattgaattgatcaaagctaatgataatgaaaaaaaagaaagtgataaattttctaagcataatgatattttatgtaaattaaacctaaaatccgcacgtattgatgcacttacaagtcctttaatggatatgatgggttctgttggggttgctgtggtgattattgtagggggtagagaggttatcaatggttctatgagtgtgggaagttttatcagttttgtttcggcactttttgcgatatatactcctttaaagcgtctttcgtctttatatggaaaacttcaaggtgctgttgcggcaagtgaaagaactttttatttattggatttagaacctcaaattaaaggtggaagcaaagaattaaaaaacattgaaaaaattagctttgaaaatgttgaatttgcttatgaaaacccgcataaaagtgttttaaaaggcgtaaattttgattttgttaaagggcaaatgcttgctcttatagggacaagtgggggtggcaaatcttctattattaatcttttgatgtatttttatgaaaagcaaaaaggtaaaattttactcaatcaagaagatattagcacttttaccatagaaagcttacatgctaaaataggacttgtaacgcaaaatatttatctttttaatgatagttttgctgcaaatattgcttatagcgaagagttagaagaagaaaaagtcatccaagctttaaaattggccaatgcctatgaatttgttaaagaaatgggcgggatttgggctgaagtgaaagaacatggtaaaaacttaagtggaggacaaaaacaaagaatagcaatcgctagagctttatataaaaatcctgatgtgcttatttttgatgaagcaacttcagctttggataatgaaagtgaaaaagcaatagttaaaactatagaaaatttaaaacaagacagattgattttagtggttgcacatcgtttaagcactatagaaaatgcagataaaatagtagtattggataagggtaaggtattggcaataggtaaagatgaagagcttttgcaaacttgttctttgtatcaaaaatttaaaagcaaagaaaaaacaaagcctagctttagttaattttagttagaattttaaaaaggattaaaaaatggcttatgaaatgataaaacctttactttttaagttaaaccctgagtatacacatgctttggttgaatgtagcttaagggctttaagtgctagttttccaggagctttaagttttttagcacacaaatatatagttgataatgagagtttaaggcaaaatttacttggacttgattttaataaccctgtgggtttagcaggaggctttgataaaaatgctactatgataagacctttgagtgctttaggatttggctttttagaagtgggaacttttactccaaaacctcaagaaggcaatgaaaaaccacgtctatttagacttgtaaaacaagaaagtatacaaaatgctatgggttttaacaacgaaggtgctgaaaagattgctttaaggcttgcaaaaacttatccttttgttttgcctttaggggtaaatatagggaaaaataaaatcactccaaatgacaaagccttagaggattattttactttgtttagagattttaaggatttgtgtgattattttatcgttaatatctcatctcctaatactaaaaatttaagagagttacaaaatgatgattttttaaataccttgcttgaagaagccaaaaaaattacttctaagcctattttgataaaaattgctcctgatatgaaaatagatgatgctttaaatttatgtgaaaatgctattaaaaaaggtgcagatgggtttatattagccaatactagtgttgattatagcttactagataataatcgtacttttggtggtattagtggaaggttgattacagaaaaaagtggtatttttttcaaagaagtagctaaaattctttttggcaaaaccttgcttattgcaagtggagggattgatagtgctgatattgcttatgagcgtattaaaaatggggctaatttggtgcaagtttatacagctttgatttttaaaggtccttctttggtaaaaaatatcaatcaaaatcttatagagcttttaagaaaagatggttttttacacattagcgaagctgttggggtaaatttaaaatgattgcttatgaaaaaattcaattaaaaaacaagcttgaagtttatgctttgcctgtaaataaaaatagcgatgtgattagcgttgatattttttataaagtgggttcaagaaatgagatcatgggaaaaagcggcatagctcatatgctagaacatttaaattttaaaagtactaaaaatttaaaagctggcgaatttgatgagattgttaagggttttggtggtgtggataatgcaagcacaggttttgactatactcattattatattaaatgtgcgaagaaaaatttagataaagctttggaactttttgcagaacttatggagaatttaaatttaaaagatgaagaatttcagcctgaaagagcagtggttttagaagagcgtagatggagaacagataataatcctttgggatatctttattttaggctttttaatcacgcatttatgtatcatccttatcattggactcctataggtttttttaaagatatagaaaattggagtattgaagatattaaagaatttcatagtatttattatcaacctaaaaatgcgattttacttgtaagtggcgatatagaaagtaaagaagtttttgagctttcaaaaaaacattttgaaaagattaaaaatactaagactatacctaaaattcacacaaaagagcctaagcaagatggagcaaaaagaatatatttgcataaaaactcagatactgaactattagcccttgcttataaaattccaaatttcaagcacaaagatatacctgctttaaatgctttatccgagcttttaggaagtgggaaaagttctttaatgagtgaaattttgattgataaattaaatttaatcaatgattattatgcttatgttaatgattgtatagatgacaatttatttatttttatttgtaattgtaatcccaatgttaatgcagaaaaagtagaaaaagaacttttaaaaatcattgataaacttaaaatgggtaaaatttctcaaaaagatttgcaaagagtgaaaaataatgtcaaaagtgattttattttctcacttaacaatgctagtgcagtggcaaatatttatggttcatatctagcaagaggagatatcaatcctttgttaaattatgagaaagatatacaaaatttggaattaaaagatttgatttcttgtgctaaaaagtattttattcaagaaaattcaactacggtaattctaagaaaggattcaaatggataaaaatattatcattggggcgatgacggctcttattacaccatttaaaaatggaaaagttgatgagcaaagttatgtaagattgattaaaagacaaatagaaaatggcatcgatgcagtagttccagtaggaacaacaggagaaagtgcaactttaacccatgaagaacatagaacttgcatagaaatagccgttgagacttgtaaaggaactaaagttaaggttttagcaggtgcgggaagtaatgcaactcatgaggcagtgggtttggctaaatttgctaaagagcatggtgctgatgggattttaagtgtggcaccgtattataataaacctacgcaacaaggactttacgagcattataaggctattgcgcaaagtgtagatattcctgtgcttttatataatgttccaggaagaacaggttgtgaaatttcaacggatactattatcaagctttttagagattgtgaaaatatttatggagtaaaagaagcgagtggaaatatcgataagtgtgtggatttgcttgcacacgaacctagaatgatgcttatttcaggggaagatgcgatcaattatcctatactttcaaatggtggaaagggagtgatttcagtaacttcaaatttattacccgatatgattagcgctttaactcattttgctttagatgaaaattataaagaagctaaaaaaatcaatgatgagctttataatatcaataaaattttattttgcgaaagtaatcctattcctattaaaacggctatgtatttagctggattgatagaaagtttggaatttagacttcctctttgttctccaaataaggaaaattttgctaaaattgaagaagtgatgaaaaaatataagatcaaaggattttaatgaatacagaatttcaaggaaaaactttagtgattagcggtggaactcgcgggataggcaaagctatagtttatgaatttgctaaagtgggtgtaaatatagcttttacttataattctaatgcgcaaattgctgatgaaatggttcaagatttggagaaaaattataaaatcaaagctagagcttatgagtttaatatcttagaacctgaaacctataaagaactttttgaaaaaattgatgtggattttgatagagtggattattttatctcaaatgctatcatttcaggacgtgcggttgtaggtggctatactaaatttatgaagttaaaaccaaagggaattaataacatttttacagccacagtaaatgcttttgttgtgggcgcacaagaagcagctaaaaggatggaaaaagtagggggtggaagcattatttctatctcatctacaggaaatttagtgtatatagaaaattattcaggtcatggtacagcaaaagccgctgtagaagctatggcaagatatgcggctactgaacttggagaaaaaaatatccgtgtaaatgtcgtaagtggtgggcctattgaaactgatgctttaagagcttttacaaattatgaagaagtaaaacaggctactataaatttaagccctttaaatcgcatggggcagcctgaagatttggctggagcatgtctttttctttgttcaagtaaggcaagttgggtgacaggacatactttcatcgttgatggtggtacaacttttaaataaaaattaagaaaaatcaatggatttttcttaaaaatgtttttcaatcaagttttaatttccaccctaaaaaaacacttaataatgcaagtaaaaaaataaaatttaaagtccaattaccaaaacctataaaacctatagataatacgctgtaaaaaaatccacccacagcagaataaatacaaatcgtacttaaagagccattttctgccatttgtttgcaaggacaaattttataaaattttttatcattgaattgattttttttcttatttcctaagagcaagcccaaaagcgcaaaagcatctaaaaaaacaaagaagcaaagtaacacaaaatctaaattcacaaaaatcacctttaaaaatatctaagccaagaaggtaaatgcacttgttcagctctaaggcttgtttcttgcccatgtccaggtaaaagtctaaagtcttctttataagtcatcactttttccaagctttgtttcattaaattagcatctgaataaggaaaatcccatcttcctatacttctataaaataaaaaatctccgctaaacatcaaattttcacccataagttctatcatggtacagcctggcgtatgcccagggagaaaatggaatttaaaccgagtgttagaaatttcaagctcatcttcattttcgattaaaacatcagctttacttggctcaaaaccttttccaaaaggatcttgtagcataaattcatcatttttatggatataaataggaatgtcaaattctttttttactctagcattatcccatacatgatcataatgcccgtgagtgtttaaaatcgctaaaggttttttagcgtattgctttataaaacttagagcattaacgccaggatctattataaaatcccctttagaggtgtttaaaatatagcaatttgtctcataaggaccgcaagcttgttttagaatttgcatttttagccttttttattgaaatttgaacctaaaatgaattataattatacattgattgtttaaaggtaagtttatggattgtgaaaaaatttctcagactttatgtgaattcattcagcacaaggttaaggactcgggcttaaatggcgttgttttaggacttagcggggggattgattctgctttggtggcgacgctttgtaagaaggctttgggtgaaaatgtttttgcgcttttaatgcctacaaaattttctaatcaagaaaatttaaacgatgctttaaaactttgtcaagaattgaatttaaaatataaaatcatagaaattcaagacattttagaggctttcttaaaacaaagtgaaaatacagatgagttaagcaggggaaattttgctgcacgtattagaatgagcttgctttatgattattctgctttaaaaaaagctttagtggttggtacttcaaataaaagcgaattacttttgggttatgggacgatttatggagatttagcttacgcttttaatcctataggagagctttataaaagtgaaatttatggattagcaagatatttaaatttaaatgaaaaattcattcaaaaagccccaagtgcggatctttggataggacaaagtgatgagaaagacttgggtttttcttatgagcttatagacaaaggattaaaagcgcttgaaaatcaagatatgaaagcattagaaaatttagattgtgcttatagtggagaaaagattaaaattagtgatttgcaagatgaaaaaatgcttgaaattgatcacatttacccttattctagaagttttgatgattcttatatgaataaagttttagtttttaccaagcaaaatcaagaaaaacttaatcaaaccccctttgaagcctttggcaatgatagtgcaaaatggcagaaaattgaagttttagcaaaaaatttacctactaaaaagcaaaaaagaattttagataaaaattacaaagacaaagagcaaaaagactttaaagatagaaatctaaacgatactcgctacatcgcaaggcttgttttaaactacactaaagattatttagattttttacctttaagcgatgatgaaaatacaaagttaaacgacacacaaaaaggctcaaaagtgcatgtagaagcaaaaagcggtatgcttacatcggctttaagacacacttggggctttagcgctaaggatagaaataaccatcttcatcacgccatcgatgcagtaattattgcttatgcaaacaactctatcgtaaaggctttttcagattttaaaaaagagcaagaaagcaacagtgcagaactttatgcaaaaaaaattagtgaattagattataaaaacaaaaggaagttttttgagccttttagtggttttaggcaaaaggttttagataaaattgatgaaatttttgtctcaaaacctgagagaaaaaagccaagcggagccttacatgaagaaacatttagaaaagaagaagaattctatcaatcatacggcggaaaagaaggagttttaaaagccctagagcttggtaaaatccgcaaagtaaatggtaaaattgttaaaaatggcgatatgtttagagtggatatttttaaacacaaaaagacaaataaattttatgctgtgccaatttatactatggattttgctttaaaagtattaccaaataaagctgtagcacgaagtgaaaaaggtgagataaaagactggattttaatggatgaaaattatgagttttgcttttctttatacaaagatagtttgattttaattcaaactaaagatatgcaagagccagaacttgtttattttaatgcttttacaagctctactgttagtttgattgtttcaaaacacgataataaatttgaaacgctaagcaaaaatcaaaaaatattgtttaaaaatgcaaatgaaaaagaagtaatcgcaaaaagcataggaattcaaaatctaaaagtatttgaaaaatacatagtttcagcacttggagaagtgacaaaggctgagtttagacaaagagaagattttaaaaatgagttacgatgaagcttttaaaacactgcttattagctctaatgccaagctaaatttagagctaaatcatcttgtgattaagcaagatgaaaatatagccaaattgtttttaaaagatataaatatcatcgttttagaaagcttacaagcaagccttagttccgcactttttaatgcctttgcaaggcataaaatcatcttgctaacctgcgatgaaactcatagtataaatggtatttttactccttttttagggcattttcaaagtgcaaaaatcgcaaaagaacaaataaatgtaagtgctcaaaaaaaggctattttatggcaaaaaatcattaaaaataaaatcctaaatcaagcctttgttttgaaaaaacacaataaaatagagcaaagcaatgagcttataaatttggccaaaaaagtaagcttaaatgatagtaaaaatatcgaagctgttgcagcggcgctttattttaaaactttgtttgggacttctttttcaagagatgagctttgctttgaaaattctgctttaaattatggctatgcaatcattagggcttgtattattagagcagtttgtataagtgggcttttgccttggcttggcattaagcacgataatatttataattcttttgcgctttgtgatgatttgatagaagtgtttagggctagtgttgatgattgtgttttaaagcttaagggtgaaagtgagtttttaagcaaagatgacaaaagagcgttgattggcaatttacaaagcaaaatcaattttgatgggcaaaattatcctttaaacagagcgataaatcattatgtggcaaattttaaaaatgctttattgtatgaagatgaactaaagatagtgaaatttgatgattgaagataaatttatgcgcgtgcttttgatgtttgatgtacctactaaaagtaaaaaagagcaaaaactagcaagtaaatttagaaacaatcttataaaattaggttattttatgctgcaatttagcgtttatatgcgtatttgcaagggtttaagttctgcaaaaagttctattgaaaatgtaaaaaagattttgccaccttatggaaatgtaagggctttaatcatcactgaaaagcaatttgataaaatggagcttttgcttggtggcatagtttttaatgaaaaagttaataacgaaaccaatttaacactttttgatatagatagtcatggagaatttaaatacaaaaattcaaataatgaagaaatacaactaaacaaaaaacaagaaaaatatcatcagcaaaatttatttgaattttaaaagcggttttaggggattgtaaccccgcagagtcccgcaaactctttattttagtccctttttaaatttcttatgagattatagcataatttttgctatttttcatgaaaaaaccccgaaattttcattatctggtaaatatctattttaccataaagaaatttaaaaagggactaaaacaggttatttatacctgctaatatagtttctattttaccataaagaaatttaaaaaggactaaaacaacttgattatcgttatactctaaaggttcattttaccataaagaaatttaaaaagggactaaaacaacttgattatcgttatactctaaaggttcattttaccataaagaaatttaaaaagggactaaaataaaccctagtggattgaaactccgctagggctaattactccactaaaaggaggttgcgaatttgaaacttattgaaatttagggttgattaaaatcgaaataaaattatttaaataattttaaggcataaagataatatccactaaactttcattttctaaaatttcacattcttttggcgccaccataagggcagctttattgttaagattgtttataatcgcactagagccttcttttttgccttcaagattggctaaaatgcgtccattttcaaactttatgttacaagcgacaaattccaaataaggtgtttttttcttgtaacttccttgtaaaaaggctttgcaaatatagtctttaggctgaagtaaccaagagtttaaaatctctcttgcgtaaagattaaacattaccatagccgagtaaggaaaacctggtaaggcgatgatgaatttttcattagccttagctattttgatatgtctacctggttttatgtcggctttatcgatgatgatttcgtattctttgatggctttttttaaaaagtcaaaatctcccatagaaaccccgcccgttgtaatcaaaatatcacaactttgcaaagcactttcaagggtagaaaaagtggctttttcatcatcttttaaaagaggaaaaacccttgtatcgcaatttaaatttttagctaaattagctatggcgatatgatttgaagagcggatttgagcaggattttccaaggcttctcctagatccttgatctcacttccactacttaaaacccctacaataggctttataaacacactaatgtgaaaaaatccaagttcagctaaaagagctatctcgctataatttaaccttgtgccttttttgagtaaaatttcatcttttttatagttttctcctaccgcacgcacggcaaaagcttgaggaacttttttttctataaaaagagtatcattttctatgcgtatattttcaacagggactaaagtatcgcttccttcgctcatgagtgagcctgtaaaggtttttacacaagtaccattttgcacgctaaattgtggcatagtgcccgcaggtgtgaggcctaaaatttttaaaggcttatcttgatcttcaaatttgatcgcataaccatccatagccgaagttggaaattcgggctgatttttaggggcttttatgtcttgagctaaaatgcgtcctaaacactctgtaagagctattttttcaatcttttcataggttttgatatgagaatgtaaaatttttaaactttcttcataagacattaacattttttatccttttaaaagtcctgcaccgcaaagtttggttgatctttctttggcgtaaattctttctttgtttatcacatcatacttccaaatgggtgcacttgctttaaaatcttcaacaaattcattaagaagtttaagccctaattttctttgtttgcttaaaattcctgcaaaatacgagctttcatgaaccgccacatcgcctatagagtgagcaaaaagcaagctaataccatcaaaatctactcttttttgccactcatcaaaccatttttttaaaagcggttcataaatatcaaaactaagtgcctcaatgcctccttcttcacgcacaataccacaaaaagtcagtaaagcaccgcagtttttatccttggcaaattcataccattggctataaattttaggaatatctaaagaatcttgatagagtgtaaaatgttccatttaacccccgcaaactggcggtaaaagtgctattttatcaccagtttttaacttagtgttttcatcaaaaatgatttcatcatttaaagataccgcacaaagttctagccattcttttaaactctcatctttttgcaaaatttcttttaattcttttaaattttttacctcaagttctaaattttctttatttatggggcctaaaaattccacttttaccattttattcctttacttctaaatttcccatcattcctaaatcttcatgttctaaaatatggcaatgatacattctaagccctttaaaatcttgtttcattctaagtcttaactcttcattaggacgcacatttatagtatctcttaaggctctaaattcggctttttgaactttgccattgagttttgatgagatgagttcaaattgcgtgccatgtatatggaaaggatgatccatgtgagatttgtttatcactatccagtcttcaactactccaagtttggagcttaaatcaatgcgttttaaatcatagcttttgccattgattaaaaacatagacgcaagagcgatttttaattcaccttcactttttcccatcataccatgcatttgcatatgatcttcactcatgattatttctttaaattccttaggttcttctgaaggtttgaaaatttttaaattttttggaagttctacattttctttttttaggttaatattggctagaaatagggtattaggttcttcttttaccatcattttatccctatcataataagcactttctagcttaaaattcccatcttttggagcgtcgattaaaacttctacacgagaagcaggacttaagaaaagttcttctttataaatagctttttctataagtccaccatcagtaccaacaagtataaacttagctccttgtatgcgtaaatttaaatatcttgctgcagtagcattataaatgcgtatgcgttcgtttgtggcgagtttgattttaggtttaaattgtccattgatgagtacaaattctccttctctaccatttagccaatcatttaggttattgtttggaatttgagcgttttcatcaagacgcaaatcgctaatcatcaaatctttttcttttaaatgacttaaagcatctttttttgctttgatcacaaaagcccccgctaaacccataaaaacttgtttagaagccgtataatgaggatgtggatgataccagtaagttcctgcgctatcttgaggaatttcaaaacgatatattctttcttctcctgctaagataggatcatgtgggcttccatcttgatcaggtggcacaggaacgccatgccaatgtatagttgtagcttctttgagtttgtttttgactaaaatttcaagtttatctccttcaaaaacttctatttttggagcaggcacgaggccattgtaagtataaaataaggtttttttacctttgataagctctatatgattttctttgatttctagggtagcacgaaaaatatttttttctttactttcatttttgagtaaaggcaaggcttttaaaatttctccttgggggaattgttttggatctaaaagctttaaattttttggagcaaagtttataaaagaagtatctaagtcatgatttatagaatgatttttatgcatggagtgcatatcgtgcataggatttgcataggctacacccatacttgctagagtaagtgcattaaattttaaaaaatttcttctattcattagtttttccttttgcttgattttttgtattatagtcattatttttttaactttagtaaatatttattttgaaaatttggtttaattttgttatgattttagcaatttaatcaaggaaaaataatgttttatgaaaaaattcaaactccagcttatattttagaagaagataaattaagaaaaaattgtgagcttttagcaagtgttagtgaaaaaagtggtgttaaagtgcttttagctttaaaaggttttgctttttcaggagcgatgaaaattgttggagaatacctaaaaggttgtacttgtagcggactttgggaagcaaaatttgctaaagaatacatggataaagaaattcatacttattcacctgcttttaaagaagatgaaatcgatgaaatagccagtttatctcatcatatagtgtttaactctttagcccaatttcataaatttcaagctaaaacacaaaaaaattccttaggtcttcgttgtaatgttgaattttctctagccccaaaagaactttacaatccttgtggaagatactcaagacttggaattcgtgctaaagattttgaaaatgtggatttaaatgctatagaaggacttcattttcacgcactttgtgaagaaagtgctgatgctttagaagcagttttaaaggcttttgaagagaaatttggcaaatggatagggcaaatgaaatgggtgaattttggaggaggacatcacatcactaaaaaaggctatgatgttgaaaagcttattgctttgtgtaaaaatttcagtgataaatatggcgtgcaagtttatcttgaaccaggcgaagcagtgggttggcaaacaggaaatttggtggctagtgtagtagatatcatagaaaatgaaaaacaaattgctattttagatacttcaagcgaagcacatatgccagatactatcatcatgccttatacaagtgaagttttaaatgctagaattttagccacaagagaaaatgaaaaaatttcagacttaaaagaaagcgaattttcctatttgcttactggaaatacttgtttagcaggtgatgtaatgggagaatacgcctttgataaaaagcttaaaatcggcgataaaattgtttttttagatcaaattcattacaccattgtgaaaaacacaacttttaatggtataagacttccaaatctcatgcttttaaatgcaaaaaatgaacttcaaatgataagagaattttcttataaggattattctttaagaaattagtattatttataatttgcataaaatgttaattttactcggaagagaatcaaagatgtaaattttatgcaaagtattttattttttcaaatataaaatcaactcaaatatctaattttcaatactttggtatgattttttaatattttaaatccttgtggaattttattgaaattcagtgatttttaaatcaaatagtattaagataaatcgatttaaaaatcggctttaaaatgaatattaggtatattttgcataatattcattcaagcaaaatttaaagctatttttgaaaattttgaatgcatgggagctttaatggatttggaaaaattaagattagctagaagtctttattatcaatgtctaggagagctttttgttttttcattttctgaagaaagattgtcaaaattacaagagtatttaaagacaatgcaagaatgtttatttgatgaaaatttaaaatcaaattttgatatcttgcttaagcatttagatgatgaaaattctatacaagcattttttaaagaatatgatttgctttttttaagtcttaaaaatagcattccaacgactttttcttacatagaagaaggttttgaaaattcaaatcctttactttgcgtgcgtcaaattttagtcaaaagtaaaataagacgcaatgaaaaattttttaaagaaagtgaagatagtgttggattttgtttattgttgatgagtgaatttttaaggcaaaatgaagatgatttagccaaagagctttttgaaaaagtgatcaataaaagcattgatgagtttttaggcgatgttttcatgaataaaaatgcgaatttatataaggaaattgcaagtattgcatcggcttttatggaatttgaaagactttgctttgaagtggaaaaacctgcaaaaataaattctaaaaaagtgcaaaacgatctatcgcgttcagaatttttaagaagagaagcaaataaacaaaggaggactcgtgaaaaatcgcagggaatttcttaaaaaatccgcttttgccttaggggctgctggagtgcttggtagcacaactttagctctagctaaagatgaagaaagaaaagatttggttaaaggtaaaagtaagaaaaaagaagtgctttttcaaagaagtgctaattgggaaaattattatataaaggctgagtaatgtcaagtgtaggtgaaaatatcaagcttacgcgtcgttcttttcttaaaatggcagcactttcaagcctagcaacaccgttgcttgctagaagtgaaactttaagagaagcgagtgctgatgagcttaaagaagcttatgaaggtagtaaaaaagtaaaaacagtttgtacagcctgttctgtaggctgtgggattattgcagaagtgcaaaatggtgtttgggtgcgtcaagaaatcgctcaagatcatcctgtgagttcaggtggacattgctgcaagggatctgatatgatcgatatggtgcgttcacatgtgcgtttaaaatatcctatgaaaaaagaaaatggagaatggaaacgcataagttatgagcaagctttaagtgagatcggagaaaaactagctgcttatcgtaaagaaaatcctgaaagtgttatgtttttaggttctgcaaaacttaataatgaacaagcttattatataagaaaatttgcagcattttttggaacgaacaatgtagatcatcaagctagaatttgacacagcgcaacagtcgccggtgtggcgaatacatttggttatggcgctatgacaaaccatcttggagacatccaaagaagtaaatgtatcattatcattggagcaaatccagcggtaaatcaccctgtgggttttagacatttcttaaaagcaaaagaaaaaggtgcaaagcttatcgttgtagatcctagatttacaaaaagtgcagcaaaagcggatatttatgcaagaattcgtccaggaactgacattgctttcatgtatggaatgctaaaaatcatctttgatgaaggcttagaagatacaaaatatcttgatgaaagagtttttggaatcgataaaattcgcgaagaagcagcaaaatggacagccgaagaagtagaaaatgttacagggatctctaaagaacttttggtgcaaatcactcacgaagtagctaaaaacaaaccaactacgcttatttgggctatgggtttaactcaacacactgtaggaacttcaaatacacgtttagcacctattgtgcaaatggtacttggaaatataggtaaatttggtggtggagttaatatcttacgcggacacgataatgttcaaggtgcttcagatatggcttgtttgagcgaaaatttaccaggttattatcctttaaatgaagcgacttggagatactatgccaaaatttggggtgtggattatgagtggcttttaggaaattttgtaagcaaagattggatgcataaaactgggctttcacttgctagatggtgggcagcggctttaaatggaaaagatggaaatgatgctatcgataatgcaggaacgcctttaaaagctttagtagttatgggaaatggtattacttcgactgcacaacaagtaaaagttaaagaaggtttggaagctttagagcttttagttttagccgatccttttgtaaatgaagcagggattattgcagaaagaaaagatggaatttatcttttacctgcagcaacacagtttgaaacaagcggaagtgtaacagcaacaaatcgtagcggacaatggagatttaaagttgtagatccactttatgaaagcatggaagatcaagaaattttatttgagcttgctaaaaaattaggtttttatgaagactttaccaagactttacgcgatgaaaaaggtgagattgtttggcctgaaaatgcaacaagagaaattgcaaaagcagttagaagtatagggcttaatggttggagtcctgaaaggcttaaaaagcatactttatactgggataaatttgatgaggtaactttagaaggaaaagacgaagttgctggcgagtattacgggcttccttggccttgttggagtgataagcacccaggttctcctgtgctttataataccgacattgaagtagcaaaaggtggtatgggctttagaaacaattttggacttgaatatgaaggagagagtttacttgctaaaaatgcacctttaaattcacctattgatacaggttatccacaaattactaaagataatatagaaaaagttttaggtattactttaagtgctcaagaaaaagaaaaaatgggatcaacttggtcttatgatgatagcaatatcatagcaactaaatgtatagaaaaaggcatagttccttatggaaatgctaaagctagagctgtagtttggacttttaaagataaaattccactccaccgtgagcctttacattctccaagaaacgatttggtgcaaaaatatccaagttttgaagatcaaaaagcgctttaccgcgtggatact

SEQ ID NO: 3815 - DNA, 22007 bp, synthetic construct
  misc_feature 1..22007: note = Synthetic
  source 1..22007: mol_type = other DNA
tttatcaaagacaaagaacacataaaaaatatcgttttagtgggaatgggtggttcaagttgtggtgtaaaagccttgcgtgatatgctttttaatgaaaaaagcaaccaaagagaactttttatactcgataacacaagttcacattcttttaataagactttagaaaaaatcaagcttgaggaaagtttgtttttaatcatcagcaaaacaggtagtactatagaagttgtatcgctttttaaacttcttattgaacattttaaacttgatatgcaagaattaaaaaaatactttgtttttattaccgataaggattcaaaacttcatcaagaaggtgaaaatttaggtattaaatgcttttttatccctgcaaatgtaggaggtcgttttagcatactttcagccgtaggtatagttccgctttgtttttgtggctataatgccaaagctcttttagaaggagctaaagcttgttttgaagatttttttactcataaaaaagatgaaattttacaaaaagcctatcattattgcacacacaaaaatgccaatatcaatgtacttttttcatatagtgatgcttttaaaggctttaatgaatggtatatccagcttattgctgaaagtttaggtaaaaagcaaggctataaacgtataggtttaactcctattgcactcattggagcaagagatcagcatagttttttacaactcattatggatggacctaaaaataaaactgtaacttttttaaaaatcaaagacgctcaaaaagcacctattatccctgatattcattttaaatttttagattctttaagtaataaagtcaatcttcacgaacttttaaacgctcaatgtaatgcaactatgcacgctttaatcgctgaaaatttgagtgttgatgtgatagaacttgaaaaacttgatgcttggcatgcgggatatttgatgtattattatgaactttttacttcaacttgcggtgttatgctagggattaacacctatgatcaacctggtgtggaagttggaaagttgatcttaaaaaatatattaaattcttaatcaaaattcattaaaaaagagtataataattttaagttaaaattataataaaaatttttaattaataataattattatttaagaattttatgttataattttaaaaattaaaaaaggagtcaatcatgtcagttacaaaacaattattacaaatgcaagcagatgctcatcatctatgggttaaatttcataattatcactggaatgtaaaaggtttgcaatttttttctatacacgagtacacagaaaaagcttatgaagaaatggcagaactttttgatagttgtgctgaaagagttttacaacttggcgaaaaagctatcacttgccaaaaagttttaatggaaaatgcaaaaagtccaaaagttgcaaaagattgctttactccgcttgaagtcatagaactgatcaaacaagattatgaatatcttttagcagaatttaaaaaactcaatgaagcagcagaaaaagaaagtgataccacaacagctgcttttgcgcaagaaaatatcgcaaaatatgaaaaaagtctttggatgataggcgctactttacaaggtgcttgcaaaatgtaatttaaggggctttatgccccaattatacaaactaggttataatatccttttttaaaggataaaattgaaagtacttaattttttttatgaaaaccaccctaaatttgaagtaagttatgaaagaaaaaatcaaatttcaaaaccaaatattatcataaaaggcccacgattttgtggtaaaaaaacacttatttttaattttttatctcaatttaaagcaagtgaaattttgtttttagatttatatgatacacgctttgaaaaacaaagtttagaaagacttgctgattttttgaatgaaaatttacaaattaaaattctttgcctttataatttggattttatccctaatttagaaaaaattaaaattcccatcatcttaagtacaaatataaaagatttaaatataaatgggtttgaagaacttgaacttgattattttgattttgaagaatttattagtgtaagtaagaaaaatttacctataaataatttagtaggtctttttttgcaaagtggacgcagtaaatttggagaaaaaaacatacttctaagacaaagctttactcttttagaattagaaattttaaagtatttagctttaaatttgggtcagcaaatcagtatttctaagatatttatacaacttaaaaaaatattaaaaacttcaaaagatagtgtttatcaagctataaaaaaattagaaaatacttatgtgatctatactttaaaacatgatgaaaaaaaacttcaaaagatttattttaaagattttggcctaagaaataatctttgtatttcaaaggatttttcgcatttatttgaaaatttagttttaagcgagttgtttaaatttaaagaagattttttttataacaaatactttaacttttatagccaaatatctaaaattgcttatatttcaagtccaactttagatattgatttgattaaattacgtgctaagaaaattttaccaaaggctttagaacttggaatttttcatgtgatttttatcactctttcaagcgaggatagtttttttgagcaaggggttaaatttgaagtcatatcttttgataaattttcacttggattttaggtgttgtttgagtttgtatcgtatttttcaaggttgtatcgtttgatgatttttgtaataagattgatataatatcccttgcgttcagaataagaatctaaagttttaatagcctctagtcctgttatctctttgccttcgcttgcaaatttagctcttgcatcgcgaaacttttcataagcaaaatgacgatttaaatttaaaacataagagtaaacactatcttgcagactatcaaaaatcttaattttatgttttttatctggatgtcttaaatcaggaattaaacctttctcaccccaagtccattctccaaaaagattatttgcttctcttgcgaagcgacttgtacctgtagcactttcaactaaagcttgggctatacccatggattttggaattttttgaatacgttttttatattctgcaaaatcataaagattttcaatgcgatatttgttttttatcgtgataagtttttcaagatttgtttgatttgaagtcctaaagcctgttttgtaagcatctttaaaaaaggcttcgataaaagctctttcttgttcaatttttttaaagctttgatcaaacatttcattcatttttataaaaaaaatttgtcttttttgatctatatcaagtttgtaatattcctctccaaagccattttttagatcatcagcaaaaagtgggattagaaaaagactaagaaaaattataattggcttcaaaacaatactttacctttccttcaaaaaacaattcttcatttttatatgtaaacccaacctcttcaccacttttaggagttattttaactttattttgtacttttttatttaaaaatgccagataaaaacaagcccccattcctgtgccacaagctaaggtttcatcttcaactccgcgttcataggtacgaacttttaaatgattttcatctaaaatttttacaaaattaacattggcattatatttttgtctcattttttgacaaagtattgtatcaaattcatctaaattttgacaaaaatgcactagatgtggaactccagtgtcgcaaagttgccaagtttttcctaattcttcaaaagtattttgcacgctttttattttgcctaaagatacttcaactttatcttgatttacctttgcttttattattcctgcaccggttaaaaaactcatgttaggatttattttgttaatatgatgtgcaaaatgtgccgcagcccttgagccattgccacacatagcagcccttgagccatcgttattataaaattcccattcaaagtcgtatttttcatgaggcaatatcacgataaagccatccccacctatgccctcataacgattgcaaagttctttagctaaagcacttctatcttcttttctatcagcatttgttatgacaaaatcattcccacttgcacaatatttataaaatttcacatttttcctttagaaatttcttgtattactttaacacattcttgcctaaaatcgacataagaattagtatttttaatgataaaatctgcttttttaagtttttcttcaatatctatttgagaatcaagtctcacttttgcagcttctaagctgagcttatctctttgcatgattcttttaaggcttaattctttaggtgtgtaaattacaatgactttgcctaaattttcataagcaccgctttcaaaaaaaagaggaatttctacaaaaaaagctttattttctttatctagaatttgcatttgttctaaaattttagctcgaattttaggatgagtgaaattttctaaggtttttttagcttctttgttgttaaaaacaatttctccaaggatttttctatcgattttcttttcttttgtgagtaaattttttaagttaaagggagaaaaaatcttttcaagttctaaagcattttcatctaaaattttatgagcaattttatctgcgctaatgcttttaaagcctaaagaattcgctatttctataaaagtgcttttaccacaagcaattgaagcggttacaaaaaaagcatttttcatcttatgccttattaaaacttttttcgttaaaatacctttttagttcttaaaggaaaataaatgaaaatttcatatgaagatgcaggcgtaagtatagataatggaaatgcctttgtagaggctataaaacctttggttaaagaaacttttaatgataatgttgtaggcggaattggttcttttgctggtgcttttagaatgccaagtggttttaaaaagcctgtgattttaggtgcaacagatggtgttggtaccaagcttcgcttggcaattgatgctaaaaaatatgatactatagggcaagatttagtagcaatgtgtgtgaatgatttgatttgtaattttgctacgcctttgtttttcctagattattatgctacagccaagctcgaagtagaagtagcaaaggctgttgtatcaggcattgccaagggatgtaagatggcaaattgtgcattaatcggcggagaaactgctgaaatgcctggaatgtatgcaaaagatgattttgatcttgcgggttttgcagtgggtatggctgaagaagatgagatcgatagaagtaaatttgttaaaaatggtgatattttattggcacttcctagttcaggacttcattcaaatggttattctttagctagaaaagtactttttgaaagtttaaaattaaaatttgatgacaagataggggataaaaatttaattgatattttattagagcctacaaggatttatgtgcgtgattttcttacattaaagccttatattggtgctctagctcatattacagggggtggtttagtagaaaatttaccacgcgttttgcctcgtggtatgggtgcaactatacgcaaacatcatcttaaaactcctgaaattttttatactataggacaggctgtagaagaaagcgaaatgtatagaagctttaacatgggagtgggtttagtaatggttgtagatccttctaatgtaagtaaggttttagaaaattcagatgcctttattatcggcgaaatttgcattaatgaaggtattgttttagagtgaaaacaaattattatgattatttatgtgctaaaatgtatgtaattttgcccataaaagcccataaagacaaactaaaattttatctttcttatgtaaataagaaagataaaatttttagagttaatgtgtggaagtgggcggttttgataaaaattgccaaagatgataaaacgaaatatttttgttcgaatgtattaaataaagggtaaaatgcacaatttaaatgaagctttgtttcaaaaaaagataaaagaaattcgcttaaaggcaatagcgagtattatttgtgggtttttaggtatcattccttatcttggagttttatttgttcttgcgagttggattttattttttattgtgctttatgatttaaaaatctatggtggtgctaaaaatttgtttaagaatttccttattagtgtagggattggattttttggtattcttgttaatacaagtattttatttgcaatgctaaagcctagaactggcatttttggtgggctttattttaatcaagataatatttttatggctattgctatatttttagtattacattttgctattttggctttaatttttccttttttgaaagctttttactatgaaattgctagaacaacaaagcaaaagtatttcacttatgcttttaataccttttatttagggcttcttactttgattatcggcataggcttggtgtttttgctagcaagtttggttttttggattttagcgtgggtcaaatttaaagaatttgatgagcaagaactttcaaatttagaagaaagattggcaaaagcacaaaaaaaggtttttgattttgatttaaaatggattaaaatcacaatggcttcatttataattttaaacttgctcgttttaacattttcgtttatattagaagttattagctttgaagattttaggttttactacacaaaaaaaactttattttacacagccataatcctagctttgcttagtgtgtttttgttttgtaaaaagataaaaaattacaaactttttatttattttttcatatggcaaggtttaagtgtttttggtagtcatcttctttttattcctgattttatggtagatcaacaaattgtatatggaagtttaaacataatattaagtctatgctatattatttttgcttttttattttttaaaattttgattcaaattacaaaggaaaaacttttttatcttatttttgcattttatgtttgcatagaaattttgataatattaattttctttatttttatgatggttgataactattatatatttacaaaaagtcctataaagatgctcatagataattataaattactttttcaagttgtttatttcgtttcatttttaattgtttggcttatgcttaaaggacaaaaaaatgtaaaaatatgttagaatgatgaaaaaatactattttacgtagatgtttattaggatatattcgtatgtcttaaagctctttatggggtgttaagtaattataatatttaaaaattaaaaaatatatagtttatccacattttatagtttaacttctaaaaatttgatcatctcttttttcattttttagagctagaaaacatatgagtgaaattgctttaaagttagttagagcagttgatactaaatattttgataagaaatttaaatagattgattttacttaaattaaagactttttgcctcgtgatacaaaattaagtgatgaatttttagttaaattgatattaaatatgaaaaaattataaatattaatactttttcaaattaatagtaaatatagagggtttgattttttcacaaaagatttggatagaacttgcaaaaaactttcttcaatatttatacttttaagttttgatgcaaatcctattcaatatagcattggcaaaataaactaaaaagcttaaaatagctatactcaaaagaattccaaaccatgcaaaatttcctgttccaagatttgaaaccgcgttagtaaggatattaactccaccaagtgctttaatgcctttagcacatactccagcggcgatgattatgcttacgactaagataaaaatttcagccatagtcttttaaaatcaccatcatatcttcgcctaattttctagcatttctgtgtcttgcaaattcaacaagaaaaactaaagaaatgcttacaaaatttgctgttacaacatcgagcttgatagtaaaaaaatacgctgtaaataaaaatacaacaggtaaccaaggaaagagtatgtaaaaagtaggacatttaggatcaatgatttgcggaatttcaacttcatcatttaaaacacctttttctttatctcttttatcaatccaagcaaaataaaaaggaatcaagatggcaataactacaacataggcaatcacactataaatttggtaatttaaaaaaagccctacgacattatcactttgtcctaccatatctgccatattgattgaatttccatcttttggaccataatcaagtgcaattaaagaaagcgcacatacagttgtaataggacggattttaagtgagattaaaacaggataaatacatgctaacaaaagcaaaagcaatccagcatagctagaaatgacgatttttaaagccattccaacaacaaaagttccacttaaaatcaagtatttattttttgatttttcctaagagtttatttgctaaaaaagcaagttttgctgaagcattaatatgtttcatataagcagcaaaacctgtcacactcatgataataagtcctactccagaaagctgacttttaaaagtcgctgtgataaaagcataactatcaagtaaaacatttaaaagcttgtatactctctgcttggagcttttggtataggtgttcctgtgatataaaaagcaaaaataagcaagataatatttgaaagaaaaatacaaaaatgggatcgtatttttttgagtatatcataaaaattagcatagggtctattgaatttacaataaattggattttatctaaatttttaaataaaaaatattttttatttaaaaattacttgttttttgtattataaaattaacatatatagtttggttactgaaaagtttatgtttgtttaaaaaatgatttttgtattataattatacacaaatcataaatattaaaaaggatctagtgtggcaagaattttggcatttgatataggaataagctctattggctgggcatttagtgaaaatgatgagttaaaagattgtggagttaggatttttacaaaggctgaaaatcccaaaacaggagaatccttagccttgccaagacgccttgcaagaagtgctagaaaacgccttgctagacgcaaagcaaggctaaatcacttaaaacatttaatcgcaaatgaatttaagttaaattacgaagattatcaaagctttgatgaaagtttagccaaggcttataaaggatctttaattagcccttatgagttaagatttagagctttaaacgagcttttaagtaagcaagattttgcaagagtgattttacatattgcaaaaaggcgtggctatgatgatattaaaaatagtgatgataaagaaaaaggtgcgattttaaaagctatcaagcaaaatgaagaaaaactagcaaattatcaaagtgtgggcgaatatctttataaagagtattttcaaaaattcaaagaaaattccaaagaatttacaaatgttagaaataaaaaagaaagttatgaacgctgcatagcgcaaagttttttaaaagatgaattaaagcttatttttaaaaaacaaagagaatttggcttttctttttcaaaaaaatttgaagaagaggtgcttagtgtagcattttataaaagggctttaaaagatttttctcatttggtgggaaattgtagtttttttaccgatgaaaaaagagcgccaaaaaattcgcccttagcttttatgtttgtagcacttacaagaattatcaatcttttaaacaatcttaaaaatactgaaggaattttatatacaaaagatgatttaaacgcccttttgaatgaagttttaaaaaacggcactctaacttataaacaaacaaaaaagcttttgggcttaagcgatgattatgaatttaaagggggaaaaaggaacttattttattgagtttaaaaaatataaagaatttataaaagccctaggtgatcatagtttaagccaagatgatttaaatgaaatagcaaaagatattacccttataaaagatgagattaagcttaaaaaggctttagcaaaatatgatttaaatcaaaatcaaattgatagtttaagcaaattggaatttaaagaccatttaaatataagttttaaagccttaaaacttatcactcctttaatgcttgaaggtaaaaaatacgatgaagcttgtaatgagcttaatttaaaagtagcaatcaatgaagataaaaaagattttttacccgcatttaatgaaacttattataaagatgaggtaactaatcctgtggttttaagagcgattaaagaatacagaaaggtcttaaatgctttacttaaaaaatacggcaaagtgcataaaataaacattgaattagcaagagaagtaggtaaaaattatagccaaagagctaaaatagaaaaagagcaaaatgaaaactacaaggccaaaaaagacgccgaacttgaatgtgaaaaactaggcttaaaaataaatagtaaaaatattttaaaattaagattatttaaagaacaaaaagaattttgtgtttatagtggggaaaagattaaaattagtgatttgcaagatgaaaaaatgcttgaaattgaccatatttacccttattctagaagttttgatgattcttatatgaataaggttttagtttttaccaagcaaaatcaagaaaagcttaataaaactccatttgaagcctttggcaatgatagtacaaaatggcagaaaattgaagttttagcaaaaaacctgcctactaaaaagcaaaaaagaattttagataaaaattacaaagacaaagagcaaaaagactttaaagatagaaatctaaacgatactcgctacatcgcaaggcttgttttaaactatactaaagattatttagattttttacctttaagtgatgatgaaaatacaaagctaaacgacacacaaaaaggctcaaaagtgtatgtagaagcaaaaagcggtatgctaacatcggctttaagacacacttggggctttagcactaaggatagaaataaccatcttcatcacgccatcgatgcagtaattattgcttatgcaaacaactctatcgtaaaggctttttcagattttaaaaaagagcaagaaagcaacagtgcagaactttatgcaaaaaaaattagtgaattagattataaaaacaaaaggaagttttttgagccttttagtggttttaggcaaaaggttttagataaaattgatgaaatttttgtctcaaaacctgagagaaaaaagccaagtggagctttacatgaagaaacatttagaaaagaagaagaattctatcaatcatacggcggaaaagaaggagttttaaaagccctagagcttggtaaaatccgcaaagtaaatggtaaaatagttaaaaatggcgatatgtttagagtggatatttttaaacacaaaaagacaaataaattttatgctgtgccaatttatactatggattttgctttaaaagtattaccaaataaagctgtagcacgaagtaaaaaaggtgagataaaagactggattttaatggatgaaaattatgagttttgcttttctttatacaaagatagtttgattttaattcaaactaaagatatgcaagagccagaacttgtttattttaatgcttttacaagctctactgttagtttgattgtttcaaaacacgataataaatttgaaacgctaagcaaaaatcaaaaaatattgtttaaaaatgcaaatgaaaaagaagtaatcgcaaaaagcataggaattcaaaatctaaaagtatttgaaaaatacatagtttcagcacttggggaagttacaaaggctgagtttagacaaagagaagattttaaaaaatgagttacgatgaagcttttaaaacactgcttattagctctaatgccaagctaaatttagagctaaatcatcttgtgattaagcaagatgaaaatatagccaaattgtttttaaaagatataaatatcatcgttttagaaagcttacaaataagcattagttccgcactttttaacgcttttgcaaggcataaaatcatcttgctaacctgcgatgaaactcatagtataaatggtgtttttactccttttttagggcattttcaaagtgcaaaaatcgcaaaagagcaaatgaatgtaagtgctcaaaaaaaggctattttatggcaaaaaatcattaaaaataaaatcctaaatcaagcctttatcttaaaaaaatacaataaaatagagcaaagcaatgagcttataaatttggctaaaaaagtaagcttaaatgatagtaaaaatattgaagctgttgcggcggcgctttattttaaaactttgtttggtacttctttttcaagagatgagctttgctttgaaaattctgctttaaattatggctatgcaatcattagggcttgtattattagagcagtttgcataagtgggcttttgccttggcttggcataaagcacgataatatttataattcttttgcgctttgtgatgatttgatagaagtgtttagggctagtgttgatgattgtgttttaaagcttaagggtgaaagtgagtttttaagcaaagatgacaaaagagcgttgattggcaatttacaaagcaaaatcaattttgatgggcaaaattatcctttaaacagagcgataaatcattatgtggcaaattttaaaaatgctttattgtatgaagatgaactaaagatagtgaaatttgatgattgaagataaatttatgcgtgtgcttttgatgtttgatgtacctactaaaagtaaaaaagagcaaaaactagcaagtaaatttagaaataatcttataaaattaggttattttatgctgcaatttagtgtttatatgcgtatttgcaagggtttaagttctgcaaaaagttctattgaaaatgtaaaaaagattttgccaccttatggaaatgtaagggctttaatcatcactgaaaagcaatttgataaaatggagcttttgcttggtggcatagtttttaacgaaaaagttaataacgaaaccaatttaacgctttttgatatagatagtcatggagaatttaaatataaaaattcaaataatgaagaaattcaaataaacaaaaaacaagaaaaatatcatcagcaaaatttatttgaattttaaaagcggttttaggggattgtaaccccgcagagtcccgcaaactctttattttagtccctttttaaatttcttatgagattatagcataatttttgctatttttcatgaaaaaaccccgaaattttcattatctggtaaatatctattttaccataaagaaatttaaaaagggactaaaataaaccctagtggattgaaactccgctagggctaattactccactaaaaggaggttgcgaatttgaaacttattgaaatttagggttgattaaaatcgaaataaaattatttaaataattttaaggcataaagataatatccactaaactttcattttctaaaatttcacattcttttggcaccaccataagggcagctttattgttaagattgtttataatcgcactagagccttcttttttgccttcaagattggctaaaatgcgtccattttcaaactttatgttacaagcgacaaattccaaataaggtgtttttttcttgtaacttccttgtaaaaaggctttgcaaatatagtctttaggctgaagtaaccaagagtttaaaatctctcttgcgtaaagattaaacattaccatagccgagtaaggaaaacctggtaaggcgatgatgaatttttcattagccttagctattttgatatgtctacctggttttatgtcggctttatcgatgatgatttcgtattctttgatggctttttttaaaaagtcaaaatctcccatagaaaccccgcccgttgtaaccaaaatatcacaactttgcaaagcactttcaagggtggaaaaagtggctttctcatcatcttttaaaagaggaaaaacccttgtatcgcaatttaaatttttagctaaattagctatggcgatatgatttgaagagcggatttgagcaggattttccaaggcttctcctagatctttgatctcacttccactacttaaaacccctacaataggctttataaacacactaatgtgaaaaaatccaagttcagctaaaagagctatctcgctataatttaactttgtgccttttttgagtaaaatttcatcttttttatagttttctcctaccgcacgcacggcaaaagcttggggaacttttttttctataaaaagagtatcattttctatgcgtatattttcaacagggactaaagtatcgcttccttcgctcatgagtgagcctgtaaaggtttttacacaagtgccattttgtacgctaaattgtggcatagtgcccgcaggtgtgaggcctaaaatttttaaaggcttgtcttgatcttcaaatttgatcgcataaccatccatagccgaggttggaaattcaggctgatttttaggggcttttatgtcttgagctaaaatgcgtcctaaacactctgtaagagctattttttcaatcttttcataagttttaatatgagaatgtaaaatttttaaactttcttcataagacattaacattttttatccttttaaaagtcctgcaccgcaaagtttggttgatctttctttgacataaattctttctttgtttatcacatcatacttccaaatgggtgcacttgctttaaaatcttcaacaaattcattaagaagtttaagtcctaattttctttgtttgcttaaaattcctgcaaaataagagctttcatgaaccgctacatcgcctatagagtgagcaaaaagcaaggtaataccatcaaaatctactcttttttgccactcattaaaccatttttttaaaagcggtttataaatatcaaaactaagtgcctcaatgcctccttcttcacgcacaataccacaaaaagtcagcaaagcaccgcagtttttatccttggcaaattcataccattggctataaattttaggaatatctaaagaaccttgatagagtgtaaaatgttccatttagcccccacaaactggcggtaaaagtgctattttatcaccatcttttaacttagtgttttcatcaaaaatgatttcatcatttaaagataccgcacaaagttctagccattcttttaaactctcatctttttgcaaaatttcttttaattcttttaaattttttaccttaagttctaaattttctttatttatggggcctaaaaattccacttttaccattttattcctttacttctaaatttcccatcattcctaaatcttcatgttctaaaatatgacaatgatacattctaagccctttaaaatcttgtttcattctaagtcttaactcttcattaggacgcacatttatagtatctcttaaggctctaaattcagctttttgaactttgccattgagttttgatgagatgagttcaaattgcgtgccgtgtatgtggaaaggatgatccatgtgagatttgtttatcactatccagtcttcaactactccaagtttggagcttaaatcaatgcgttttaaatcatagcttttgtcattgattaaaaacatagacgcaagagcgatttttaattcgctttcactttttcccaacataccatgcatttgcatatgatcttcactcatgattatttctttaaattccttaggttcttctgaaggtttgaaaatttttaaattttttggaagttctacattttctttttttaggttaatattggctagaaatagggtattaggttcttcttttaccatcattttatccctatcataataagcactttctagcttaaaattcccatcttttggagcgtcgattaaaacttctacacgagaagcaggacttaagaaaagttcttccttataaatagttttttctataagtccgccatcagtaccaacaagtataaacttagctccttgtatgcgtaaatttaaatatcttgccgcagtagcattataaatacgtatgcgttcgtttgtggtgagtttaattttaggtttaaattgtccattgatgagtacaaattctccttctctaccattaagccaatcatttaggttgttgtttggaatttgagcgttttcatcaagacgtaaatcgctaatcatcaaatctctttcttttaaatgacttaaagcatcttttttcgctttgatcacaaaagccccagctaaacccataaagacttgtttagaagtggtataatgaggatgcggatgataccagtaagttcctgcgctatcttgaggaatttcaaaacgatatattctttcttcccctgctaagataggatcatgtgggcttccatcttgatcaggtggtacaggaacgccatgccaatgtatagttgtagcttctttgagtttgtttttgactaaaatttcaagtttatctccttcaaaaacttctatttttggagcaggcacgaggccattgtaagtataaaataaggtttttttacctttgataagttctatatgattttctttgatttctagggtagcacgaaaaatatttttttctttactttcatttttgagtaaaggcaaggcttttaaaatttctccttgggggaattgttttggatctaaaagctttaaattttttggagcaaagtttataaaagaagtatctaagtcatgatttatagaatgatttttatgcatggagtgcatatcgtgcataggatttgcataggctacacccatacttgctagagtaagtgcattaaattttaaaaaatttcttctattcattagtttttccttttgcttgattttttgtattatagtcattatttttttaactttagtaaatatttattttgaaaatttggtttaattttgttatgattttagcaatttaatcaaggaaaaataatgttttatgaaaaaattcaaactccagcttatattttagaagaagataaattaagaaaaaattgtgagcttttagcaagtgttggcgaaaaaagtggtgctaaagtgcttttagctttaaaaggttttgctttttcaggagcgatgaaaattgttggagaatacttaaaaggttgtacttgtagcggactttgggaagcaaaatttgctaaagaatacatggataaagaaattcatacttattcgcctgcttttaaagaagatgaaatcgatgaaatagccagcttatctcatcatatagtgtttaactctttagctcaatttcataaatttcaagctaaaacacaaaaaaattccttaggtcttcgttgtaatgttgaattttctctagccccaaaagaactttacaatccttgtggaagatactcaagacttggaattcgtgctaaagattttgaaaatgtggatttaagtaccatagaaggacttcattttcacgcactttgcgaagaaagtgctgatgctttagaagctgttttaaaggtttttgaagagaaatttggcaaatggatagggcaaatgaaatgggtgaattttggaggagggcatcacatcaccaaaaaaggctatgatgttgaaaaacttattgctttgtgtaaaaatttcagtgataaatatagcgtgcaagtttatcttgaaccaggcgaagcggtgggttggcaaacaggaaatttagtggctagtgtagtagatatcatagaaaatgaaaaacaaattgctattttagacacttcaagcgaagcgcatatgccagatactatcatcatgccttatacaagtgaagttttaaatgctagaattttagccacaagagaaaatgaaaaaatttcagacttaaaagaaaacgaatttgcctatttacttactggaaatacttgtttagcaggtgatgtaatgggagaatatgcctttgataaaaagcttaaaatcggcgataaaattgtttttttagatcaaattcattacaccattgtgaaaaacacaacttttaatggcataagacttccaaatctcatgtttttagaccgtaaaaatgaacttcaaatgataagagaattttcttataaggattattctttaagaaattagtgttatttataatttgcataaaatgttaattttactcggaagagaatcaaagatataaattttatgcaaagtattttattttttcaaatataaaatcaactcaaatatctaatttttaatactttggtatgattttttaatattttaaatccttgtggaattttattgaaattcagtgatttttaaatcaaatagtattaagataaatcgatttaaaaatcggctttaaaatgaatattaggtatattttgtataatattcattcaagcaaaatttaaagctatttttgaaaattttgaatgcatgggggctttaatggatttggaaaaattaagattagctagaagtctttattatcaatgtctaggagagctttttgttttttcattttctgaagaaagattgtcaaaattacaagagtatttaaagacaatgcaagaatgtttatttgatgaaaatttaaaatcaaattttgatatcttgcttaagcatttagatgatgaaaattctatacaagcattttttaaagaatatgatttgctttttttaagtcttaaaaatagcattccaacgactttttcttacatagaagaaggttttgaaaattcaaatcctttactttgcgtgcgtcaaattttagtcaaaagtaaaataagacgcaatgaaaaattttttaaagaaagtgaagatagtgttggattttgtttattgttgatgagtgaatttttaaggcaaaatgaagatgatttagccaaagagctttttgaaaaagtgatcaataaaagcattgatgagtttttaggcgatgttttcatgaataaaaatgcgaatttatataaggaaattgcaagtattgcatcggcttttatggaatttgaaagattttgctttgaagtggaaaaacctgcaaaaataaattctaaaaaagtgcaaaacgatctatcgcgttcagaatttttaagaagagaagcaaataaacaaaggaggactcgtgaaaaatcgcagggaatttcttaaaaaatccgcttttgccttaggggctgctggagtgcttggtagcacaactttagctctagctaaagatgaagaaagaaaagatttggttaaaggtaaaagtaagaaaaaagaagtgctttttcaaagaagtgctaattgggaaaattattatataaaggctgagtaatgtcaagtgtaggtgaaaatatcaagcttacgcgtcgttcttttcttaaaatggcagcactttcaagcctagcaacaccgttgcttgctagaagtgaaactttaagagaagcgagtgctgatgagcttaaagaagcttatgaaggtagtaaaaaagtaaaaacagtttgtacagcctgttctgtaggctgtgggattattgcagaagtgcaaaatggtgtttgggtgcgtcaagaaattgctcaagatcatcctgtgagttcaggtggacattgctgcaagggatctgatatgatcgatatggtgcgttcacatgtgcgtttaaaatatcctatgaaaaaagaaaatggagaatggaaacgcataagttatgagcaagctttaagtgagatcggagaaaaactagctgcttatcgtaaagaaaatcctgaaagtgttatgtttttaggttctgcaaaacttaataatgaacaagcttattatataagaaaatttgcagcattttttggaacgaacaatgtagatcatcaagctagaatttgacacagcgcaacagtcgccggtgtggcgaatacatttggttatggcgctatgacaaaccatcttggagacattcaaagaagtaaatgtatcattatcattggggcaaatccagcggtaaatcatcctgtgggttttagacatttcttaaaagcaaaagaaaaaggtgcaaagcttatcgttgtagatcctagatttacaaaaagtgcggcaaaagcggatatttatgcaagaattcgtccaggaaccgacattgctttcatgtatggaatgctaaaaatcatctttgatgaaggcttagaagatacaaaatatcttgatgaaagagtttttggaatcgataaaattcgcgaagaagcagcaaaatggacagctgaagaagtagaaaatgttacagggatctctaaagaacttttggtgcaaatcactcacgaagtagctaaaaacaaaccaactacgcttatttgggctatgggtttaactcaacacactgtaggaacttcaaatacacgtttagcacctattgtgcaaatggtacttggaaatataggtaaatttggtggtggagttaatatcttacgcggacacgataatgttcaaggtgcttcagatatggcttgtttgagcgaaaatttaccaggttattatcctttaaatgaagcgacttggagatactatgccaaaatttggggtgtggattatgagtggcttttaggaaattttgtaagcaaagattggatgcataaaactgggctttcacttgctagatggtgggcagcggctttaaatggaaaagatggaaatgatgctatcgataatgcaggaacgcctttaaaagctttagtagttatgggaaatggtattacttcgactgcacaacaagtaaaagttaaagaaggtttggaagctttagagcttttagttttagccgatccttttgtaaatgaagcagggattattgcagaaagaaaagatggaatttatcttttacctgcagcaacacagtttgaaacaagcggaagtgtaacagcaacaaatcgtagcggacaatggagatttaaagttgtagatccactttatgaaagcatggaagatcaagaaattttatttgagcttgctaaaaaattaggtttttatgaagactttaccaagactttacgtgatgaaaaaggtgagattgtttggcctgaaaatgcaacaagagaaattgcaaaagcagttagaagtatagggcttaatggttggagtcctgaaaggcttaaaaagcatactttatactgggataaatttgatgaggtaactttagaaggaaaagacgaagttgctggcgagtattacgggcttccttggccttgttggagtgataagcacccaggttctcctgtgctttataataccgacattgaagtagcaaaaggtggtatgggctttagaaacaattttggacttgaatatgaaggagagagtttacttgctaaaaatgcacctttaaattcacctattgatacaggttatccacaaattactaaagataatatagaaaaagttttaggtattactttaagtgctcaagaaaaagaaaaaatgggatcaacttggtcttatgatgatagcaatatcatagcaactaaatgtatagaaaaaggcatagttccttatggaaatgctaaagctagagctgtagtttggacttttaaagataaaattccactccaccgtgagcctttacattctccaagaaacgatttggtgcaaaaatatccaagttttgaagatcaaaaagcgctttaccgcgtggatactaaatttgtgtctgtgcaacaagctaaggattattctaaagaattcccgcttaatcttgttactgcaagacttgtgaatttaaatggtgcaggtatggaaaatagagcatctatgtatctaacgcgtttaacacctgaaatgttttgtgagatcaatcctgaattagcaaaagagcaagacattaaag

SEQ ID NO: 3816 - DNA, 21881 bp, synthetic construct
  source 1..21881: mol_type = other DNA
  misc_feature 1..21881: note = Synthetic
gtgggttggattacaggacatacttatgtagtttatgggcctttagcatgtggagcaacgactataatgcatgaaggaactcctacttatccaaattctgggcgttggtggagaatgatagaagagtatcaaataagcaaattctacacttcgccaactgctataagaatgcttcatgctgatgcacctgatgagccaagaaaatatgatttaagtacgcttgaagtgcttggaacggttggagagcctatcaatcctagtgcttggaagtggttttatgatgaaatagggggagctaaaagtcctatagtcgatacttggtggcaaacagaaacaggtgggcatatgatcacgcctttaccaggcgctactcctttaaaaccaggttgtgctaccttgcctttgccaggaatttttgcagaagttattgatgaagaaggcaataaaaaagatgaaggtgaagatggattgctttgtataaccaaaccttggccttcgatgattcgtggaatttggggtaatgatgaacgctatatagaaagttatttttctcaagctagaaaagatggaaaagctgtatattttagtggcgatggtgctttttatgataaaaatggttatattaccatcacaggaagaacagatgatgtggttaatgttgcaggacatcgtataggaacggctgaaattgaaagcgctattgctaaacatccaagtgtagcagaatcagctgtagtgagtattttggatgcgattaagggcgagtcactgtttgcttttgtggttttaagtcctacatccagttgtgatcttggcggagctatagaaactttaaaagaacttaatgacattttaagagtagaaataggacctatagctaaaatagaaaaaattctttatactccaggtttgccaaaaactagaagtggtaaaataatgagaagaattttaagaactatagcaagaggtgaagaaattaaacaggatatttcaacacttgaagattctggagtagtagaaaccattgttaaattagctaaggcagagtttgaataacaaggcaaaaagaactttgccttgttgcataaaaattcataaaaataagctataatgataaaaaaataaaaggaaatttttatgcttcaaacttgtattttccctgcggcaggttatgggacaagatttttacctgcaacaaaaactttacctaaagagatgttacctatcttaactaagcctttgatccattatggggttgatgaagctttggaagcaggaatggaaaatatgggctttgtcacagggcgtggaaaaagagctttggaggattattttgatatttcttatgaacttgagcatcaaatttcaggtacaaaaaaagaatacttacttgatgaaattcgctctttgatcaatcgttgcacctttacttttacaagacaaaatcaaatgaaaggcttaggtgatgcggttttaaaaggtaaacctttagttggcgatgaagcttttggcgtaattttagccgatgatttgtgtgttaatgaagaaggcttaaatgttatggctcaaatggtaaaaatttatgaaaaatatcgctgcaccatcatagctgtgatggaagtaccaaaagaacaagtttcaaactatggagtaatttctggaaattttgtagaagaaaatcttattatggttaattctatgatagaaaaaccaagtcctgatgaagctccaagtagtcttgctatcataggaagatatattttaactcctgatatttttggaattttagaaaatactaaagtaggaaaaaatggcgaaattcaacttaccgacgcgcttttaactcaagcaaccaatggtatggttttagcttataaatttcaagggaagcgctttgattgtggaagcgtagaaggctttgtagaggcgacaaattatttttacgagaaaagtaaatgttaaacaatacacttttttttaagcaaagtgaaattcacactataagttcttatgcaaatcgtattaatgatgaggtaaaaagtggagatgtagggtattatcatcttattgacacaagtttgaatttaatcgatgagagcttgaaatttattcaagataaagaatatgtaaaaaatatcgttttagtgggaatgggaggttcaagttgtggtgtaaaagccttgcgcgatatgctttttaatgaaaaaagcaaccaaaaagagctttttatactcgataacacaagctcacattcttttaataagactttagaaaaaatcaagcttgaagaaagtttgtttttaatcatcagtaaaacaggtagcactatagaagtcgtatcactttttaaacttcttattgaacattttaaacttgatatgcaagaattaaaaaaatactttgtttttattactgataaggattcaaaacttcataaagaaggtgaaaatttaggtattaaatgcttttttatccctgcaaatgtaggaggtcgttttagcatactttcagccgcgggtatagttccactttgtttttgtggctataatgccaaagctcttttagaaggagctaaagcttgttttgaagatttttttactcgcaaaaaagatgaaattttacaaaaggcttatcattattgcacacacaaaaatgccaatatcaatgtgcttttttcatatagtgatgcttttaaaggctttaacgaatggtatatccagcttattgctgaaagtttaggtaaaaagcaaggctataaacgcataggtttaactcctattgcactcattggtgcaagagatcagcatagttttttacaactcatcatggatggacctaaaaataaaactgtaacttttttaaaaatcaaagacgctcaaaaagcacctattatccctgatattcattttaaatttttagattctttaagtaataaagtcaatcttcacgaacttttaaacgctcaatgtgatgcaactatgcatgctttaatcgctgaaaatttgagtgttgatgtgatagaacttgaaaaacttgacgcttggcatgcgggatatttgatgtattattatgaactttttacttcaacttgcggtgttatgctagggattaacacttatgatcaacctggtgtggaagttggaaagttgatcttaaaaaatatattaaattcttaatcaaaattcattaaaaaaagagtataatgattttaagttaaaattataataaaaatttttaattaataataattattatttaagaattttatgctataattttaaaaaccaaaaaaaggagtcaatcatgtcagttacaaaacaattattacaaatgcaagcagatgctcatcatctatgggttaaatttcataattatcattggaatgtaaaaggtttgcaatttttttctatacacgagtacacagaaaaagcttatgaagaaatggcagaactttttgatagttgtgctgaaagagttttacaacttggcgaaaaagctatcacttgccaaaaagttttaatggaaaatgcaaaaagtccaaaagttgcaaaagattgctttactccgcttgaagtcatagaactgatcaaacaagattatgaatatcttttagcagaatttaaaaaactcaatgaagcagcagaaaaagaaagtgataccacaacagctgcttttgcacaagaaaatatcgcaaaatatgaaaaaagtctttggatgataggtgctactttacagggtgcttgcaaaatgtaatttaaggggctttatgccccaaattatacaaactaggttataatatccttttttaaaggataaaattgaaagtgcttaattttttttatgaaaatcaccctaaatttgaggtaagttatgaaagaaaaaatcaaatttcaaaaccaaatattatcataaaaggcccacgattttgtggtaaaaaaacacttatttttaattttttatctcaatttaaagcaagtgaaattttgtttttagatttatatgatacacgttttgaaaaacaaagtttagaaagacttgctgattttttgaatgaaaatttacaaattaaaattctttgcctttataatttggattttatccctaatttagaaaaaattaaaattcccatcatcttaagtacaaatataaaagatttaaatataaatgggtttgaagaacttgaacttgattattttgattttgaagaatttattagtgtaagtaagaaaaatttacctataaataatttagtaggtctttttttgcaaagtggacggagtaaatttggagaaaaaaacatacttttaagacaaagctttactcttttagaattagaaattttaaagtatttagctttaaatttgggtcagcaaatcagtatttctaagatatttatagaactcaaaaaaagattaaaaacttcaaaagatagtgtttatcaagctataaaaaaattagaaaatacttatgtgatctatattttaaaacatgatgaaaaaaaacttcaaaagatttattttaaagattttggcctaagaaataatctttgtatttcaaaggatttttcacatttatttgaaaatttagttttaagcgagttgtttaaatttaaagaagaatttttttataacaaatactttaacttttatagccaaatatctaaaattgcttatatttcaagtccaactttagatattgatttgatcaagctacgtgctaagaaaattttaccaaaggctttagaacttggaatttttcatgtgatttttatcactctttcaagcgaggatagtttttttgagcaaggggttaaatttgaagtcatatcttttgataaattttcacttggattttaggcgttgtttgattttgtatcgtatttttcaaggttgtatcgtttgatgatttttgtaataagattgatataatatcccttgcgttcagaataagaatctaaagttttaatagcctctagtcctgttatctctttgtcttcgctttcaaatttagctcttacatcgcgaaacttttcataagcaaaatgacgatttaaatttaaaacataagagtcaacactatcttgcagactatcaaaaattttaattttgtgttttttatctggatgtcttaaatcaggaattaaacctttctcaccccaagtccattctccaaaaagattgtttgcttctcttgcgaagcgactggtacctgtagcactttcaactaaagcttgggctatacccatggattttggaattttttgaatacgttttttatattctgcaaaatcataaagattttcaatgcgatatttgttttttatcgtgataagtttttcaagatttatttggtttgaagtcctaaagcctgttttgtaagcatctttaaaaaaggcttcgataaaggatctttcttgttcaatttttttaaagctttgatcaaacatttcattcatttttataaaaaaaatttgtcttttttgatctatatcaagtttgtaatattcttctccaaatccactctttagatcatcagcaaaaagtgggattagaaaaagactaagaaaaattataattggcttcaaaacaatactttacctttccttcaaaaaacaattcttcatttttatatgcaaaccctacctcttcaccacttttaggagttattttaactttattttgtacttttttatttaaaaatgccagataaaaacaagcccccattcctgtgccacaagctaaggtttcatcttcaactccgcgttcataggtgcgaacttttaaatgattttcatctaaaatttttacaaaattaacattggcattatatttttgtctcattttttgacaaagcattgtatcaaattcatctaaattttgacaaaaatgtactagatgtggaactccagtgtcgcaaagttgccaagtttttcctaattcttcaaaagtattttgcacgctttttattttgcctaaagatacttcaactttatcttgatttacctttgcttttattactcctgcaccggttaaaaaactcatgttacgatttattttgttaatatgatgtgcaaaatgtgccgcagcccttgagccattgccacacatagcagcccttgagccatcgttattataaaattcccattcaaagtcgtatttttcatgaggtaatatcacgataaagccatccgcacctataccctcataacgattacaaagttctttagctaaagcacttctatcttcttttctatcagcatttgttatgacaaaatcattcccacttgcacaatatttataaaatttcacatttttcctttagaaatttcttgtattactttaacacattcttgcctaaaatcggcataagaattagtatttttaatgataaaatctgcttttttaagtttttcttcaatatctatttgagaatcaagtcttgcttttgcagcttctaagctaagcttatctctttgcatgattcttttaaggcttaattctttaggtgtgtaaattacaatgactttgcctaaattttcataagcaccgctttcaaaaaaaagaggaatttctacaaaaaaagctttattttccttatctagaatttgcatttgttctaaaattttagctcgaattttaggatgagtgaaattttctaaggtttttttagcttctttgttgttaaaaacaatttctccaaggatttttctatcgattttattttcttttgtgagtaaattttttaagctaaagggagaaaaaatcttttcaagttctaaagcattttcatctaaaattttatgagcgattttatctgcactaatgcttttaaagcctaaagaattcgctatttctataaaggtgcttttaccacaagcaattgaagcggttacaaaaaaagcatttttcatcttatgccttattaaaacttttttcgttaaaatacctttttagttcttaaaggaaaataaatgaaaatttcatatgaagatgcaggtgtaagtatagataatggaaatgcctttgtagaggctataaaacctttggttaaagaaacttttaatgataatgttgtaggtggaattggttcttttgctggtgcttttagaatgccaagtggttttaaaaagcctgtgattttaggtgcaacagatggggttggtaccaagcttcgcttggcaattgatgctaaaaaatatgataccatagggcaagatttagtagcaatgtgtgtgaatgatttgatttgtaattttgctacgcctttgtttttcctagattattatgctacagccaagcttgaagtagaagtagcaaaggctgttgtatcaggcattgccaagggatgtaagatggcaaattgtgcattaatcggcggagaaactgctgaaatgcctggaatgtatgcaaaagatgattttgatcttgcgggttttgcagtgggtatggctgaagaagatgagatcgatagaagtaaatttgttaaaaatggtgatattttattggcacttcctagttcaggacttcattcaaatggctattctttagctagaaaagtactttttgaaagtttaaaattaaaatttgatgacaagatagagggtaaaaatttaattgatattttattagaacctacaaggatttatgtgcgtgattttcttacactaaagccttacatcagtgctctagctcatattacagggggtggtttagtagaaaatttaccacgcgttttacctcgtggtatgggtgcaactatacgcaaacatcatcttaaaactcctgaaattttttatactataggacaggctgtagaagaaagcgaaatgtatagaagctttaacatgggagtgggtttagtaatggttgtagatccttctaatgtaagtaaggttttagaaaattcagatgcctttattatcggcgaaatttgcattaatgaaggtattgttttagagtgaaaataaagcgtcaatacgctttatttttgtattttaagttctatttttgtagtgttttgttcttttggcaaaggattggtttgtgctagataaaaggctacaagtacatttacaagcatagcgataagtaaaagaggagtggttcgttttataatatccattggagctacttttgcaaatccagctaaagctatgattccgcctgctattggtgaagctgcacgacctaaacaagatgcaatttctataggtaaaactagagtaataggtgcaacgcctaattttgtagctatatcaggagctagttttccaaaagcattaaaagcagcaattccacttcccataatcactgtggcaaaataaactaaaaagcttaaaatagctatactcaaaagaattccaaaccatgcaaaatttcctgttccaagatttgaaaccgcgttagcaaggatattaactccaccaagtgctttaatgccttcagcaaatactccagcggcgatgattatgcttacgactgagataaaaatttcagccatagcttttaaaatcaccatcatatcttcgcctaattttctagcatttctgtgtcttgcaaattcaacaagaaaaactaaagaaatgcttacaaaatttgctgttacaacatcgagcttgatagtaaaaaaatacgctgtaaataaaaatacaacaggtaaccaaggaaagagtatgtaaaaagtagggcatttaggatcaatgatttgcggaatttcaacttcatcatttaaaacacctttttctttatctcttttatcaatccaagcaaaataaaaaggaatcaagatggcaataactacaacataggcaatcacactataaatttggtaatttaaaaaaagccctacgacattatcactttgtcctaccatatctgccatattgattgaatttccatcttttggaccataatcaagcgcaattaaagaaagcacacatacagctgtaataggacggattttaagtgagattaaaacaggataaatacatgctaacaaaagcaaaagcaatccagcatagctagaaatgacgatttttaaagccattccaacaacaaaagttccacttaaaatcaagtatttatttttgatttttcctaagggtttatttgctaaaaaagcaagttttgctgaagcattgatatgtttcatataagcagcaaaacctgccacactcatgataataagtcctactccagaaagctgacttttaaaagtcgctgtgataaaagcataactatcaagtaaaacattcaaaaagcttgcatgttctctgctcggggcttttggtataggtgttcctgtgatgtaaaaagcaaaaataagcaagataatacctgaaagaaaaaatacaaaaataggattgtattttttaagtatataataagcaacgacaattaccgctaaaagtgtagaacatatcataaaaattggcatgatttctcctaaagttattattagcttttattttattttagctaaaatttaactaataaatatttttcatttaaaattttacttattttttgcattataaaattaataatatgtatagtttggttactgaaaagtttatgtttgtataaaaaatgatttttatattataattataaacaaattataaatatcaaaaaggatctagtgtggcaagaattttggcatttgatataggaataagctctattggctgggcatttagcgaaaatgatgagttaaaagattgcggagttaggattttacaaaggctgaaaatcctaaaacaggagaatccctagccttaccaagacgccttgcaagaagtgccagaaaacgccttgctagacgcaaagcaaggctaaatcacttaaaacatttaatcgcaaatgaatttaagttaaattacgaagattatcaaagctttgatgaaagtttagctaaggcttataaaggctctttaattagcccttatgagttaagatttagagctttaaacgagcttttaagtaagcaagattttgcaagagtgattttacatattgcaaaaaggcgtggctatgatgatattaaaaataatggtgatgaagaaaagagcgagattttaaaagctatcaagcaaaatgaagaaaaactagtaaattatcaaagtgtgggagagtatctttataaagagtattttcaaaaattcaaagaaaattccaaagaatttataaatgttagaaataaaaaagaaagttatgaacgctgcataacgcaaagttttttaaaagatgaattaaagcttatttttcaaaaacaaagagaatttggcttttctttttcaaagaaatttgaagaagaagtgcttagtgtagcattttataaaagggctttaaaagatttttctcatttagtgggaaattgtagtttttttactgatgaaaaaagagcgccaaaaaattcgcctttagcttttatgtttgtagcacttacaagaattattaatcttttaaacaatcttaaaaatactgaaggaattttatatacaaaagatgatttaaacgctcttttaaatgaagttttaaaaaacggcactctaacttataaacaaacaaaaaagcttttgggtttaagcgatgattatgaatttaaaggagaaaaaggaacttattttattgagtttaaaaaatacaaagaatttataaaagccttagatgaacatagtttaagccaagatgatttaaatgaaatagcaaaagatattactcttataaaagatgagattaaacttaaaaaggctttagcaaaatacgatttaaatcaaaatcaaattgatagcttaagcaaattggaatttaaagaccatttaaatataagttttaaagccttaaaacttatcactcctttaatgcttgaaggtaaaaaatacgatgaagcttgcaatgagcttaatttaaaagtagcaatcaatgaagataaaaaagattttttacccgcatttaatgaaacttattataaagatgaggtaactaatcctgtggttttaagggcgattaaagaatatagaaaaatcttaaatgccttacttaaaaaatacggtaaagtgcataaaataaacattgaattagcaagagaagtaggtaaaaatcacagccaaagagctaaaatagaaaaagagcaaaacgaaaactacaaggccaaaaaagacgccgaaattgaatgtgaaaaactaggcttaaaaataaatagcaaaaatattttaaaattaagattatttaaagaacaaaaagaattttgtgcttatagtggagaaaagattaaaattagtgatttgcaagatgaaaaaatgcttgaaattgaccatatttacccttattctagaagttttgatgattcttatatgaataaagttttagtttttactaagcaaaatcaagaaaagcttaataaaaccccctttgaagcctttggcaatgatggtgtaaaatggcagaaaattgaagttttggcaaaaaatttacctgaaaaaaagcaaaaaagaattttagataaaaattacaaagacaaagagcaaaaagactttaaagatagaaatctaaacgatactcgctacatcgcaaggcttgttttaaactacactaaagattatttagattttttacctttaagcgatgatgaaaatacaaaattaaacgatacgcaaaaaggctcaaaagtgcatgtagaagcaaaaagcggtatgctaacatcggctttaagacacacttggggctttagcgttaaggatagaaacaaccatcttcatcacgccatcgatgtagtaatcatagcttatgcaaataattttatcgtaaaagcttttttggattttaaaaaagagcaagaaagcaacactggagagctttatgcaaaaaaattagtgaattagattgcaaaaataaaaggaattttttgagccttttagtggttttaggcaaaaggttttagataaaattgatgaaatttttatctcaaaacctgagagaaaaaagccaagtggagctttacatgaagaaacatttagaaaagaagaagaattctatcaatcatacggcggaaaagaaggagttttaaaagccctagagcttggtaaaatccgcaaagtaaatggtaaaatagttaaaaatggcgatatgtttagagtggatatttttaaacacaaaaagacaaataaattttatgctgtgccaatttatactatggattttgctttaaaagtattaccaaataaagctgtagcacgaagtaaaaaaggtgagataaaagactggattttaatggatgaaaattatgagttttgcttttctttatacaaagatagtttgattttaattcaaactaaagatatgcaagagccagaacttgtttattttaatgcttttacaagctctactgttagtttgattgtttcaaaacacgataataaatttgaaacgctaagcaaaaatcaaaaaatattgtttaaaaatgcaaatgaaaaagaagtaatcgcaaaaagcataggaattcaaaatctaaaagtatttgaaaaatacatagtttcagcacttggggaagttacaaaggctgagtttagacaaagagaagattttaaaaaatgagttacgatgaagcttttaaaacactgcttattagctctaatgccaagctaaatttagagctaaatcatcttgtgattaaacaagatgaaaatatagccaaattgtttttaaaggatataaacatcatcgttttagaaagcttacaagtaagccttagttccgcactttttaatgcctttgcaaagcataaaattatcttattaacctgcgatgaaactcatagtataaatggtatttttactccttttttagggcatttttaaagtgcaaaaatcgcaaaagagcaaatgaatgtaagtgctcaaaaaaaggctattttatggcaaaaaatcattaaaaataaaatcctaaatcaagcctttgttttgaaaaaacacaataaaatagagcaaagcaatgagcttgtaaatttggctaaaaaagtaagcttaaatgatagtaaaaatattgaagctgttgcggcggcgctttattttaaaactttgtttggtgtttctttttcaagagatgagctttgctttgaaaattctgctttaaattatggctatgcaatcattagggcttgtattattagagcagtttgtatcagtgggcttttgccttggcttggcataaagcacgataatatttataattcttttgcgctttgcgatgatttgatagaagtgtttagggctagtgttgatgattgtgttttaaagcttaagggtgaaagtgagtttttaagcaaagatgacaaaagagcgttgattggcaatttacaaagcaaaatcaattttgatgggcaaaattatcctttaaatagagtgataaatcattatgtggcgaattttaaaaatgctttattgtatgaagatgaactaaagatagtaaaatttgatgattgaagataaatttatgcgcgtgcttttgatgtttgatgtacctactaaaagtaaaaaagagcaaaaactagcaagtaaatttagaaacaatcttataaaattaggttattttatgttgcaatttagcgtttatatgcgtatttgcaagggtttaagttctgcaaaaagttctattgaaaatgtaaaaaagattttgccaccttatggaaatgtaagggctttaatcatcactgaaaagcagtttgataaaatggagcttttgcttggtggcatagtttttaacgaaaaagttaataacgaaaccaatttaacgctttttgatatagatagtcatggagaatttaaatataaaaattcaaataatgaagaaattcaaataaacaaaaaacaagaaaaatatcatcagcaaaatttatttgaattttaagagcggttttaggggattgtaaccccgcagagtcccgcaaactctttattttagtccctttttaaatttcttatgagattatagcataatttttgctatttttcatcaaaaaaccccgaaattttcattatctggtaaatatctattttaccataaagaaatttaaaaagggactaaaaaaccctagtggattgaaactctgctagggctaattactccactaaaaggaggttgcaaatttgaaacttattgaaatttagggttgattaaaatcgaaataaaattatttaaataattttaaggcataaagataatatccactaaactttcattttctaacatttcacattcttttggcaccaccataagagcagctttattgttaagattgtttataatcgcactagagccttctttcttgccttcaagattggctaaaatgcgtccatttttaaactctatattgcaagcaacaaattccaaataaggtgtttttttcttgtaacttccttgtaaaaaggccttgcaaatatagtctttaggctgaagtaaccaagagtttaaaatctctcttgcgtaaagattaaacattaccatagccgagtaaggaaaacctggtaaggcgataatgaatttttcattagccttagctattttgatatgtctacctggttttatgtcggctttatcgatgatgatttcgtattcttttacagctttttttaaaaaatcaaaatcccccatagaaactccgcctgttgtaatcaaaatatcacaactttgcaaagcactttcaagggtagaaaaagtggctttttcatcatcttttaaaagtggaaaaacccttgtatcgcaatttaaatttttagctaaattagctatggcgatatgatttgaagagcggatttgagcaggattttccaaggcttctcctagatctttgatctcacttccactacttaaaacccctacaataggctttataaacacactaatgtgaaaaaatccaagttcagccaaaagagctatctcgctataatttaactttgtgccttttttgagtaaaatttcatcttttttatagttttctcctaccgcacgcacggcaaaagcttggggaacttttttttctataaaaagagtatcattttctacgcgtacattttcaacagggactaaagtatcgcttccttcgctcatgagtgagcctgtaaaggtttttacacaagtgccattttgcacgctaaaatgtggcatagtgcccgcaggtgtgaggcctaaaatttttaaaggtttatcttgatcttcaaatttgatcgcataaccatccatagccgaggttggaaattcaggctgatttttaggggcttttatgtcttgagctaaaatgcgtcctaaacactctgtaagagctattttttcaatcttttcataggttttgatatgagagtgtaaaatttttaaactttcttcataagacattaacattttttatccttttaaaagtcctgcaccgcaaagtttggttgatctttctttggcataaattctttctttgtttatcacatcatacttccaaataggtgcacttgctttaaaatcttcaacaaatttattaagaagtttaagtcctaattttctttgtttgcttaaaattcctgcaaaataagagctttcatgaaccgccacatcgcctatagagtgagcaaaaagcaagctaataccatcaaaatctactcttttttgccactcatcaaaccatttttttaaaagcggttcataaatatcaaaactaagtgcctcaatgcctccttcttcacgcacaataccacaaaaagtcagcaaagcaccgcagtttttatccttggcaaattcataccattggctataaattttaggaatatctaaagaaccttgatagagtgtaaaatgtttcatttaacccccacaaactggtggtaaaagtgctattttatcaccatcttttaacttagtgttttcatcaaaaatgatttcatcatttaaagatacggcacaaagttctagccattcttttaaactctcatctttttgcaaaatttcttttaattcttttaaattttttacctcaagttctaaattttctttatttatggggcctaaaaattccacttttaccattttattcctttacttctaaatttcccatcattcctaaatcttcatgttctaaaatatgacaatgatacattctaagccctttaaaatcttgtttcattctaagtcttaattcttcattaggacgcacatttatagtatctcttaaggctctaaattcggctttttgaactttgccattgagttttgatgagatgagttcaaattgcgtgccgtgtatgtggaaaggatgatccatgtgagatttgtttatcactatccagtcttcaactactccaagtttggagcttaaatcaatgcgttttaaatcatagcttttgccattgattaaaaacatagacgcaagagcgatttttaattcgctttcactttttcccatcataccatgcatttgcatatgatcttcactcatgattatttctttaaattccttaggttcttctgaaggtttgaaaatttttaaattttttggaagttctacattttctttttttaggttaatattggctagaaatagggtattaggttcttcttttaccatcattttatccctatcataataagaactttctagcttaaattccccatcttttggagcgtcgattaaaacttctacacgagaagcaggacttaagaaaagttcttctttataaatagctttttctataagtccaccatcagtaccaacaagtataaacttagctccttgtatgcgtaaatttaaatatcttgctgcagtagcattataaatgcgtatgcgttcgtttgtggcgagtttgatttgaggtttaaattgtccgttaatgagtacaaattctccttctctaccatttagccaatcatttaaattgttgtttggaatttgagcgttttcatcaagacgtaaatcgctaatcatcaaatctttttcttttaaatgacttaaagcatccttttttgctttgatcacaaaagtcccagctaaacccataaaaacttgtttagaagcggtataatgaggatgtggatgataccagtaagttcctgcgctatctcgaggaatttcaaaatgatatgttctttcttctcctgctaagataggatcatgtgggtttccatcttgatcaggtggtacaggaacgccatgccaatgtatcgttgtagcttccttgagtttgtttttgactaaaatttcaagtttatctccttcaaaaacttctatttttggagcaggcactaggccattgtaagtataaaataaggtttttttacctttgataagttctatatgattttctttgatttctatggtagcacgaaaaagatttttttctttgctctcatttttgagcaaaggcaaggcttttaaaagttctccttgggggaattgttttggatctaaaagttttaaattttttggagcaaagttgataaaagaagtatctaagtcatgatttatagaatgatttttatgcatggagtacatatcatgcataggatttgcataggctacgcccatacttgctagagtgagtgcattaaattttaaaaaatttcttctattcactagtttttcctttatgcttgattttttatattatagtcattatttttttagttttggtaaatatttattttgaaaatttggtttaattttgttatgattttagcaatttaatcaaggaaaaataatgttttatgaaaaaattcaaaccccagcttatattttagaagaagataaattaagaaaaaattgtgagcttttggcaagtgttggcgaaaaaagtggcgctaaagtgcttttggctttaaaaggttttgctttttcaggagcgatgaaaattgtcggagaatacctaaaaggttgtacttgtagtggactttgggaagcaaaatttgctaaagaatacatggataaagaaattcatacttattcgcctgcttttaaagaagatgaaataggtgaaatagccagtttatctcatcacatagtatttaactctttagctcaatttcataaatttgaagctaaaacacaaaaaaattccttaggtcttcgttgtaatgttgaattttctctagccccaaaagaactttacaatccttgtggaagatactcaagacttggaattcgtgctaaagattttgaaaatgtggatttaagtgctatagaaggacttcattttcacgcactttgcgaagaaagtgctgatgctttagaagctgttttaaaggtttttgaagagaaatttggcaaatggatagggcaaatgaaatgggtgaattttggaggaggacatcacatcaccaaaaaaggctatgatgttgaaaaacttattgctttgtgtaaaaatttcagtgataaatatggtgtgcaagtttatcttgaaccaggtgaagcggtaggttggcagacaggaaatttagtagctagtgtagtagatatcatagaaaatgaaaaacaaattgctattttagatacttcaagcgaagcgcatatgccagatactatcatcatgccttatacaagtgaagttttaaatgctaaaattttagccacaagagaaaatgaaaaaatttcagacttaaaagaaaacgaatttgcctatttgcttactggaaatacttgtttagcgggtgatgtaatgggagagtacgcttttgataaaaagcttaaaatcggcgataaaattgtttttttagatcaaattcattacaccattgtgaaaaacacaacttttaatggcataagacttccaaatctcatgcttttagaccgtaaaaatgaacttcaaatgataagagaattttcttataaggattattctttaagaaattagtattatttataatttgcataaaatgttaattttactcggaagagaatcaaagatgtaaattttatgcaaagtattttattttttcaaatataaaatcaactcaaatatctaattttcaatactttggtatgattttttaatattttaaatccttgtggaattttattgaaattcagtgatttttaaatcaaatagtattaagataaatcgatttaaaaatcggctttaaaatgaatattaggtatattttgcataatattcattcaagcaaaatttaaagctatttttgaaaattttgaatgcatggaggctttaatggatttggaaaaattaagattagctagaagtctttattatcaatgtctaggagagctttttgttttttcattttctgaagaaagattgtcaaaattacaagagtatttaaagacaatgcaagaatgtttatttgatgaaaatttaaaatcaaattttgatatcttgcttaagcatttagatgatgaaaattctatacaagcattttttaaagaatatgatttgctttttttaagtcttaaaaatagcattccaacgactttttcttacatagaagaaggttttgaaaattcaaatcctttactttgcgtgcgtcaaattttagtcaaaagtaaaataagacgcaatgaaaaattttttaaagaaagtgaagatagtgttggattttgtttattgttgatgagtgaatttttaaggcaaaatgaagatgatttagccaaagagctttttgaaaaagtgatcaataaaagcattgatgagtttttaggcgatgttttcatgaataaaaatgcgaatttatataaggaaattgcaagtattgcatcggcttttatggaatttgaaagactttgctttgaagtggaaaaacctgcaaaaataaattctaaaaaagtgcaaaacgatctatcgcgttcagaatttttaagaagagaagcaaataaacaaaggaggactcgtgaaaaatcgcagggaatttcttaaaaaatccgcttttgccttaggggctgctggagtgcttggtagcacaactttagctctagctaaagatgaagaaagaaaagatttggttaaaggtaaaagtaagaaaaaagaagtgctttttcaaagaagtgctaattgggaaaattattatataaaggctgagtaatgtcaagtgtaggtgaaaatatcaagcttacgcgtcgttcttttcttaaaatggcagcactttcaagcctagcaacaccgttgcttgctagaagtgaaactttaagagaagcgagtgctgatgagcttaaagaagcttatgaaggtagtaaaaaagtaaaaacagtttgtacagcctgttctgtaggctgtgggattattgcagaagtgcaaaatggtgtttgggtgcgtcaagaaatcgctcaagatcatcctgtgagtttaggtggacattgctgcaagggatctgatatgatcgatatggtgcgttcacatgtgcgtttaaaatatcctatgaaaaaagaaaatggagaatggaaacgcataagttatgagcaagctttaagtgagatcggagaaaaactagctgcttatcgtaaagaaaatcctgaaagtgttatgtttttaggttctgcaaaacttaataatgaacaagcttattatataagaaaatttgcagcattttttggaacgaacaatgtagatcatcaagctagaatttgacacagcgcaacagtcgccggtgtggcgaatacatttggttatggcgctatgacaaaccatcttggagacatccaaagaagtaaatgtatcattatcattggagcaaatccagcggtaaatcaccctgtgggttttagacatttcttaaaagcaaaagaaaaaggtgcaaagcttatcgttgtagatcctagatttacaaaaagtgcagcaaaagcggatatttatgcaagaattcgtccaggaaccgacattgctttcatgtatggaatgctaaaaatcatctttgatgaaggcttggaagatacaaaatatcttgatgaaagagtttttggaatcgataaaattcgtgaagaagcagcaaaatggacggccgaagaagtagaaaatgttacaggaatttctaaagaacttttaatacaaatcactcacgaagtagctaaaaacaagccaactactcttatttgggctatgggtttaactcaacacactgtaggaacttcaaatacacgtttagcacctattgtgcaaatggtacttggaaatataggtaaatttggtggtggagttaatatcttacgcggacacgataatgttcaaggtgcttcagatatggcttgtttgagcgaaaatttaccaggttattatcctttaaatgaagtgacttggagatactatgccaaaatttggggtgtggattatgagtggcttttgggaaattttgtaagtaaagattggatgcataaaactggactttcacttgctagatggtgggcagcggctttaaatggaaaagatggcaatgatgctatcgataatgcaggaacgcctttaaaagctttagtagttatgggaaatggtatcacttcgactgcacaacaagtaaaagttaaagaaggtttggaagctttagagcttttagttttggctgatccttttgtgaatgaagcagggattatcgcagaaagaaaagatggaatttatcttttacctgcagcaacacagtttgaaacaagcggaagtgtaacagctacaaatcgtagcggacaatggagatttaaagttgtagatccactttatgaaagcatggaagatcaagaaatcttatttgagcttgctaaaaaattaggcttttatgaagactttactaagactttacgcgatgaaaaaggtgagattgtttggcctgaaaatgcaacaagagaaattgcaaaagcagttagaagtatagggcttaatggttggagtcctgaaaggcttaaaaagcatactttatact

SEQ ID NO: 3817 - DNA, 21869 bp, synthetic construct
  source 1..21869: mol_type = other DNA
  misc_feature 1..21869: note = Synthetic
caggacatacttatgtagtttatgggcctttagcatgtggagcaacgactataatgcatgaaggaactcctacttatccaaattctgggcgttggtggagaatgatagaagagtatcaaataagcaaattctacacttcgccaactgctataagaatgcttcatgctgatgcacctgatgagccaagaaaatatgatttaagtacgcttgaagtgcttggaacggttggagagcctatcaatcctagtgcttggaagtggttttatgatgaaatagggggaactaaaagtcctatagtcgatacttggtggcaaacagaaacaggtgggcatatgatcacgcctttaccaggcgctactcctttaaaaccaggttgtgctaccttgcctttgccaggaatttttgcagaagttattgatgaagaaggcaataaaaaagatgaaggtgaagatggattgctttgtataaccaaaccttggccttcgatgattcgtggaatttggggtaatgatgaacgctatatagaaagttatttttctcaagctagaaaagatggaaaagctgtatattttagtggcgatggtgctttttatgataaaaatggttatattaccatcacaggaagaacagatgatgtggttaatgttgcaggacatcgtataggaacggctgaaattgaaagcgctattgctaaacatccaagtgtagcagaatcagctgtagtgagtattttggatgcgattaagggtgagtcattgtttgcttttgtggttttaagtcctgcatccagttgtgatcttggcggagctatagaaactttaaaagaacttaatgacattttaagagtagaaataggacctatagctaaaatagaaaaaattctttacactccaggtttgccaaaaactagaagtggtaaaataatgagaagaattttaagaactatagcaagaggtgaagaaatcaaacaggatatttcaacacttgaagattctggagtagtagaaaccattgttaaattagctaaggcagagtttgaataacaaggcaaaaagaactttgccttgttgcatgaaaattcataaaaataagctataatgataaaaaaataaaaggaaatttttatgcttcaaacttgtattttccctgcggcaggttatgggacgagatttttacctgcaacaaaaactttacctaaagagatgttacctatcttaactaagcctttgatccattatggggttgatgaagctttagaagcaggaatggaaaatatgggctttgtcacagggcgtggaaaaagagctttagaggattattttgatatttcttatgaacttgaacatcaaatttcaggtacaaaaaaagaatacttgcttgatgaaattcgctctttgatcaatcgttgtacctttacttttacaagacaaaatcaaatgaaaggattaggtgatgcggttttaaaaggtaaacctttggttggtgatgaagcttttggcgtaattttggctgatgatttgtgtgtcaacgaagaaggcttaaatgttatggctcaaatggtaaaaatttatgaaaaatatcgctgcaccatcatagctgtgatggaagtaccaaaagaacaagtttcaaactatggagtaatttctggaaattttgtagaagaaaatcttatcatggttaattctatgatagaaaaaccaagtcctgatgaagctccaagtaatcttgctatcataggaagatatattttaactcctgatatttttggaattttagaaaatactaaagcgggaaaaaatggcgaaattcaacttaccgacgcgcttttaactcaagcaaccaatggtatggttttagcttataaatttcaagggaaacgctttgattgtggaagtgtagaaggctttgtagaggctacaaattatttttacgagaaaaataaatgttaaacaatacacttttttttaaacaaagtgaaattcacactataagctcttatgcaaatcgtattaatgatgaggtaaaaagtggagatatagggtattatcatcttattgacacaagcttaagcctgattgatgagagtttggtttttatcaaagacaaagaacacataaaaaatattgttttagtgggaatgggaggttcaagttgtggtgtaaaagccttgcgtgatatgctttttaatgaaaaaagcaaccaaagagagctttttatactcgataacacaagttcacattcttttaataagactttagaaaaaatcaagcttgaagaaagtttgtttttaatcatcagtaaaacaggtagcactatagaagttgtatcgctttttaaacttcttattgaacattttaaacttgatatgcaagaattaaaaaaatactttgtttttattaccgataaggattcaaaacttcatcaagaaggtgaaaatttaggtattaaatgcttttttatccctgcaaatgtaggaggtcgttttagcatactttcagctgtaggtatagttccgctttgtttttgtggctataatgccaaagctcttttagaaggagctaaagcttgttttgaagatttttttattcacaaaaaagatgaaattttacaaaaagcctatcattattgtacgcacaaaaatgccaatatcaatgtacttttttcatatagtgatgcttttaaaggctttaatgaatggtatatccagcttattgctgaaagtttaggtaaaaagcaaggctataaacgcataggtttaactcctattgcactcattggagcaagagatcagcatagttttttacaactcatcatggatggacctaaaaataaaactgtaacttttttaaaaatcaaagacgctcaaaaagcacctattatccctgatattcattttaaatttctagattctttaagtaataaagtcaatcttcacgaacttttaaacgctcaatgtgatgcaactatgcacgctttaatcgctgaaaatttgagtgttgatgtgatagaacttgaaaaacttgacgcttggcatgcgggatatttgatgtattattatgaactttttacttcaacttgcggtgttatgttagggattaacacctatgaccaacctggtgtggaagttggaaagttgatcttaaaaaatatattaaattcttaatcaaaattcattaaaaaagagtataatggttttaagttaaaattataataaaaatttttaattaataataattattatttaagaattttatgttataattttaaaaattaaaaaaaaggagtcaattatgtcagttacaaaacaattattacaaatgcaagcagatgctcatcatctatgggttaaatttcataattatcactggaatgtaaaaggtttgcaatttttttctatacacgagtacacagaaaaagcttatgaagaaatggcagaactttttgatagttgtgctgaaagagttttacaacttggcgaaaaagccatcacttgccaaaaagttttaatggaaaatgcgaaaagtccaaaagttgcaaaagattgctttactccgcttgaagtcatagaactgatcaaacaagattatgaatatcttttagcagaatttaaaaaactcaatgaagcagcagaaaaagaaagtgatactacaacagctgcttttgcgcaagaaaatatcgcaaaatatgaaaaaagtctttggatgataggcgctactttacaaggtgcttgcaaaatgtaatttaaggggctttatgccccaattatacaaactaggttataatatccttttttaaaggataaaattgaaagtacttaattttttttatgaaaaccaccctaaatttgaagtaagttatgaaagaaaaaatcaaatttcaaaaccaaatattatcataaaaggcccacgattttgtggtaaaaaaacacttatttttaattttttgtctcaatttaaagcaagtgaaattttgtttttagatttatatgatacacgctttgaaaaacaaagtttagaaagacttgctgattttctgaatgaaaatttacaaattaaaattctttgcctttataatttggattttatccctaatttagaaaaaattaaaattcccatcatcttaagtacaaatataaaagatttaaatataaatgggtttgaagagcttgaactcgattattttgattttgaagaatttattagtgtaagtaagaaaaatttacctataaataatttagtaggtctttttttacaaagtggacgcagtaaatttggagaaaaaaacatacttctaagacaaagcttcactcttttagaattagaaattttaaagtatttagctttaaatttgggtcagcaaatcagtatttctaagatatttatagaactcaaaaaaagattaaaaacttcaaaagatagtgtttatcaggctataaaaaaattagaaaatacttatgtgatctatactttaaaacatgatgaaaaaaaacttcaaaagatttattttaaagattttggcctaagaaataatctttgtatttcaaaggatttttcacatttatttgaaaatttagttttaagcgagttgtttaaatttaaagaagaatttttttataacaaatactttaacttttatagccaaatatctaaaattgcttatatttcaagtccaactttagatattgatttgattaaattacgtgctaagaaaattttaccaaaggctttagaacttggaatttttcatgtgatttttatcactctttcaagcgaggatagtttttttgagcaaggggttaaatttgaagtcatatcttttgataaattttcacttggattttaggtgttgtttgagtttgtatcgtatttttcaaggttgtatcgtttgatgatttttgtaataagattgatataatatcccttgcgttcagaataagaatctaaagttttaatagcctctagccctgttatctctttgccttcgctttcaaatttagctcttgcatcgcgaaacttttcataagcaaaatgacgatttaaatttaaaacataagagtcaacactatcttgcagactatcaaaaattttaattttgtgttttttatctggatgtcttaaatcaggaattaaacctttctcaccccaagtccattctccaaaaagattgtttgcttctcttgcgaagcgactggtacctgtagcactttcaactaaagcttgggctatacccatggattttggaattttttgaatacgttttttatattctgcaaaatcataaagattttcaatgcgatatttgttttttatcgtgataagtttttcaagatttatttggtttgaagtcctaaagcctgttttgtaagcatctttaaaaaaggcttcgataaaggctctttcttgttcaatttttttaaagctttgatcaaacatttcattcatttttataaaaaaaatttgtcttttttgatctatatcaagtttgtaatattcctctccaaatccactctttagatcatcagcaaaaagtgggattagaaaaagactaagaaaaattataattggcttcaaaacaatactttacctttccctcaaaaaacaattcttcatttttatatgtaaaccccacctcttcaccacttttaggagttattttaactttattttgtacttttttatttaaaaatgccagataaaaacaagcccccattcctgtgccgcaagctaaggtttcatcttcaactccgcgttcataggtgcgaacttttaaatgattttcatctaaaatttttacaaaattaacattggcattatatttttgtctcattttttgacaaagcattgtattaaattcatctaaattttgacaaaaatgtactagatgtggaactccagtgttgcaaagttgccaagtttttcctaattcttcaaaagtattttgcacgctttttattttgcctaaagatacttcaactttatcttgatttacctttgcttttattactcctgcaccggttaaaaaactcatgttaggatttattttgttaatatgatgtgcaaaatgtgccgcagcccttgagccattgccacacatagcagcccttgagccatcgttattataaaattcccattcaaagtcgtatttttcatgaggcaatatcacgataaagccatccgcacctataccctcataacgattacaaagttctttagctaaagcacttctatcttcttttctatcagcatttgttatgacaaaatcattcccacttgcacaatatttataaaatttcacatttttcctttagaaatttcttgtattactttaacacattcttgcctaaaatcggcataagaattagtatttttaatgataaaatctgcttttttaagtttttcttcaatatctatttgagaatcaagtcttgcttttgcagcttctaagctaagcttatctctttgcatgattcttttaaggcttaattctttaggtgtgtaaattacaatgactttgcctaaattttcataagcaccgctttcaaaaaaaagaggaatttctacaaaaaaagctttattttccttatctagaatttgcatttgttctaaaattttagctcgaattttaggatgagtgaaattttctaaggtttttttagtttctttgttgttaaaaacaatttctccaaggatttttctatcgattttattttcttttgtgagtaaattttttaagctaaagggagaaaaaatcttttcaagttctaaagcattttcatctaaaattttatgagcgattttatctgcactaatgcttttaaagcctaaagaattcgctatttctataaaggtgcttttaccacaagcaattgaagcggttacaaaaaaagcatttttcatcttatgccttattaaaacttttttcgttaaaatacctttttagttcttaaaggaaaataaatgaaaatttcatatgaagatgcaggtgtaagtatagataatggaaatgcctttgtagaggctataaaacctttggttaaagaaacttttaatgataatgttgtaggtggaattggttcttttgctggtgcttttagaatgccaagtggttttaaaaagcctgtgattttaggtgcaacagatggggttggtaccaagcttcgcttggcaattgatgctaaaaaatatgataccatagggcaagatttagtagcaatgtgtgtgaatgatttgatttgtaattttgctacgcctttgtttttcctagattattatgctacagccaagcttgaagtagaagtagcaaaggctgttgtatcaggcattgccaagggatgtaagatggcaaattgtgcattaatcggcggagaaactgctgaaatgcctggaatgtatgcaaaagatgattttgatcttgcgggttttgcagtgggtatggctgaagaagatgagatcgatagaagtaaatttgttaaaaatggtgatattttattggcacttcctagttcaggacttcattcaaatggttattctttagctagaaaagtactttttgaaagtttaaaattaaaatttgatgacaagatagagggtaaaaatttaattgatattttgttagaacctacaaggatttatgtgcgtgattttcttatactaaagccttatatcagtgctctagcacatattacagggggtggtttagtagaaaatttaccacgcgttttacctcgtggtatgggggcaactatacgcaaacatcatcttaaaactcctgaaattttttatactataggacaggctgtagaagaaagcgaaatgtatagaagctttaacatgggagtgggtttagtaatggttgtacatccttctaatgtaagtaaggttttagaaaattcagatgcctttattatcggcgaaatttgcattaatgaaggtattgttttagagtgaaaataaagcgtcaatacgctttatttttgtattttaagttctatttttgtagtgttttgttcttttggcaaaggattggtttgtgctagataaaaggctacaagtacatttacaagcatagcgataagtaaaagaggagtggttcgttttataatatccattggagctacttttgcaaatccagctaaagctatgattccgcctgctattggtgaagctgcacgacctaaacaagatgcaatttctataggtaaaactagagtaataggtgcaacgcctaattttgtagctatatcaggagctagttttccaaaagcattaaaagcagcaattccacttcccataatcactgtggcaaaataaactaaaaagcttaaaatagctatactcaaaagaattccaaaccatgcaaaatttcctgttccaagatttgaaaccgcgttagcaaggatattaactccaccaagtgctttaatgccttcagcaaatactccagcggcgatgattatgcttacgactgagataaaaatttcagccatagcttttaaaatcaccatcatatcttcgcctaattttctagcatttctgtgtcttgcaaattcaacaagaaaaactaaagaaatgcttacaaaatttgctgttacaacatcgagcttgatagtaaaaaaatacgctgtaaataaaaatacaacaggtaaccaaggaaagagtatgtaaaaagtagggcatttaggatcaatgatttgcggaatttcaacttcatcatttaaaacacctttttctttatctcttttatcaatccaagcaaaataaaaaggaatcaagatggcaataactacaacataggcaatcacactataaatttggtaatttaaaaaaagccctacgacattatcactttgtcctaccatatctgccatattgattgaatttccatcttttggaccataatcaagtgcaattaaagaaagcacacatacagctgtaataggacggattttaagtgagattaaaacaggataaatacatgctagcaaaagcaaaagcaatccagcatagctagaaatgacgatttttaaagccattccaacaacaaaagttccacttaaaatcaagtatttatttttgatttttcctaagggtttatttgctaaaaaagcaagttttgccgaagcattgatatgtttcatataagcagcaaaacctgccacactcatgataataagtcctactccagaaagctgacttttaaaagtcgctgtgataaaagcataactatcaagtaaaacattcaaaaagcttgcatgttctctgctcggggcttttggtataggtgttcctgtgatgtaaaaagcaaaaataagcaagataatacctgaaagaaaaaatacaaaaataggattgtattttttaagtatataataagcaacgacaattaccgctaaaagtgtagaacatatcataaaaattggcatgatttctcctaaagttattattagcttttattttattttagctaaaatttaactaataaatatttttcatttaaaattttacttattttttgcattataaaattaataatatgtatagtttggttactgaaaagtttatgtttgtataaaaaatgatttttatattataattataaacaaattataaatatcaaaaaggatctagtgtggcaagaattttggcatttgatataggaataagctctattggccgggcatttagcgaaaatgatgagttaaaagattgcggagttaggatttttacaaaggctgaaaatcctaaaacaggagaatccctagccttaccaagacgccttgcaagaagtgccagaaaacgccttgctagacgcaaagcaaggctaaatcacttaaaacatttaatcgcaaatgagtttaagttaaattacgaagattatcaaagctttgatgaaagtttagctaaagcttataaaggctctttaattagcccttatgagttaagatttagagctttaaacgagcttttaaataagcaagattttgcaagagtgattttacatattgcaaaaaaggtgtggctatgatgatattaaaaatagtgatgatgaagaaaagagcgagattttaaaagctatcaagcaaaatgaagaaaaactagtaaattatcaaagtgtgggagagtatctttataaagagtattttcaaaaattcaaagaaaattccaaagaatttataaatgttagaaataaaaaagaaagttatgaacgctgcataacgcaaagttttttaaaagatgaattaaagcttatttttcaaaaacaaagagaatttggcttttctttttcaaagaaatttgaagaagaagtgcttagtgtagcattttataaaagggctttaaaagatttttctcatttagtgggaaattgtagtttttttactgatgaaaaaagagcgccaaaaaattcgcctttagcttttatgtttgtagcacttacaagaattatcaatcttttaaacaatcttaaaaatactgaaggaattttatatacaaaagatgatttaaacactcttttaaatgaaattttaaaaaacggcactctaacttataaacaaacaaaaaagcttttgggcttaagcgatgattatgaatttaaaggagaaaaaggaacttattttattgagtttaaaaaatacaaagaatttataaaagccttagatgaacatagtttaagccaagatgatttaaatgaaatagcaaaagatattactcttataaaagatgaaaccaaacttaaaaaggctttagcaaaatacgatttaaatcaaaatcaaattgatagtttaagcaaattggaatttaaagaccatttaaatataagttttaaagccttaaaacttatcactcctttaatgcttgaaggtaaaaaatacgatgaagcttgcaatgagcttaatttaaaagtagcaatcaatgaagataaaaaagactttttacccgcatttaatgaaacttattacaaagatgaagtaactaatcctgtggttttaagggcgattaaagaatatagaaaaatcttaaatgccttacttaaaaaatacggtaaagtgcataaaataaacattgaattagcaagagaagtaggtaaaaatcacagccaaagagctaaaatagaaaaagagcaaaacgaaaactacaaggccaaaaaagacgccgaacttgagtgtgaaaaactaggcttaaaaataaatagcaaaaatattttaaaattaagattatttaaagaacaaaaagaattttgtgcttatagtggagaaaagattaaacttagcgatttgcaagatgaaaaaatgcttgaaattgaccatatttacccttattctagaagttttgatgattcttatatgaataaagttttagtttttaccaagcaaaatcaagaaaagcttaataaaaccccctttgaagcctttggcaatgataatgtaaaatggcagaaaattgaagttttggcaaaaaatttacctgaaaaaaagcaaaaaagaattttagataaaaattacaaagacaaagagcaaaaagactttaaagatagaaatctaaacgatactcgctacatcgcaaggcttgttttaaactacactaaagattatttagattttttacctttaagcgatgatgaaaatacaaaattaaacgatacgcaaaaaggctcaaaagtgcatgtagaagcaaaaagcggtatgttaacatcggctttaaggcacacttggggctttagcgctaaggatagaaacaaccatcttcatcacgccatcgatgcagcaattattgcttatgcaaacaattctatcgtaaaggctttttcagattttaaaaaagagcaagaaagcaacagtgtagaactttatgcaaaaaaattagtgaattagattataaaaacaaaaggaagttttttgagccttttagtggttttaggcaaaaggttttagataaaattgatgaaatttttgtctcaaaacctgagagaaaaaagccaagtggagctttacatgaagaaacatttagaaaagaagaagaattctatcaatcatacggcggaaaagaaggagttttaaaagccctagagcttggtaaaatccgcaaagtaaatggtaaaatagttaaaaatggcgatatgtttagagtggatatttttaaacacaaaaagacaaataaattttatgctgtgccaatttatactatggattttgctttaaaagtattaccaaataaagctgtagcacgaagtaaaaaaggtgagataaaagactggattttaatggatgaaaattatgagttttgcttttctttatacaaagatagtttgattttaattcaaactaaagatatgcaagagccagaacttgtttattttaatgcttttacaagctctactgttagtttgattgtttcaaaacacgataataaatttgaaacgctaagcaaaaatcaaaaaatattgtttaaaaatgcaaatgaaaaagaagtaatcgcaaaaagcataggaattcaaaatctaaaagtatttgaaaaatacatagtttcagcacttggggaagttacaaaggctgagtttagacaaagagaagattttaaaaaatgagttacgatgaagcttttaaaacactgcttattagctctaatgccaagctaaatttagagctaaatcatcttgtgattaaacaagatgaaaatatagccaaattgtttttaaaggatataaacatcatcgttttagaaagcttacaagtaagccttagttccgcactttttaacgcttttgcaaagcataaaattatcttattaacctgcgatgaaactcatagtataaatggtatttttactccttttttagggcattttcaaagtgcaaaaatcgcaaaagagcaaatgaatgtaagtgctcaaaaaaaggctattttatggcaaaaaatcattaaaaataaaatcctaaatcaagcctttgttttgaaaaaacacaataaaatagagcaaagcaatgagcttataaatttggctaaaaaagtaagcttaaatgatagtaaaaatattgaagctgttgcggcggcgctttattttaaaactttgtttggtgtttctttttcaagagatgagctttgctttgaaaattctgctttaaattatggctatgcaatcattagggcttgtattattagagcagtttgtataagtgggcttttgccttggcttggcataaagcacgataatatttataattcttttgcactttgcgatgatttgatagaagtgtttagggctagtgttgacgattgtgttttaaagcttaagggtgaaagtgagtttttaagcaaagatgacaaaagagcgttgattggcaatttacaaagcaagatcaattttgatgagcaaaattatcctttaaatagagcgataaatcattatgtggcgaattttaaaaatgctttattgtatgaagatgaactaaagatagtaaaatttgatgattgaagataaatttatgcgcgtgcttttgatgtttgatgtacctactaaaagtaaaaaagagcaaaaactagcaagtaaatttagaaacaatcttataaaattaggttattttatgttgcaatttagcgtttatatgcgtatttgcaagggtttaagttctgtaaaaagttctattgaaaatgtaaaaaagattttgccaccttatggaaatgtaagggctttaatcatcactgaaaagcagtttgataaaatggagcttttgcttggtggcatagtttttaatgaaaaagttaataacgaaactaatttaacgctttttgatatagatagtcatggagaatttaaatacaaaaattcaaataatgaagaaatacaactaaacaaaaaacaagaaaaatatcatcagcaaaatttatttgaattttaaaagcggttttaggggattgtaaccccgcagagtcccgcaaactctttattttagtccctttttaaatttcttattgagattatagcataatttttgctatttttcatcaaaaaaccccgaaattttcattatctggtaaatatctattttaccataaagaaatttaaaaagggactaaaaccaaacaattaaagagattgaaagtagaacaattttatcataaagaaatttaaaaagggactaaccctagtggattgaaactctgctagggctaattactccactaaaaggaggttgcaaatttgaaacttattgaaatttagggttgattaaaatcgaaataaaattatttaaataattttaaggcataaagataatatccactaaactttcattttctaacatttcacattcttttggtaccaccataagggcagctttattgttaagattgtttataatcgcactagagccttctttcttaccttcaagattggctaaaatgcgtccatttttaaattccacattacaagcgacaaattccaaataaggtgtttttttcttgtagcttccttgtaaaaaggctttgcaaatatagtctttaggctgaagtaaccaagagtttaaaatctctcttgcgtaaagattaaacattaccatagccgagtaaggaaaacctggtaaggcgatgatgaatttttcattagccttggctattttgatatgtctacctggttttatgtcggctttatcgatgatgatttcgtattcttttacagctttttttaaaaagtcaaaatctcccatagaaactccgcctgttgtaatcaaaatatcacaactttgcaaagcactttcaagggtagaaaaagtggctttttcatcatcttttaaaagtggaaaaacccttgtatcgcaatttagatttttagctaaattagctatggcgatatgatttgaagagcggatttgagcaggattttccaaggcttctcctagatctttgatctcacttccgctacttaaaacccctacaataggctttataaacacaccaatgtgaaaaaatccaagttcagctaaaagagctatctcgctataatttaaccttgtgccttttttgagtaaaatttcatcttttttatagttttctcctaccgcacgcacggcaaaagcttggggaacttttttttctataaaaagagtatcattttctacgcgtacattttcaacagggactaaagtatcacttccctcgctcatgagtgagcccgtaaaggtttttacacaagtaccattttgcacgctaaattgtggcatagtgcctgcaggtgtgaggcctaaaatttttaaagctttatcttgatcttcaaatttgatcgcataaccatccatagccgaagttggaaattcaggttggtttttaggtgcttttatgtcttgagctaaaatgcgtcctaaacactctgtaagagctattttttcaatcttttcataggttttgatatgagagtgtaaaatttttaaactttcttcataagacattaacattttttatccttttaaaagtcctgcaccgcaaagtttggttgatctttctttggcataaattctttctttgtttatcacatcatacttccaaataggtgcacttgctttaaaatcttcaacaaattcattaagaagtttaagtcctaattttctttgtttgcttaaaattcctgcaaaataagagctttcatgaaccgccacatcgcctatagagtgagcaaaaagtaagctaataccatcaaaatctactcttttttgccactcatcaaaccatttttttaaaagcggttcataaatatcaaaactaagtgcctcaatgcctccttcttcacgcacaataccacaaaaagtcagcaaagcaccgcagtttttatccttggcaaattcataccattggctataaattttaggaatatctaaagaaccttgatagagtgtaaaatgttccatttaacccccacaaactggcggtaaaagtgctattttatcaccatcttttaacttagtgttttcatcaaaaatgatttcatcgtttaaagatacggcacaaagttctagccattcttttaaactctcatctttttgcaaaatttcttttaattcttttaaattttttacctcaagctctaaattttctttatttatggggcctaaaaattccacttttaccattttattcctttacttctaaatttcccatcattcctaaatcttcatgttctaaaatatggcaatgatacattctaagtcctttaaaatcttgtttcattctaagtcttaattcttcattgggacgcacatttatagtatctcttaaggctctaaattcggctttttgaactttgccattgagttttgatgagatgagttcaaattgcgtgccatgtatatggaaaggatgatccatgtgagatttatttatcactatccagtcttcaactactccaagtttggagcttaaatcaatgcgttttaaatcatagcttttgccattgattaaaaacatagacgcaagagcgatttttaattcgctttcactttttcccatcataccatgcatttgcatatgatcttcactcatgattatttctttaaattccttaggttcttctgaaggtttgaaaatttttaaattttttggaagttctacattttctttttttaggttaatattggctagaaatagggtattaggttcttcttttaccatcattttatccctatcataataagcactttctagcttaaaattcccatcttttggagcgtcgattaaaacttctacgcgagaagcaggacttaagaaaagttcttctttataaatagctttttctataagtccaccatcagtaccaacaagtataaacttagctccttgtatgcgtaaatttaaatatcttgccgcagtagcattataaatgcgtatgcgttcgtttgtggcgagtttgattttaggtttgaattgtccattgatgagtacaaattctccttctctaccatttagccaatcatttaggttattatttggaatttgagcgttttcatcaagacgcaaatcgctaatcatcaaatctttttcttttaaatgacttaaagcatctttttttgctttgatcacaaaagcccctgctaaacccataaaaacttgtttggaagcggtataatgaggatgcggatgataccagtaagttcctgcgctatcttgaggaatttcaaaacgatatattctttcttctcctgctaagataggatcatgtgggcttccatcttgatcaggtggcacaggaacgccatgccaatgtatagttgtagcttctttgagtttgtttttgactaaaatttcaagtttatctccttcaaaaacttctatttttggagcaggcacgaggccattgtaagtataaaataaggtttttttacctttgataagctctatatgattttctttgatttctagggtagcacgaaaaatatttttttctttactttcatttttgagcaaaggcaaggcttttaaaatttctccttgggggaattgttttggatctaaaagttttaaattttttggagcaaagttgataaaagaagtatctaagtcatgatttatagaatgatttttatgcatggagtgcatatcgtgcataggatttgcataggctacacccatacttgctagagtaagtgcattaaattttaaaaaatttcttctattcattagtttttccttttgcttgattttttgtattatagtcattatttttttagttttagtaaatatttattttgaaaatttggtttaattttgttatgattttagcaatttaatcaaggaaaaataatgttttatgaaaaaattcaaactccagcttatattttagaagaagataaattaagaaaaaactgtgagcttttagcaagtgttggtgaaaaaagtggtgctaaagtgcttttagctttaaaaggttttgctttttcaggagcgatgaaaattgttggagaatacctaaaaggttgtacttgtagcggactttgggaagcaaaatttgctaaagaatacatggataaagaaattcatacttattcacctgcttttaaagaagatgaaataggtgaaatagccagtttatctcatcatatagtgtttaattctttagctcaatttcataaatttcaaagcaaaacacaaaaaaattccttaggtcttcgttgtaatgttgaattttctctagccccaaaagaactttacaatccttgtggaagatactcaagacttggaattcgtgctaaagattttgaaaatgtggatttaaatgctatagaaggacttcattttcacgcactttgtgaagaaagtgctgacgctttagaagctgttttaaaggtctttgaagagaaatttggtaaatggatagggcaaatgaaatgggtgaattttggaggaggacatcacatcactaaaaaaggctatgatgttgaaaaacttattgctttgtgtaaaaatttcagcgataaatatggtgtacaagtttatcttgaaccaggtgaagcggtgggttggcaaacaggaaatttggttgctagtgtagtagatatcatagaaaatgaaaaacaaattgctattttagatacttcaagcgaagcacatatgccagatactatcatcatgccttatacaagtgaagttttaaatgctagaattttagccacaagagaaaatgaaaaaatttcagacttaaaagaaaacgaatttgcctatttacttactggaaatacttgtttagcgggtgatgtaatgggagagtacgcttttgataaaaagcttaaaatcggcgataaaattgtttttttagatcaaattcattacaccattgtgaaaaacacaacttttaatggtataagacttccaaatctcatgcttttagaccataaaaatgaacttcaaatgataagagaattttcttataaggattattctttaagaaattagtattatttataatttgcataaaatattaattttactcggaagagaatcaaagatataaattttatgcaaagtattttattttttcaaatataaaatcaactcaaatatctaattttcaatactctggtatgattttttaatattttaaatccttgtggaattttattgaaattcagtgatttttaaatcaaatagtattaagataaatcgatttaaaaatcggctttaaaatgaatattaggtatattttgcataatattcattcaagcaaaatttaaagctatttttgaaaattttgaatgcatgggggctttaatggatttggaaaaattaagattagctagaagtctttattatcaatgtctaggagagctttttgttttttcattttctgaagaaagattgtcaaaattacaagagtatttaaagacaatgcaagaatgtttatttgatgaaaatttaaaatcaaattttgatatcttgcttaagcatttagatgatgaaaattctatacaagcattttttaaagaatacgatttgctttttttaagtcttaaaaacagcattccaacgactttttcttacatagaagaaggttttgaaaattcaaatcctttactttgtgtgcgtcaaattttagtcaaaagtaaaataagacgcaatgaaaaattttttaaagaaagtgaagatagtgttggattttgtttattgttgatgagtgaatttttaaggcaaaatgaagatgatttagccaaagagctttttgaaaaagttatcaataaaagcattgatgagtttttaggcgatgttttcatgaataaaaatgcgaatttatataaggaaattgcaagtattgcatcggcttttatggaatttgaaagactttgctttgaagtggaaaaacctgcaaaaataaattctaaaaaagtgcaaaatgatctatcgcgttcggaatttttaagaagagaagcaaataaacaaaggaggactcgtgaaaaatcgcagggaatttcttaaaaaatccgcttttgccttaggggctgctggagtgcttggtagcacaactttagctctagctaaagatgaagaaagaaaagatttggttaaaggtaaaagcaagaaaaaagaagtgctttttcaaagaagtgctaattgggaaaattattatataaaggctgagtaatgtcaagtgtaggtgaaaatatcaagcttacgcgtcgttcttttcttaaaatggcagcactttcaagcctagcaacaccgttgcttgctagaagtgaaactttaagagaagcgagtgctgatgagcttaaagaagcttatgaaggtagtaaaaaagtaaaaacagtttgtacagcctgttctgtaggctgtgggattattgcagaagtgcaaaatggtgtttgggtgcgtcaagaaatcgctcaagatcatcctgtgagttcaggtggacattgctgcaagggatctgatatgatcgatatggtgcgttcacatgtgcgtttaaaatatcctatgaaaaaagaaaatggagaatggaaacgcataagttatgagcaagctttaagtgagattggagaaaaactagctgcttatcgtaaagaaaatcctgaaagtgttatgtttttaggttctgcaaaaatgagcaatgaacaagcttattatgtgcgtaaatttgcagcgttttttggaacaaacaatgtagatcatcaagctagaatttgacacagcgcaacagtcgccggtgtggcgaatacatttggttatggcgctatgacaaaccatcttggagacattcaaagaagtaaatgtatcattatcattggggcaaatccagcggtaaatcatcctgtgggttttagacacttcttaaaagcaaaagaaaaaggtgcaaagcttatcgttgtagatcctagatttacaaaaagtgcggcaaaagcggatatttatgcaagaattcgtccaggaactgacattgctttcatgtatggaatgctaaaaatcatctttgatgaaggcttagaagatacaaaatatcttgatgaaagagtttttggaattgataaaattcgtgaagaagcagcaaaatggacagccgaagaagtagaaaatgttacagggatctctaaagaacttttggtgcaaatcactcacgaagtagctaaaaacaaaccaactacgcttatttgggctatgggtttaactcaacacactgtaggaacttcaaatacacgtttagcacctattgtgcaaatggtacttggaaatataggtaaatttggtggtggagttaatatcttacgcggacacgataatgttcaaggtgcttcagatatggcttgtttgagtgaaaatttaccaggttattatcctttaaatgaagcgacttggagatactatgccaaaatttggggcgtggattatgagtggcttttaggaaattttgtaagcaaagattggatgcataaaaccggactttcacttgctagatggtgggcagcggctttaaatggaaaagatggcaatgatgctatcgataatgcaggaacgcctttaaaagctttagtagttatgggaaatggtatcacttcgactgcacaacaagtaaaagttaaagaaggtttggaagctttagagcttttagttttagctgatccttttgtaaatgaagcagggattattgcagaaagaaaagatggaatttatcttttacctgcagcaacacagtttgaaacaagcggaagtgtaacagcaacaaatcgtagcggacaatggagatttaaagttgtagatccactttatgaaagcatggaagatcaagaaattttatttgagcttgctaaaaaattaggcttttatgaagactttactaagactttacgcgatgaaaaaggtgagattgtttggcctgaaaatgcaacaagagaaattgcaaaag

SEQ ID NO: 3818 - DNA, 21845 bp, synthetic construct
  misc_feature 1..21845: note = Synthetic
  source 1..21845: mol_type = other DNA
ctgcggcaggttatgggacgagatttttacctgcaacaaaaactttacctaaagagatgttacctatcttaaccaagcctttgatccattatggggttgatgaagctttagaagcaggaatggaaaatatgggatttgtcacagggcgtggaaaaagagctttggaggattattttgatatttcttatgaacttgaacatcaaatttcaggtacaaaaaaagaatacttacttgatgaaattcgctctttgatcaatcgttgtacctttacttttacaagacaaaatcaaatgaaaggcttaggtgatgcggttttaaaaggtagacctttggttggcgatgaagcttttggcgtaattttggctgatgatttgtgtgttaatgaagaaggcttaaatgttatggctcaaatggtaaaaatttatgaaaaatatcgctgcaccatcatagctgtgatggaagtaccaaaagagcaagtttcaaactatggagtaatttctggaaattttgtagaagaaaatcttatcatggttaattctatgatagaaaaaccaagtcctgatgaagctccaagtaatcttgctatcataggaagatatattttaactcctgatatttttggaattttagaaaatactaaagcaggaaaaaatggtgaaattcaacttaccgacgcgcttttaactcaagcaaccaatggtatggttttagcttataaatttcaagggaaacgctttgattgtggaagtgtagaaggctttgtagaggcgacaaattatttttacgagaaaagtaaatgttaaacaatacgcttttttttaaacaaagtgaaattcacactataagttcttatgcaaatcgtattaatgatgaggtaaaaagtggagatatagggtattatcatcttattgacacaagtttgaatttaatcgatgagagcttgcaatttattcaagataaagagtatgtaaaaaatatcgttttagtgggaatgggaggttcaagttgtggtgtaaaagccttgcgtgatatgctttttaatgaaaaaagcaaccaaagagagctttttatactcgataacacaagctcgcattcttttaataagactttagaaaaaatcaagcttgaagaaagtttgtttttaatcatcagcaaaacaggtagtactatagaagttgtatcgctttttaaacttcttattgaacattttaaacttgatatgcaagaattaaaaaaatactttgtttttattaccgataaggattcaaaacttcatcaagaaggtgaaaatttaggtattaaatgcttttttatccctgcaaatgtaggaggtcgttttagcatactttcagccgtaggtatagttccactttgtttttgtggctataatgccaaagctcttttagaaggagctaaagcttgttttgaagatttttttactcacaaaaaagatgaaattttacaaaaagcctatcattattgtacacacaaaaatgccaatatcaatgtacttttttcatatagcgatgcttttaaaggctttaatgaatggtatatccagcttattgctgaaagtttaggtaaaaagcaaggctataaacgcataggtttaactcctattgcactcattggcgcaagagatcaacatagttttttacaactcatcatggatggacctaaaaataaaactgtaacttttttaaaaatcaaagacgctcaaaaagcacctattatccctgatattcattttaaatttttagattctttaagtaataaagtcaatcttcacgaacttttaaacgctcaatgtgatgcaactatgcacgctttaatcgctgaaaatttgagtgttgatgtgatagaacttgaaaaacttgacgcttggcatgcgggatatttgatgtattattatgaactttttacttcaacttgcggtgttatgctagggattaacacttatgatcaacctggtgtggaagttggaaagttgatcttaaaaaatatattaaattcttaatcaaaattcattaaaaaagagtataatgattttaagttaaaattataataaaaatttttaattaataataataattattatttaagaattttatgttataattttaaaaattaaaaaaaggagtcaatcatgtcagttacaaaacaattattacaaatgcaagcagatgctcatcatttatgggttaaatttcataattatcactggaatgtaaaaggtttgcaatttttttctatacacgagtacacagaaaaagcttatgaagaaatggcagaactttttgatagttgtgctgaaagagttttacaacttggcgaaaaagctatcacttgccaaaaagttttaatggaaaatgcaaaaagtccaaaagttgcaaaagattgctttactccgcttgaagtcatagaactgatcaaacaagattatgaatatcttttagcagaatttaaaaaactcaatgaagcagcagaaaaagaaagtgatactacaacagctgcttttgcacaagaaaatatcgcaaaatatgaaaaaagtctttggatgataggcgctactttacaaggtgcttgcaaaatgtaatttaaggggctttatgccccaattatacaaactaggttataatatccttttttaaaggataaaattgaaagtacttaattttttttatgaaaaccaccctaaatttgaagtaagttatgaaagaaaaaatcaaatttcaaaaccaaatattatcataaaaggcccacgattttgtggtaaaaaaacacttatttttaattttttatctcaatttaaagcaagtgaaattttgtttttagatttatatgatacacgctttgaaaaacaaagtttagaaagacttgctgattttctgaatgaaaatttacaaattaaaattctttgcctttataatttggattttatccctaatttagaaaaaattaacattcccatcatcttaagtacaaatataaaagatttaaatgtaaatgggtttgaagagcttgaacttgattattttgattttgaagaatttattagtgtaagtaagaaaaatttacctataaataatttagtaggtctttttttacaaagtggacgcagtaaatttggagaaaaaaacatacttctaagacaaagctttactcttttagaattagaaattttaaagtatttagctttaaatttgggtcagcaaatcagtatttctaagatatttatagaacttaaaaaaagattaaaaacttcaaaagatagtgtttatcaagctataaaaaaattagaaaatacttatgtgatctatactttaaaacatgatgaaaaaaaacttcaaaagatttattttaaagattttggcctaagaaataatctttgtatttcaaaggatttttcgcatttatttgaaaatttagttttaagcgagttgtttaaatttaaagaagattttttttataacaaatactttaacttttatagccaaatatctaaaattgcttatatttcaagtccaactttagatattgatttgattaaattacgtgctaagaaaattttaccaaaggctttagaacttggaatttttcatgtgatttttatcactctttcaagcgaggatagtttttttgagcaaggggttaaatttgaagtcatatcttttgataaattttcacttggattttaggtgttatttgagtttgtatcgtatttttcaaggttgtatcgtttgatgatttttgtaataagattgatataatatcccttgcgttcagaataagaatctaaagttttaatagcctctagtcctgttatctctttgccttcgcttgcaaatttagctcttgcatcgcgaaacttttcataagcaaaatgacgatttaaatttaaaacataagagtaaacactatcttgcagactatcaaaaatcttaattttatgttttttatctggatgtcttaaatcaggaattaaacctttctcaccccaagtccattctccaaaaagattatttgcttctcttgcgaagcgacttgtacctgtagcactttcaactaaagcttgggctatacccatggattttggaattttttgaatacgttttttatattctgcaaaatcataaagattttcaatgcgatatttgttttttatcgtgataagtttttcaagatttgtttgatttgaagtcctaaagcctgttttgtaagcatctttaaaaaaggcttcaataaaagctctttcttgttcaatttttttaaagctttgatcaaacatttcattcatttttataaaaaaaatttgtcttttttgatctatatcaagtttgtaatattcctctccaaagccattttttagatcatcagcaaaaagtgggattagaaaaagactaagaaaaattataattggcttcaaaacaatactttacctttccttcaaaaaacaattcttcatttttatatgtaaacccaacctcttcaccacttttaggagttattttaactttattttgtacttttttatttaaaaatgccagataaaaacaagcccccattcctgtgccacaagctaaggtttcatcttcaactccgcgttcataggtacgaacttttaaatgattttcatctaaaatttttacaaaattaacattggcattatatttttgtctcattttttgacaaagtattgtatcaaattcatctaaattttgacaaaaatgcactagatgtggaactccagtgtcgcaaagttgccaagtttttcctaattcttcaaaagtattttgcacgctttttattttgcctaaagatacttcaactttatcttgatttacctttgcttttattattcctgcaccggttaaaaaactcatgttaggatttattttgttaatatgatgtgcaaaatgtgccgcagcccttgagccattgccacacatagcagcccttgagccatcgttattataaaattcccattcaaagtcgtatttttcatgaggcaatatcacgataaagccatccccacctatgccctcataacgattgcaaagttctttagctaaagcacttctatcttcttttctatcagcatttgttatgacaaaatcattcccacttgcacaatatttataaaatttcacatttttcctttagaaatttcttgtattactttaacacattcttgcctaaaatcgacataagaattagtatttttaatgataaaatctgcttttttaagtttttcttcaatatctatttgagaatcaagtctcacttttgcagcttctaagctgagcttatctctttgcatgattcttttaaggcttaattctttaggtgtgtaaattacaatgactttgcctaaattttcataagcaccgctttcaaaaaaaagaggaatttctacaaaaaaagctttattttctttatctagaatttgcatttgttctaaaattttagctcgaatgttaggatgagtgaaattttctaaggtttttttagcttctttgttgttaaaaacaatttctccaaggatttttctatcgattttcttttcttttgtgagtaaattttttaagttaaagggagaaaaaatcttttcaagttctaaagcattttcatctaaaattttatgagcaattttatctgcgctaatgcttttaaagcctaaagaattcgctatttctataaaagtgcttttaccacaagcaattgaagcggttacaaaaaaagcatttttcatcttatgccttattaaaacttttttcgttaaaatacctttttagttcttaaaggaaaataaatgaaaatttcatatgaagatgcaggcgtaagtatagataatggaaatgcctttgtagaggctataaaacctttggttaaagaaacttttaatgataatgttgtaggcggaattggttcttttgctggtgcttttagaatgccaagtggttttaaaaagcctgtgattttaggtgcaacagatggtgttggtaccaagcttcgcttggcaattgatgctaaaaaatatgatactatagggcaagatttagtagcaatgtgtgtgaatgatttgatttgtaattttgctacgcctttgtttttcctagattattatgctacagctaagcttgaagtagaagtagcaaaggctgttgtatcaggcattgccaagggatgtaagatggcaaattgtgcattaatcggcggagaaactgctgaaatgcctggaatgtatgcaaaagatgattttgatcttgcgggttttgcagtgggtatggctgaagaagatgagatcgatagaagtaaatttgttaaaaatggtgatattttattggcacttcctagttcaggacttcattcaaatggttattctttagctagaaaagtactttttgaaagtttaaaattaaaatttgatgacaagataggggataaaaatttaattgatattttattagagcctacaaggatttatgtgcgtgattttcttacattaaagccttatattagtgctctagctcatattacagggggtggtttagtagaaaatttaccacgcgttttgcctcgtggtatgggtgcaactatacgcaaacatcatcttaaaactcctgaaattttttatactataggacaggctgtagaagaaagcgaaatgtatagaagctttaacatgggagtgggtttagtaatggttgtagatccttctaatgtaagtaaggttttagaaaattcagatgcctttattatcggcgaaatttgcattaatgaaggtattgttttagagtgaaaacaaattattatgattatttatgtgctaaaatgtatgtaattttgcccataaaagcccataaagacaaactaaaattttatctttcttatgtaaataagaaagataaaatttttagagttaatgtgtggaagtgggcggttttgataaaaattgccaaagatgataaaacgaaatatttttgttcgaatgtattaaataaagggtaaaatgcacaatttaaatgaagctttgtttcaaaaaaagataaaagaaattcgcttaaaagcaatagcgagtattatttgtgggtttttaggtatcattccttatcttggagttttatttgttcttgcgagttggattttattttttattgtgctttatgatttaaaaatctatggtggtgctaaaaatttgtttaagaatttccttattagtgcagggattggattttttggtattcttgttaatacaagtattttatttgcaatgctaaagcctagaactggcatttttggtgggctttattttaatcaagataatatttttatggctattgctatatttttagtattacattttgctattttggctttaatttttccttttttgaaagctttttactatgaaattgctagaacaacaaagcaaaagtatttcacttatgcttttaataccttttatttagggcttcttactttgattatcggcataggcttggtgtttttgctagcaagtttggttttttggattttagcgtgggtcaaatttaaagaatttgatgagcaagaactttcaaatttagaagaaagattggcaaaagcacaaaaaaaggtttttgattttgatttaaaatggattaaaatcacaatggcttcatttataattttaaacttgctcgttttaacattttcgtttatattagaagttattagctttgaagattgtaggttttactacacaaaaaaaactttattttacacagccataatcctagctttgcttagtgtgtttttgttttgtaaaaagataaaaaattacaaactttttatttattttttcatatggcaaggtttaagtgtttttggtagtcatcttctttttattcctgattttatggtagatcaacaaattgtatatggaagtttaaacataatattaagtctatgctatattatttttgcttttttattttttaaaattttgattcaaattacaaaggaaaaacttttttatcttatttttgcattttatgtttgcatagaaattttgataatattaattttctttatttttatgatggttgataactattatatatttacaaaaagtcctataaagatgctcatagataattataaattactttttcaagttgtttatttcgtttcatttttaattgtttggcttatgcttaaaggacaaaaaaatgtaaaaatatgttagaatgatgaaaaaatactattttacgtagatgtttattaggatatattcgtatgtcttaaagctctttatggggtgttaagtaattataatatttaaaaattaaaaaatatatagtttatccacattttatagtttaacttctaaaaatttgatcatctcttttttcattttttagagctagaaaacatatgagtgaaattgctttaaagttagttagagcagttgatactaaatattttgataagaaatttaaatagattgattttacttaaattaaagactttttgcctcgtgatacaaaattaagtgatgaatttttagttaaattgatattaaatatgaaaaaattataaatattaatactttttcaaattaatagtaaatatagagggtttgattttttcacaaaagatttggatagaacttgcaaaaaactttcttcaatatttatacttttaaattttgatgcaaatcctattcaatatagcattggcaaaataaactaaaaagcttaaaatagctatactcaaaagaattccaaaccatgcaaaatttcctgttccaagatttgaaaccgcgttagtaaggatattaactccaccaagtgctttaatgcctttagcacatactccagcggcgatgattatgcttacgactaagataaaaatttcagccatagtcttttaaaatcaccatcatatcttcgcctaattttctagcatttctgtgtcttgcaaattcaacaagaaaaactaaagaaatgcttacaaaatttgctgttacaacatcgagcttgatagtaaaaaaatacgctgtaaataaaaatacaacaggtaaccaaggaaagagtatgtaaaaagtaggacatttaggatcaatgatttgcggaatttcaacttcatcatttaaaacacctttttctttatctcttttatcaatccaagcaaaataaaaaggaatcaagatggcaataactacaacataggcaatcacactataaatttggtaatttaaaaaaagccctacgacattatcactttgtcctaccatatctgccatattgattgaatttccatcttttggaccataatcaagtgcaattaaagaaagcgcacatacagttgtaataggacggattttaagtgagattaaaacaggataaatacatgctaacaaaagcaaaagcaatccagcatagctagaaatgacgatttttaaagccattccaacaacaaaagttccacttaaaatcaagtatttatttttgatttttcctaagggtttatttgctaaaaaagcaagttttgctgaagcattaatatgtttcatataagcagcaaaacctgccacactcatgataataagtcctactccagaaagctgacttttaaaagtcgctgtgataaaagcataactatcaagtaaaacatttaaaagcttgtatactctctgcttggagcttttggtataggtgttcctgtgatataaaaagcaaaaataagcaagataatatttgaaagaaaaatacaaaaatgggatcgtatttttttgagtatatcataaaaattagcatagggtctattgaatttacaataaattggattttatctaaatttttaaataaaaaatattttttatttaaaaattacttgttttttgtattataaaattaacatatatagtttggttactgaaaagtttatgtttgtttaaaaaatgatttttgtattataattatacacaaatcataaatattaaaaaggatctagtgtggcaagaattttggcatttgatataggaataagctctattggctgggcatttagtgaaaatgatgagttaaaagattgtggagttaggatttttacaaaggctgaaaatcccaaaacaggagaatccttagccttgccaagacgccttgcaagaagtgctagaaaacgccttgctagacgcaaagcaaggctaaatcacttaaaacatttaatcgcaaatgaatttaagttaaattacgaagattatcaaagctttgatgaaagtttagccaaggcttataaaggatctttaattagcccttatgagttaagatttagagctttaaacgagcttttaagtaagcaagattttgcaagagtgattttacatattgcaaaaaggcgtggctatgatgatattaaaaatagtgatgataaagaaaaaggtgcgattttaaaagctatcaagcaaaatgaagaaaaactagcaaattatcaaagtgtgggcgagtatctttataaagagtattttcaaaaattcaaagaaaattccaaagaatttacaaatgttagaaataaaaaagaaagttatgaacgctgcatagcgcaaagttttttaaaagatgaattaaagcttatttttaaaaaacaaagagaatttggcttttctttttcaaaaaaatttgaagaagaggtgcttagtgtagcattttataaaagggctttaaaagatttttctcatttggtgggaaattgtagtttttttaccgatgaaaaaagagcgccaaaaaattcgcccttagcttttatgtttgtagcacttacaagaattatcaatcttttaaacaatcttaaaaatactgaaggaattttatatacaaaagatgatttaaacgcccttttgaatgaagttttaaaaaacggcactctaacttataaacaaacaaaaaagcttttgggcttaagcgatgattatgaatttaaaggggaaaaaggaacttattttattgagtttaaaaaatataaagaatttataaaagccctaggtgatcatagtttaagccaagatgatttaaatgaaatagcaaaagatattacccttataaaagatgagattaagcttaaaaaggctttagcaaaatatgatttaaatcaaaatcaaattgatagtttaagcaaattggaatttaaagaccatttaaatataagttttaaagccttaaaacttatcactcctttaatgcttgaaggtaaaaaatacgatgaagcttgtaatgagcttaatttaaaagtagcaatcaatgaagataaaaaagattttttacccgcatttaatgaaacttattataaagatgaggtaactaatcctgtggttttaagagcgattaaagaatacagaaaggtcttaaatgctttacttaaaaaatacggcaaagtgcataaaataaacattgaattagcaagagaagtaggtaaaaattacagccaaagagctaaaatagaaaaagagcaaaatgaaaactacaaggccaaaaaagacgccgaacttgaatgtgaaaaactaggcttaaaaataaatagcaaaaatattttaaaattaagattatttaaagaacaaaaagaattttgtgcttatagtggagaaaagattaaaattagtgatttgcaagatgaaaaaatgcttgaaattgatcacatttacccttattctagaagttttgatgattcttatatgaataaagttttagtttttaccaagcaaaatcaagaaaaacttaatcaaaccccctttgaagcctttggcaatgatagtgcaaaatggcagaaaattgaagttttagcaaaaaatttgtcggcggaaaaataaaatgtaaccatagaaaaataaaatgatactttttggttacattttatctttccataaaacttaaacttaaaatgtaattatattatttcttttactttgtttttccaaaaatcaacaaattttctatcaattttaggatttgcctcagcttcttttattaaatcatttatacaatcaattcttttttgtttggatttaatagtttttaatttcccagcttcttcataatacttaatacattgattttcaaaaagacttacatcataattatcttccaaaagttgaattgtatctataattaagccataggctttgggatgtctttcctgtattttttgttccatttctaatgcaagttttcttctgctttctgcagtatctttattttttgattttaaagctatgctaacactttcttctgcgattaagataaaatttattgcttctaaataattatcttgattatttgaagagagataatgtgaaattttttcatgtttatttgtagaaaaatttttacactgctcatataattctcgataaggtctttctaatcttaaaatcatttcttctgtaatcatggctttaccataatgaattttagctgcttccattaaagaaatttcataatatttagatattgcttctatttcttttaaatcttgtttagtaagagtgccgcttgttgctatttttattaattttgattttattctaaaaccagaataaacaaataaaccaattgttgcaatcaatattataataataaaatataacatcactcgtactttataatagcattttcaaaagttttaattgatattgccttacaaacaacgcctataatttcagcgttgttaatatgctcaatattaacaacaatatctttgtaaaaagagttcatagaacttaatacaatttcatttacaaatggttgttttaaaagctttttacagtaaatttcgccatcaaggttgataaccacaatatctccatttttaacaaggtcaagtttatttttgctcacatcaatagctataacatctccactatggataaaaggctccatactatctcctataactttaataatatcgagtttagctaaaggcggtaatcctaaggcttcgcaggcaaattttttacttattgctatctcagtatattctaattgactatttatagcaccatatccagcggcggctgccgcatctgtataatatcttaatttcaaaatatcatctataattcgcattttgtcaaaaaagatagcatcaagtgaaatattgtgttcttttgaaattttcattaataaatcgtagggaatggtatttctagttctccaagtgcttaatgtattgggttttactttaaaaattccacaaaattctttatcatcggtgatatttaacagagcataaactctattcaaaatgtctgctgttttatgcattataagccttcttttattaaaaaattcacaaaatgcgataaaatatcttgacttaattcgcattttgtcttataatttgatattttaatagcaaattgtatcttaaaataactcaatttgatataaaaatatcaaattaaaggaaaaaaaatgttaaaacaatacttcgaagataatggtattaatataaaaaaattcgcacaaaaacacaatcttgactatttaagtactattcgcgttataaaaggtgaatatttaggaaaatacaaagcgaagaaaaacactagagcagtttatgaaaaacttttagaacttaaaatcattgatgaaatgcctaaggcttgttcatgagttacttcttagaaaccaaagaagccgcacaaacttttaatgtaagcacaggagctttgaggcttgcagtaagtagaaactcaaataaatatgagtggctaaaagtggataatgaaaaaggtggcaggggtggtaaaaaactactatttaaaataagcaaagatgagcttttaaccgcttttaatcaagaattaatcagtaaaaatactttgatttttaatgaaaaaatgcaaaaagttaaattgagcgaaattattactaccgataatttaaaaactacaaataatagtttaaaaactagtaatttaaatttaacagagccaaaaatagacaatgatttggctgttttaaatataaagtttgaaaatttaagcgatgaaattaaaaacaatgctagagaaaagcttaagtctttaaagcaagtagaaaaatatattgaaggaggacttaagcagaaaagagctttggaattatgcggtatttctaaaatagaaatttttagaattcgcaaagcatataaagaaaatggcattctaggtcttatcgacactcgcggacttcaccgcaaagataaaaccaagcttagtgcttggatgcaagaatacgctttaagagaatatcgcacctttggggcaggtggatttaatttcactgagctttggtggcaaattcacaaggaagcagccattaaagaaaattatgactttataggttttgatttgggaaaagtaaagccactctttagtgtaaaaaccttacaaaatttcattaaaaactattataaagacaagcctttggagcattgtattatcacacaaggcttagataaagcaaaaagtaagtttctccctgcacaaggcaatcaaagagagctttatgatatgaaaaacatgtgttggcaaatcgatagctctccagctgattttatagtaagagatgatgaaacactagagcctttccgcccacacatcttaagtgtcgttgatgtctttagtggcatgggagtagctaccttagtaggaaaatcaaactctttaagcctaactagacttttatggaaagccatagataagtttggtaagcccgatatgattaaaggggataatggtaaagattatctttcaaaagattttcaaagcttacttgatagtcttaatataagctatgatgcagctattgcttacgcaggagagcaaaaagctttagttgaaaggcgttttggaacacttcaaagagctagattatctcaaatgcacggtcacattggaaatagcttagctaaaagagaaatgatagagcaaaaaactcctaagaaagaaagaaaagctaaagatgaatacggctttgctaaaaaaactaatcaaaaactccttcacacctttagcgaagcttgtgagcttttggaagctgaagtgatcaagtggaacatgagcaaagttcgccgcaaaaaaggcgttaaaactccacttgaactttggaactcatgcgatagatctattgtaaaaatatcttatgaagaatttttgtttaacgctggaaataaagaacttagggttgtgggcaaaaaaggcattaactttgaaagtagagtttataaaagtgctttaatgccaagtgttggcacaagggttaaatgtgtgcaaaatatcgataatattaaagaacttttcatttatgatttaagcggaaactttctttgtctagcacttgatgaaagtatcgctaaacttagtaaagaaagctataaaatgcttaaaaaaggttatgaaagtgaagttaaagcgattaaagaagtgcttaaaaaagatgagattgccgcctttactaaacttaatattaaacaagacttacaagatttacaaagtgcttttgaaaactcactcgtagaagctaaagaggtgcatcaaaaatcccttgcaaaagaagccttaaaaactcaaagagaattagaagagattaaaaacaatgctaatgcggatgagcttattttaaacgctaaaaaagaaataaataacgatgaaagcgagtttgacatggaagcttttgtcgaaaagaaatattttgctggttaaaaattgtttaaagcttgattaattcaagttttaaagagtttttactcataaaaaaacaaaaggataaaaaatgcaattagtagaacttactaaaaagtttttaagcacccaaaacatctctcaaaacaatctctccgatcgtttagggattaataaaagctatatggtgggctatatgaaagaaggaagtagctataaatacgctttaaaagtagagcctttacttgaaaaatacattaaaagctttgtggaagaaaaaagcgtgaaagagcttcaaacaccttttattgccactaaagatgcaaaggcgattaatgtaaccattgaaagtgccatgagcaatcgcgaaatgggagtaatcattggcgaagcggggactggaaaaagcagagccattaaagaatatgccgctaaaaatggaacaagagtggtgctttttgaagcaacaactgagacaagcaaaagaatgcttttggtggggcttgaaaataaactcaatgtgtgttttaaaggttctttggatgataagattagaggcattgctagcgagttagcaagaacttcaaaggttttaattatagatgagagtgagcatttgccgtttcgtgctttggagtgcttaagacgcatatatgatttttcaaatactgctttaatcttagtaggtactagaaaacttaaaaacaatcttacaggcattggcagaaatgattacaacgagtacggacaactaagctctagaattggtgcaaaatgggaattaaaaggactttgttatcaaaacaaagaaggtttaaaaaatgaagacttaaaaacactttgtaatcattttgatgtggaggagaaaaaggctattgatttagtttttaacctcgctcgtggcaactttagaaaaagtgagaagcttttaaaaagagcttgtgaatttgcagatggaaaagcggttgagcttaaacacatagaagctgccgcatcatttttaatgctgggctaaaaatgagttttgaagagatagctaaagaacttaatcttagcgtgacacgcgttcatcaaatctatactgaagctcttagaaagttaaagagtcctaaaaataaagacaagtggatggctatctttgaaacgattgacttaatcaaaaaagaaaaagtaaagaaagaaaacttaatacaaggagagaaaaaatgataccaatgattaaaggtgagaaagctgattatagtgcttcgctttttgagataaaaggtgtaagcattatttataaagaaagtggagtgtttgtagatgttttaaaaggaatttatcctgattatattgcaaaaaaaatcattcgttttcatttgggtaaaaagcttaacaaaagtgcttaaattaaagcactttgattaagttttttaaaacttaaatttattagaaaggattaacaatggcattagtttatgtagcctctccttataaagctttagtagtaagagaaagtcaaagaaaagcacaagctattagcatagctcagcaagaatgcttaaaaattatgcgtgaatgtgaaggttttgtgcctgtttcacccatactacaatttagttatttggatgaaaacaagcacagagacaaagctttacaaatgggattagagcttttaaaagcgtgtgattatatttatcttagcaaacacaaagatgcaaaatattcacaaggtatgcaagaagaattagcacttgctaaaaagcttggcattaaagagctagttttggagttgcccttacaataagggcttaaggataatcaagaaaagaactaaacacgcagtgcttttaagatatggcgtaattctttgggattatcaaattaaaaaatataaattaaaggagatttaaatgcaaataaatagttttgaagatgttaatttagcacttaaaaaagtggcagaacttagtgtaaaaatagaaaagattaatggagaagtaactttagcttgcaatgagattaaagaagctcgtgcaggagagattaaggttttaagtgatgagcttggatacatagagcaatgtatcactactttttgtgaaaataacaagcatgaatttgccgaaaaaagatctaaagaatttacctttggcaagattggctatcgcttaagtaaaagcgtttctttaccaagagtaaaagaaaaatttgacaatttaatcaaagctttaaaaagctatggactcaatgattgcattacttataaagaagaacttaataaagatgccattgtagagcttgatgatactactttagtaaagcttggacttaaaagagttgtaaaggataattttagaatagagccaaagattgaaagcttggagattgaaaaatgagagagctttccttagcggcttttaaacttttaaatagtgtttttaaaacaaaaaccgctcattttaatggctttttagaacttgattttaaaaataagcctaaactaaaaaaacaaagctttaaaagaaaaaagaaaatgggtgcaaaacaaaaaattaggcttagaaagagaaaaatttaacaagtccgctaaggcggatttgattaagtttttaaaacttaatttaaaacaaaaggataaaaaatgtatgtcaatgtaagcatagatgcgagtgatttagaagatatagatgctcatgatttggctgaactttttgaagatttaagcacaaaagagcaagaggaattctttggaattatccataaggatatcaagccattagaaagaataagagctattctttctaatttgtctaatgatgaagcacttaaacttttaaaagaacttaataatgagtttaaaagcgatgaggaatggcaaaaaactataaaaagtataaatggaggtaacaaatgaaactacaagattttgattttaggatttgggataaaactaaagaagagtttttaaagaaagagccgactttaattaaaatagataacgaaagagtgattgctgggcgaatttcaagattttacgcaaatactgcggatattacagatatgtttataggaaatggcaatgatttagaaatcgagctatggactgggatttatgataaaaatggcaaaaagatttatgaaggggatatcgttaaaactaaaagtccatacgattgctttttggcaaaagttggcattcataaagaagggactttttatcttgagagtaaaagtagagattacataggctctttaatttatttagttaaagatgaaggatatgataccgaaatcatcggcaatatccacgagaatcctgaacttttgaaatgttaaaaaatactaaaaattttaacataaaaatgaaatatgttaaaaaagccaaaaaatttaacaaagtccattgatttaatgggcttgattaagttttagcaaggaaaaaagatgaatttggattttttaaatgagtttaagttaaaaaataaagatttaaacgagaaattagagtttttaatccctgattttttagttaagaaagcaataaccattatttacgcaaatggcggcagtggaaaaagttatttaagtgctgctatttctaaaacactttgcaaagatgcaagggttaaaagcatcgtttatgttgacatggataatcctttaaatgttttaaatgaaagaggttttggtgaacttattttaaatgaaagcaaattcacttatattcacagatcaagcttaaaaacttcagcttatgaacttttagaaatgattgaaggcaaaggcgtagcaggaagctatgaaggggttttatttgtacttgattctttacgcaattttgcagatattgataatgatactaaaatgatgtctttaatgtctttactcatgaatttaagagaatgtggggcaaccattatggttttacaccattctacaaaagatggcagagcttttaaaggctcaaatcatattagaaactcaagtgattgcatgtattttttacaaaaagtggctaacttagaacaaggctttgaagtattgcttagtgtgcaaaaagaaagggcaggaattaaagatcaagccttttttatcaatacaaaaactctaaatattaaaaacaccgacttgcaaaacgctaaaatcagcgataaagaagaagcttttatagataaagttttaaagcttttaaacgaaaaaagcctaagcacaagtgagattttatcggctcttgatgtaagtaggagtgataatttttcaaggaatactttagagaaatttaaaggtgttttttgggaaagtgagcttggcggggaaaatggtcgcacttttgtttggaaaagtttaaaagctgacaataaagacagcaacgacaaagaattaagcttatttggggatgagttatgaaatttaaccctccaagcaaagaagatttaattaaagccattgatgagtttaatgctaaaaactcttgctctatcccttattttatagcagatagctttataaattactataagcaagacgatggaaggtggctcatggctaataaaaagcctttaaaatgctggaaaagagcacttaattcaacttggcttccaaagttagcaaacaaatacaaaaacaaagataagcaaaaagctttagcttcttggctagaagaggagttttaatggataatgcaaaagaggcactaaaagagctttttggtattagtgaagttcaagcagtggttatagaaaaactttattttaaagccaaaacaccaaaagatatattaggctttaaaaaatactatgatttaaccatgttaaaaaagcaatttgttggtacaagctatgaaaaactttctcttgtgtgtgcctttgcagagcttgatttaaacttaaggtacaaaaatatagagtcttttttagaatggcttttcatttcattttcaaatcgttttatttttcaaacaaaaaaaggagatttctcatattcttttgcacttagatattatgatggtaacattgtttatgatgagttaggaaagcctgttttaaagcatgttgattgtggggataatctttattttattaatgctaataaagagctttgtgatgagcaaagaaaaccactgaatgtaggagagttttataataagctagttgaatatatgtttaaaaaccaagataaaattatttttgataataaaattgaaataagccctgttattaaaactcaaattcctagccaaactaaaataaataaagattacgagcaaaactatttagaatacaaaaagaatcaaaataagctttataatgcaaatattgataaattcacttcaaaactagagcaaattttaaaggctaaaaaatgaatactcaaaacactttaaaaaagcacttaattaaaatcattcatactttaagaaaagatgctaatttaagcgatgatgaaagctatcgctgggttttaaatcaaagatatggcaaagcttcaagtaaggatttaagcatagatgaacttagggactttgctataactttgggctatgatgaaaagtttttaaaaaagcaaaataccaaaaaagcaaggtattttaaaaaagaaaacactaaaagcggaagggctacaaaaaagcaacttaatatgatacaagccatttggagtaaaaatgctaaaaatcctactcagtgggctttaagagagtttattaataatattgtaaaaaagcgacctttgcatctttggtatttaagtatagaagatgctaataaagttatcctagggcttaaaaatttagaaaacaacagcacacattaagccaaacgaagctaatgttgtctcatcaaaacaaaaggagattaaaatgattttagaaatacattcttacgatgcagagttttttttaaccttaggcatagaaaaacactcacaaattgcctttgccgcaaaaagaacaagccttgaaataatgcataatggaatcactcatcagattaaaactgataaagattttgggattttgcttaatgtggtttgtaatatcagagaaaaacttgatgagagttttgatgaagaagataaaagcttggttattgatatagatgaaattgtggctaaagtttgcaaagaattagagtaatgctctaattcttttttctttctc

SEQ ID NO: 3819 - DNA, 21728 bp, synthetic construct
  misc_feature 1..21728: note = Synthetic
  source 1..21728: mol_type = other DNA
aaaatgcttgaagatcttgcaagagattttcaaagtgatgagttaaaagataaactaaatgataatttaagtcaagttaaagcacttttacaagaagcggttgttttaataagtgaaaaaaagaattctaaagcttgtgaaattcaaaaaattcaaaaagctttaaaatatttcaaagattaaaatttttaaagcatagcgataagccgagttctgtctagaatgctcatttatctagttttgttttcgcaaacaaaatcaagcgaagggttaaaataaagaccttaaccatcccttcttgctgcacattgggtttacatagccgaaattgttgccaaaatcgctggtaagcttttacctcaccgtttcaccttttccactttcgtggtagttttctttctgttgcactgtcccttaggtcgccctagccatccgttagatggaatgtttgtcttttgcagctcggactttcctcttctttttaaagaagcgagcatttactatgctttaaagctaaattctaacaaaaaaatgcttattttattatcaattatattgtgatatcaaataatttttgttaaaattataatttatttttaatataaaaaggaaaatttatggcatcttattcaatgggtgatttaaaaaaagggcttaaaatcgaaatcgatggaattccttttaaaatagttgaatatcaacatgtaaaaccaggaaaaggtcctgcttttgtgcgtataaaaatcaaatcttttattgatggtaaggttttagaaaaaacttttcacgcaggagataaatgcgaagctccaaatttggaagaaaaaaccatgcagtatctttatgatgatggtgaaaattgccaatttatggatacagaatcttacgagcaagttgcaatcagtgatgaagatgtaggggaagcaaaaaaatggatgcttgatggtatgatggtagatgtactttttcacaacggcaaagctatcggcgtggaagttccgcaagttgtagagcttaagattgtagaaacagctccaaattttaaaggcgatactcaaggttcaaacaaaaaacctgctacacttgaaacaggtgcagttgtacaaattccttttcatgttttagagggtgaagttatacgcgttgatacagtgcgcggggagtatattgaaagagctaataaataaatatcaaattttgtaagcttttataaattaagatatttatacaggaatttttaaaatatattatttcagcttttaatgcgcataagcttaaaagctgaattttaaaagaattatctatttgtcaatcttactctaaaaatgtattttgcaatgtattcaaaatattttcttaaataaggtttatggataacaaaaccccctagaagccccaaaagactacctatgataatatcttgcaagcgagcgtgtatcagcatatcaacacttaaatttccaaaagaagctgcttcagctaaataagtcacataaggggtaagaaaaattacggttaaggcatagtttctaactaccaaaaactctattataaaggccaaaaacatcatcaacaagacaaattctaaaggagtaaatttgatttttaaaagccaccatgcaaataaaattccaaccgttgtcccaagaatgcgttgaagctgttttatccagactgattttaaattagctccttgtaagataacagtcgtgctaactgcaacccaataacttctatcaagttctaaaaatgctcctagaaatacagcaaatccgacaaaaaaagcaataattatagaatctacaaagataatatcaaagcctaaattcccattttgtaaaacaggcttgggtggggaatttttaaaaatataaatgacagatacagagtataaaaaagcagctatgttggcaatgataccacctatacaaatcaatcccactagaaaaatataatcttttgctggaaaaggaaaaaatgaagccaataaacaggaaaaaacaaagaaaaaataccccggcgcgcctatgttataatagcgtatcaaaatagaactagccatagccactagaccaattataagcggagaaaacgcaggaaaaaaatgggtgcaaagtcctattaaaaaagataagcacaaaccaaaagaacagcacattgtaacagccattctatgatacataggcgtattggttgtataaacaaaagccatgattcctatcatagcgattagtcccaagtccatacgctcataatatgcagcaatgctaagtgcaaatccaactgctaaggcaaagaaaaaaggcatttgccaaactctttcagttggattaagttgtatgatttctttatattgttgttttaaaatttttcttttactcattttcttatttgtccttctccgctgattaggtatttataagtgcaaatatcttcaacacccattggacctcttgcatgaagtttgcttgtggaaattcccacttccccaccaaagccaaattcacccccatcactaaaacgagtcgaggcattgacataaatacaagatgagcgtagaaggcgttgaaatttgtttatatttaaagcattgtttgagattatggtttcagagtgtaaagagctgtgttggttgatatgctctatagcctcatcgcaatcttttactgattttacactgatagcaaaatcaagccattccgtatcaaaagtgctttcatcagcctttgaaatttctaattttgagtttttaaaatgttctaagatattttcatgtgcgtgaatttttaccttaaatttttcaaattcagggattaaaagttctataaaatctttagcaattttttcgtggattaaaagggtttctagagcattacaaacacttactctttgacattttgcattaaggatgatttctaaagccatatttaaattcgcactctcatccacaaaagcatggcataaacctttgtcttgtttgatgagtggaatttttgtatgactagcgatttcttgtatcatatttgaacttccacgagggataatcacatcgattaaatcatcaaaagctaaaatttgcatgatctcatttctttcataaaacatagcaaaacaatcttgcaaattaaactcttctagtactttataaacaagatcaaatattgccgaattagtaaattttgcttcactgcctcctttaagcacgcaagcattggagctttttatcattaaagcaatgatttcagcacttagactcggtcttgcctcataaattacactgattagtcctatgggaatgctgattttttctatctttaagcccgcataattaacccaacctttagaaattttacctataggatcttctaaataagcaattttttccaaagcgtcacaaagagaaaaaatgcgtttttcatctagtaaaagtctgtcccgcattgctccacttttggtgaaatttgctatatctttttcattggattctaatatggttttgaaattctttcttaaagtgtgagctagtttcaatataatattttctttatctttgggtgttaaattgagcaatttttgagaatttttcttaatattttcaagtaaatttcgcatttttaatcctttatttacaaaaaacttgataaattatacaaaaaaatttagaattgaaaggtaaatttgaatgaaaaaagtagatttaattgtagttggcgcagggccgacaggaattggttgtgcggttgaagccaagcttaaaaataaagaagttttggtattggagaaatcaaacaatatttgtcaaactttgatgcagttttacaaagatggtaaaagagttgatatggcttataagggttgtgaagggacaaatcacggacatgtcccttttcaagatggaaccaaagaaagcaccatagaaacttttcaaaacgctttaaatgagcataatatagaagttgaatttggctctgaagtagagagtgttaaaaatgaaaatggagtatttttagtaagcacaggcaaaggtgtttatgagtgtaaaaatatcatcgttgctataggtagaatgggtaagcctaataagcctgattataaacttcctggaactttaacaaagattattaatttcaatgctaattctgttttaggtgatgaaaaaattcttgttgtaggaggcggaaattcagctgcagaatatgcggtggatttagctaactcaaataaagtaagcctttgttatcgcaagaaagaatttacaaggctaaatgatatcaatcttaaagatattcacgaagctggaaattcaggcaaagtagaattaaaactaggtatagatatagaagaacttgaggatgataatggtaaagctaaagtgaaatttaatgatggcagcagtgagacttatgatagaatcatttatgctatcggtggttctactcctcttgattttttacaaaaatgcggaatcaatgtcgatgataaaggagttcctttaatggatgaaaataaacaaagcaatgtaaaaggcatttttgtagcaggagatattgcaactaaaaatggcgcaagcatagtaacaggcttaaatgacgctgtaaagatacttgccgtaatttaatcaaatttggcccttgggctaaatttgacttattaaactttcaatattataatttctttattatattttaatttttaaatattattatgcaaacacaaaacaaaaataataaaaaaatcataccgatagaaacctatcgcttagctttctacatactaggacttcaaacactctattagctccttttaagatatttgtattgttaaatattttaaaggattttttatgtcaaatatttttagcaccttaagcccttttaggctttttgttaaatgtgctgtgcctaatgtaataagcatggcatttatttctttttattatattgttgatggaatttttgttggaaaatatctaggaaatgacgctttagcggctttggccttgattattccttttattatgatatcttttgctttggctgatatgatagccattggttcagctgtgcaaatttctatgcatttaggacttgggaagaaacatttagctagaaaaatctttagctctagtatgttaattatctttcttatttcatgtttggtgggcattttagaatatcttttaagtcctgttttgattaattttttagatgtaaatgaagatatcaaatcaatggcaaaagagtgtatgcttgtgtttgctttgttcgcaccctttaccatgtgttcttttgctttggataattatcttagaatttgcggaaaaacaacttatagtatgatgatgaatgtgattatagcattgagtaatatagtgcttgattatattttcatcgttgtgttgggttggggcttgttttcagcagctcttgcgacttgtttgggacttatgctaggcggtatttttggaattttcccttttttatttcaaaatttagagcttaaattctcaagtttgtatatgaatatgaagattttcaaaaatatagtttataacggaagcagtgaattttttggcaatatctcgggttctttatatggcatatttgccaatttagttttattaaaaatttcaggtactcaagcggttgccgctttttctatcgtttcgtatattgataattttatcattatgcttattatcgctatgggtgatgcgatgcagcctgcattaagttataattatgctaaaaaggatttttcaaggattaaagatattttaaaggtaatgttttttgcgggtgcgattttgtctttgctgtctatcgtgatgatatttgtttgtggtaaggatttggtaggattgtttactcaagaaggtgatcaagaatttatcatttttgcttatatggctttgatgttgttttcttttaattatctttttgcgtggtttaatgttttaagtggttcttttttaacagcgagcaataaagcgagtttttctttgattttaagcttgagtcaaaatctttttatccctttgtgttttcttttgattttatcttctatcatgggtttaaaaggagtgtggcttagtccattttttgctgaactttgtgttttgattttagcttgtatttttgttagaaaagtctttaagaaactatcgtttttatgatgatagtttctttggattgattttagaatttatatcctacacctgtaagcaagatgtggtatgtttcatcgtaaaaatctatatcactatttcttttttctaggccgtaatttacaaagccataaagtgagtcatagcctaagaattgattttttacgagcttgagattaaattttgtgatactaccatcttgtttttggttaaaaataggatctgtgccatctgctttgtattgatttaagcttaggcttggagttaggatataatttcttgcaaaaactagatgtgtgcctattttaaagccatatcttgagtagctttgagcctttccatcagcgtcattataatcatagattaagcctaagtttaataaagaataattatagcttaattctaactcatgataatttccctctcgtttaagagagtcaaattctatactttctttatctagtttgttttttgcaaaaacataagaagcattgaattttccaaaatcactttcgtaaagttgtgaaattctaaagccgtatttactcacatcagtttcttcacgattacctataaaataaggattagcataagctttttctcttaaagatgaaatgaaagaaaaagaagtgctaaagcgttctaaataagctctttcataacccaaagcaataccgcttaaatctcttccgttatagtttttaagaaatactctatcattatcgattaaattgccataataaagctcaagacctataaaaggtatggcagcagtatcggaatttttagcgttatacccacctagatagttgctatttgctagaggtgagatattgcttttaacatctcttactcctatccctaagcttaaatttccgctaagaccactttgaaattctatggatgaagcttgacttacaaataaagaggccaaagcaaaagaaaataaggtttttttcaagataaactccttgatagtttttgattaaaattataattttattgtaactaatattactttaattttttataaaaagcttatgtgaatttttagattcttttagataaaatctttcaataaattttactcaaaaaaggaaaataggtgcagcaagagcattttgatttggatttagaacgcgcaattttaagtagttgtatcatgagcgaggacgcttattctagcatagcaggagatatagaacctaaagattttagtcttaaagctcatcaggatgtttttaaagctattattgcttgtgtgaatgctggagagcctatatcgattagctttttaaaaaagcataaaaaaatagacgagcaaattttaaccgagattatcgcaactccttcgataatagatctgcccgcttatgtcaatgaacttcgcgaaaagtcgattaaaagacagcttttaagttttgcccatcttttgccaacaaggatcaatgataatcgcgcagtcagtgaaatttctgatgaaatcggcaaggaaatttttaacatcaccaatcgtgtaaacaccaacgatatcaaagatatagaaatagtcttaagcgagcttttggaagaatttaaaaaacaaaaaagccttgaaaacaaatccgtgataggacttgatacaggatttgaagatctaaatactatgactaagggttttaaaggcggggagcttatcatcatcgcagcgcgcccaggtatgggaaaaacaactttgtgcttgaattttatagaaaaggttttaagacaggataagggagtggtgatgttttctcttgaaatgcctgctgctcaaatcatgcaaagaatgctttcggcaaaaacttccattcctttgcaaaaaatcttgactgcggatttaaatgataacgaatgggaacgcattggtgatgcttgtaattattattctaaaaagaaattatttatctatgatagtggttatgcgactatcacagatgtaagagcgattttaaggcgtttaaaggctcaagaagaaagtatagggctttgtgtgatcgattatatagggcttatgatgagtaattctaattttaatgatagacatttacaagtcagcgaaatttcaagagggcttaagcttttagcaagggagcttgatatgcctatcatcgcgctttcgcagctcaatcgttctttagaacagcgtgcaaacaagcgtcctatgatgagtgatttgcgtgaaagtggggctatagagcaggatgcggatacgattttatttgtgtatcgtgatgaggtttatagagaacaagatgaaaaagaacgcgaaaacaaggctaaagccgaaggcaaaccttatcaaagaaatttcattcctaatcctatgcaagaaaatgctgaaattttagtcggcaaaaacagaaatggccctgtaggggttgtcgaggttttatttttaaaagaaaaatcttgctttgtggataaaccaagatttgagagtgttgaatttcaggagtagggttaaattgttagaggtgctttgatatgaaagcaatattatttaaaatcaatcataaatactatataaaagtgagaacgaatgaaaattttaggttttgatatagggattaactctataggttgggcttttgttgaagacaatcaattgcaagattgtggtgtgagattatttactaaggctgaagatcctaaaacaaaagaatctttagctttacctagacgcaatgcaagaagcaatagaagacgactaggaagaagaagatcaagactgattgctttaaagcatattatctcaaaagaattgaagttaaattatcaagattatatggcaaatgatggagagttgcctaaggcctatgaaggaagacttataagtccttatgagttaagatataaagcactcaatgaaaaaatagaacccaaagatttagcaagagtgattttgcatatagcaaaacatcgtggctatatgaataaaaatgaaaaaaaatcaagtgacaatgaaaagggtaaaattttaagcgctttaaaaacaaatgctttaaaattagaaaaatatcaaagtgtaggagagtatttttataaagaatttttccaaaaatataaagaaaatacaaaagattttataaatatacgcaataaagaaggcagttatgaaaattgcgttctagcaagtgatttagaaaaagaattaaaactgattttagaaaaacaaaaagaatggggatattcttataatgataattttataaaggaaattctaaaagttgcattttttcaaagacctttgaaagatttttcatatttagtaggagcttgcactttttttgaagatgaaaaaagagcttgtaaaaattcatatagtgcttgggaattcgtagcgttaaccaagattatcaatgaactaaaaagcttagagaaagagagcggagagcttgtatcgagtcagattatcaatgaaattttaaatcatattttagataaaggaagtatcacttataaaaaatttagagaatacattaaacttcatgaaagtatgaaatttaaaagcctaaagtatgataaagacaatgcagaaagtacaaagctgatcgaatttagaaaattagtcgaatttaaaaaagccctaggagagcattccttaactagggaagaactagatcaaatagcgacttatatcactctaattaaagataatgagaaattaaaaattactttagaaaggtatagtttaaataacgagcaaatcaagaatttaatagaaattgatttcaatgatcatataaatcttagttttaaagcacttaatctaatcttgcctttgatgaaagagggaaaaagatacgatgaggcttgcaagcttttaaatttgaaaacaaaatcaaacaatcaaaattcgatttcttacctgccttttgcgatagtatttttgcgcaagagcttaccaatcctatcgtaaatcgtgctataagcgagtatagaaaagttttaaatgctttgcttaaaaaatatgggaaaatgcataaaattcatatagaattagcaagagatatagggctgagtaaaaagcttaggactaagatcgaaaaagagcaaaaagaaaactatgagaataatatttgggctttaaatgagtgtgaaaattttgggcttaaggcaaatgctaaaaatatcttaaaattaaaactttggaaagaacaaaaagaattttgtatttatagtggtaaaaaaatatccatagaacacttaagagatgaaaaagctttagaggttgatcatatatatccttattcacgaagttttgatgattcttttttaaataaggttttggtttttaccaaagaaaatcaagaaaaactcaataaaacaccttttgaagcctttggagcaaatgaagaaagatggagtaaaattcaagctttggctcaaaatcttccctacaaaaagaaaaataaaattttagacgaagcttttaaaggtaagcaacagcaagattttatcagcaggaatttaaatgatacaagatatatttcaactcttattgttaaatacacaaaagaatatttagattttttacctttagatgaaaaagaagatataaatctaaaaagtggagaaaaaggaagtaaaatacatgtgcaaacaatcaatggaatgcttacatcagttttaaggcatacttggggatttgctcaaaaagatagaaacaaccatcttcatcacgcgcttgatgccacaatagtcgcttatagcacaaatgccattataaaagctttttcggattttaaaaaagaacaagagcttttaaaagcaaaactttatgctaaagaacttacaaatgatagttataaacatcaagctaagttctttgagccttttgaggggtttagagagcaaattttaaatcaaataaacaagctttttgtttcaaaacctcctagaaaaagagcaagaggagctttgcataaggaaacattttaccctaaagatgaaatgattaaaaaatacaactcacaagaaggtgtagaaatagcactaaattgtggaaaaataagaaaaataggtacaaaatatgtagaaaatgataccatggtaaggattgatatttttaaaaaacaaaataaattttatgctatacctatttatactatggattttgctttaggagttttaccaaataaaatagtaattgcaggtaaagataaaaagggcaatccaaagcaatggcaagaaatagatgaaagctatgagttttgtttttctttgcataaagatgatttggttttgatacaaaaaaaagatatgcaagaacccgaatttgcttattataatggttttgatattagtaactcaagtatttgtgttgaaaaacatgataataaatttgaaaacttaacagacaatcaaaagctattgtttgtaaatgcaaaagaaggaagtgtaaaggctaaaaaaataggaattcagggattgaaaatttttgaaaaatacattataaccccgcttggagaaaaaattaaggctgattttaaaccaagggaagatattgccttaaagacgagcaaaaaacatggcctatgatgaagcttttaaaagcatattgatatccaatcaagcaaaactaagccttgagtttaatcatcttgtgataaaacaagacgataaagaagccaagttttttctcaaagatatcaattttatcatactagaatctttgcaagcaagtatcacttcaagcttgcttagtgctctagccaagtataaaatcatacttttaacttgcgatgaatctcatcatatcaatggaattttttctccatttttaggtcattttatcagtgcaaaagtagctaaaaagcaaattaaagtaacactacaaagaaaagcgattttgtggcaaaaaatcatcaaaaacaaaatttcaaatcaagctcatattttaaaaattacccatcatatcaaagaagctaaagagcttttagctttggctaaaaatgtaagcttaaatgatgctaaaaatttagaagcgactgcagctgctttgtattttaaaactttgtttggtagcaattttacaagaaatgagatatgttttgtaaattctgctctaaattacggctatgctgtcataagatcacttatagttagagcggtttgcataagtggacttttaccttggcaaggtataaagcacgataatatctataatgattttaatctttgtgatgatttgatagaagtatttaggcctttggttgacttgtgcgtatttgatttaaaagatataaaagagagtgaatttttagataaggaagcaaagcaaagattaattggtattttgcaagaagaaatcattattgaaaataaagcttatcctttaaatagggctataaatttttatattcaaaattttaaaaatgctttattggaaaatgatgaacttatgatggtaaatttatatgatagaagataaatttatgagagtattattgatgtttgatatacccactaaaagtaagaaagagcaaaaaagtgcaaataaatttagagtttcgcttgtaaaacttggcttttttatgatgcaatttagcgtatatgttaaaatttgcaaaggaatgacttcggctaaaacagcaatcaaatccgtagaaagaattttacccccttgtggcaatataagagtattaaccataactgaaaaacaatttgacaatatgcaaatacttttaggcggagtttcttttaatgaaaaaatgaatgatgataaaaatttagttctttttgagtatgatgaaaaaacacaagattttaaatacagcaatgacaagatatacaaagaaaacaaaactaagtctaataaaattagacaagctagtttgtttgaattttaacggttttaaagggattgtaaccctgcgtggctaaccgaaaaccacttattttagtctctttttaaatttctcttttaaaatgatagcatatttttatacatttttgtatacaaaaagctctatttttctttatttgttcaaagtctattttaccataaagaaatttaaaaagagactaaaacaatattatttaatttaataaggggttttgtattttaccataaagaaatttaaaaagagactaaaacattatattcaccattaacaaattcacaaaattttaccataaagaaatttaaaaagagactaaaactggacacggcggtagcataacaagttgccaattttaccataaagaaatttaaaaagagactaaaacaaattctttttcaagctctataccttttgattttaccataaagaaatttaaaaagagactaaaacaaaaattcaaaatatctacaaacaagcggttttaataaggggcgttcaagataaaagcccattgcgtattatgcttaaaacgccttccgcacttttaaccccaaaagctaaatttggagcaagaaaaattaaaaaaataatcgctagtttatttccatttaagagcgtctgggtttgatttaccccaagaactacccgcattctcaagtccatttgtttcaactgcccattttgcattagagcaatccctttgttgagtttcattcattttctccatttttttacattctgcaactctagcttttgcctcatctaagtgcgctttataataatcgcttgtttttgcctcatctccacaacctactaaaaaagccaaaacacctaaaccaattaatccgctaaaaataaaatgtttcattgtttttctccttgatttaatatagaaacaaaatattttaacattattttatttctatttaaaaatattaggacttgattgataaagattattattttttatctttttgaaaaagttttttatttttacttgttttaaaatatctttattattttgtggctgacatattgctttgattcgcaattaactgattttgtttttttaagcagttttcatagcctgtaaatttccattggaattttgcttaagttttacagataagcatcttcgctttataagtttttgtatcgaagttttaattgttgcaatgtgttatttaatttaatataatgcagttaaaatacactaaaaatttttaatctagttttgatttactaagcgggtaaaaaaatataagtttttttagattgtataagtgtaattaatataatggtggatttagcaggactcgaacctgcgaccaaccggttatgagccggttgctctaaccaactgagctataaatccgccttaatttttaaagataaaattatatcttatttttgcttaaaattattttattttatttttactatctatccaaaaatatctaaaagtaatcaaatgctgtaaaattccaaagaaaatcataaaaatcgtaaaagaacttcctccatagctaaaaaaaggcagcgggataccaacaacaggcgcaaatcctatagtcatcgaaatgtttaccgcagcataaataaaaataaacaatgctacgcagtttatagcaaccctagcaaaataatcttccttaagcttttgatttaagcttagcaaatgaaaaatgagtagagtatagagcaaaatcaatacaaatccccccaaaaaaccaaacctctctataagatacgcaaagataaaatcacttgtggagataggcaaaaaattaaaatgtgtttgcgtagcttcatcttgagattttcctataaggcctccattgcctatggctatcatggattgtgcgacttgataactcggtttttctgagataaaatcatgaattctttgtttttgatagggttttaaaaaatgcgtataaatgataggagagcttataccgatggcgatgatgatactaagccaaattttataatgcacacccatgataaaaagcacgccaaagcctacgattaaaagcaccatagcacttcctaaatcaggctcttgagcgatcagtaaaaaaggcaaaatgataaaaaaactaagttttagaaattgttttaatttatagccatttttaggcggtggatcttgatagatcaaataagcaagcattaaaataaaactaggtttaaaaatttcagaaggttgaatggtaaagtgcgtaaaaggaatttcaagccatcttttagcgcctagcttttcaacaccaaaaagatctgtgcttaaaagtaaaagaatatttacccaataagctataggtataagccacatcagtttgtggataggcaacaaaaagaacacgctaaatgcagcaattcctacacaggcatagacaaattgtttttcagctaaaaaagcattggcctcaaatatcaaaaaaaatgaaatcaaaataataggtataaataaaataggttgcatataatcaaaatgtgttaaaattcttctatcgggtataaacaaaatttgccttcaatttgtagtattaaaatataattataaaataaaactctaaattatataaaattataaggaaaaaatgcaaacttttttagttgatgaatcttcaaggctcgatacttttttagctaaaaatcttcagcaaagtcgcaatcaaatagccttgatgatagaaaaaaactgcgtttgggttaatgataaaattcaaaataaaaattcatttaagttaaaagtcggagataggcttgctttaaatttaccgcttgtagaggaagttaaacctaaatttgatatagattttgatatagaaattttatacgaagatgaggatttgttggttttaaacaaaccctcaaatttggtagttcatggtgcaaagagtgttaaaagtgcgactttggtggattggcttatagaaaaacaatacaccctttctactttgggtggagaagtgcgtgcagggcttgttcataggcttgataaagaaacaagcggagctatattgatagcgaaaaataattttacccaccaaaagcttagcgagcagcttagcgataaaactatgggaagaatttatcttgcgttaattgatttgccactaaaagaggataaaattatcatagataaagctttgattcgatcaagtgctaatgctattaaaaaaatagttacaaatagctttgttaagggttctaaggaggctaaaagtgcttttgctaacttggcaaaaagcgaggatgtgagccttattgcagctaagctttttacaggtagaacgcatcaaatcagagcacatttagctagtataaatcgtcatattttaggagatgaactatatggctataggggaaaatacgagtgtaggattatgctgcatgcgtattttttgtattttattcatcctagaaatggagaaaaaatatttattcaagctccattaatggacgattttaaacaaattttagaaaaaaaatttattttaggagagcttaatgaaaaaatttcacttgagtctttgcttgggtgctttgactcttttatttagtgcttgcagtgtttcgcaactttccaatataggttcaaagaaagaacttttagtcaatgaaagcttgccaaagattgacaatcttaaaagccttagcgatattagtaatatagcgtttgaatgggatcctttatatgatgataatatcaaaggattttatttatatcgttcaaatgatgcaaatcctgaatttaaacttgtaggaacgattaaggataaatttcaaacccattatgtagatgctaagcttgagccaaatacaaaatattactatatgatgagaagttttaataatcaaggacatatttcagaagatggaaaggtggttgaagtaaaaactatgccaagattagaggctattgcttttgcacaagctattaccaatctaccaagccgaattaaattgatttggcgtccgcattcagatccaagagtagcttcttatatcatagaaagagctaaggcagatggacaagaatttaaaaaaattgctgaggtaaaaaatcgtttaaatgctgaatttatagatgaggatttaaagccagaggagagttttaattatagaattatagcggttgggtttgatggagtgcaaagtgagccaagttctgttttaaattctacaagcaaggctttgccacctcaagttgaacatttaagtgcgagtttagatggagccaataaaatagttttaacatgggatgctcctaaatataaagatttttcgtattataaagtttattctacgagttcaagtttgcttccttatactcttttggctaaaaccgagcaaaattcttatgaggatatagttgaaggtgctgcaaagagtagatactataaggtaactatggtagatatagatgggcttgaaagttctatgcctaaaaatggggtagagggcaaaactttagggagcccatcttctcctagtgtgattttggctcaaagcaccagtgatggtattgaattagaatgggtggataatgactcaagagcagttgaatacgaagttagacgctatggcggtgggcaaaatgctatttttaaaggcataaaagagaaaagattaaaagatatcaaagctttaccgggtgtagagtatagttatgaagtgatagcgattgattctgttggccttcgttcagagccttcaaagagagttaaggcggggcaatagtgccaaattttaaagctagaacacttaaagaaatcattctaccctttgaaaaagatggggtagaatttgtttggatggcatataatgataatgtgaatttaatctacacaaaggtcgaggaagaaagcttttttttacaggttaaaaaaggagaaaatgaatttgtagttaaggtagataaacacactaagccttctaaaatagcctatttacataaggctttatatgtttttaagcaatatttttgcgaggatattatcagcgaggcttttggtataaaaaacaatgctttggctgaaaaaactcctttgattgctaatgattttgaggaagtattggcaagacttgaggggagaatttacattgaaatcggctttggttcaggaaggcatttactttaccaagctaaaaataatccccatgttttaattcttgggatagaaatttataatccagccatcacacaggtggctaagcttgcgaaagcacagggtattgataatattttattggttcaaagtgatgctaggcttttattaagcgttcttcagtctcattctgtagaaaaaattttcttacactttccagttccttggggtaaaaagcctcatcgtcgtgttgtttctaaagcattttgtaaagaatgcgcaagggtgcttacagcccaaggggtgtttgaacttagaacggatagttatgagtatttcgactttacttttaaggaatttttagatttttcatcgccacaatttagcattagaaaaaatgaaaatttagaaatttctagcaaatacgaagacagatggaaaagacaggaaaaagatatttatgatctttgggtttggaatttagataaagaagaaaataatcctttatcagaagaatttgatttttcggatatacatttagataaaaatgatttaatgcttttagagaaaaattttgaaaattttactttaaagaaagaggatttcttcttgcattttgaaaatatttacaagcaagggaaaagtttattgttaaagatagcctttggtgcgtttaataagcctgagcattgttatttgcatataggagagacgattagctttgtttttaaggagccttttaaaatacaagaaaatttaaaagctataaaagagcttaaaaaaagtgttaaatttcactttaatatgaaacattttcttgaaaattaagcaaaaataaagcataatttacgaattttgaaattcaaagaggatgggatgtcaaatttaattcaagcacataaactttctttaggttatgatgaattggttattaaagaagctagtttcacttttaaagatgatgattttgtttttatcacaggtaaaagcggaagtggaaaaagcactctgttaaaatctttttatggggatttggagcttctttcgggtcaacttgaagtgtgcggatcttctatgcgaaaaattggaaatttagagcttttaaaattgcgtcagcaaattggtattatatttcaagattatagacttatacaagaatacagcgtagaaaaaaatgttatgcttcctcttatgattaaaggttatagtaaaaaagtttgtcatgatcaagcaagcaagcttttaaagcatgtaaatttgacatttaaagcagataaattgcccaatcaactaagcggaggagaacagcaaagagtagctatggctagagctttagcacacaatcctaagcttttgctttgcgatgagcctacgggaaatttagacgagtattcttcagatattatttggacgcttttaaaatcagccagagagcttttgggtacttgtgttgtggtggttacacatagaattccgagtaatttaagactgaattatcgtcgttttaatatagaaaatggaaatatgaatgaaattttttaaaacccacttatctttgattttacccttattatttatgatgtttgcttttgagtttattttgcttacaaatgctaccttaagatattacgaagaacttgtcaataaagattataatatcattgtcgcaagctctactgaacttgacaagaatgttataaaaactaaactttcttccttttctgacttagaacttttagatcctaaaaatttgatagatcgcttaaaaaatgatatttccgataaaaatttaaaaattttacgagattctttgccgagattttatagcattaaacttaattatttacctacgcaaaatgagcttaatatgattaaaaatcaacttttaagcattccaagcattagcaaggttgagacttttgctaaaacacatgataaggtttattccttacttgttttgatgaaatttgtattttggttatttttatttatcattattttgctttcatttgttttatttttaaaacaaatgaaaatttggctttttgagcatactgagcgtgtagagattatgtgcttgtttggcgcacctttttggtttagatcttttatgttgtataagattgtggttttggattgttttattgcttttgttattttatttatattttttacacaaatttataatctttctatagttcaagatagtctaaaagcggttgatattatcttgcctcctattaattttatcgtgcatttgggcgtgatttttttagtgactttatttatatgtttattgtgtgtaaattcggtgatgtttagggtgaaaaaatgagaaaaattttaatttttctttgtttttttttactaagcaatgaaatttatgctaatgcaatcaatgaaaaaactaaaaatttagaagagaacaaacgcattcaagagcaggtaaataaaaagcttgaagatttggcaaatgatatattaagcggagaaaagagcctaaaagaattaagcactcaaattgaaactcttaattctcaaacccttaagcttgaagctcgagctaaagcacaaaataaagacttaaatttactcacgagtcaaaatacggatcttttgaaaaataaagccaatatggagggcaagcttataactttaatggctaaagattttgcttatgatttacctattccgcaaggttatgttgaaagtaaggaaagttttatggcttttgaggttttaggtagcttggataaaattttacaagatgaaatttttaaactctctaaagattatgaagatataagcaagcaaatcgacagcaagcaagatcaaatcaaaaagatcaatgaggatttaaaagattataatacccaattggcaaaacttcaaaatttaagacaaaagcaagtcagcgagattaacaaacaaaaaaccgatcgggcaatttacgctaaaaaacttgaaaatttgcaagatcagcaagatgagctaagaaaaaccttaaatcagttaaaaattatagaaagcaagcaagaagacaaaaagcaaactcaaaaaactgctagtgatagtaaaatcactaataatacccaaaaaattcgtcaaattggctctagttatcaaggaagctctactaagcgttatacaggtaaaaaaaccatagctcctttagagtcttttactgtaaagcaaaaatttggaaattatattgatcctgtttataatattaaaattttcaatgaaaatgttgttttaagaagtaaaaaagctgatgctgtggtaaaaagtgttttagatggaaagatagtttttgctaaagatacgagtatgctagcaagagttgtgatagtcgaacatgataatggaattcatactatttatgcacatttagacaagatagcgcccaatattaaagtcggtaaaaatgtaaaaaaaggtgcggtagtaggtaggataaaaaatgatttaacttttgaagtgacacaaaagaattttcatatcaatcctttagaacttattagtttaaattagctaattttaatgcaattttcaatataatttcaagctgattaagga

SEQ ID NO: 3820 - DNA, 21674 bp, synthetic construct
  source 1..21674: mol_type = other DNA
  misc_feature 1..21674: note = Synthetic
gaggtcgttttagtatactttcagccgtgggtatagttccgctttgtttttgtggttataatgccaaagctcttttagaaggagctaaagcttgctttgaagatttttttattcataaaaaagatgaaattttacaaaaagcttatcattattgcactcataaaaatgccaatatcaatgtacttttttcatatagtgatgcttttaaaggctttaatgaatggtatatccagcttattgctgaaagtttaggtaaaaagcaaggctataaacgcataggtttaactcctattgcactcattggcgcaagagatcagcatagttttttacaactcattatggatggacctaaaaataaaactgtaacttttttaaaaatcaaagacgctcaaaaagcacctattatccctgatattcattttaaatttttagattctttaagtaataaagtcaatcttcacgaacttttaaacgctcaatgtgatgcaactatgcacgctttaatcgccgaaaatttgagtgttgatgtgatagaacttgaaaaacttgatgcttggcatgcgggatatttgatgtattattatgaactttttacttcaacttgcggtgttatgttggggattaacacttatgatcagcctggtgtggaagttggaaaattaatcttaaaaaatatattaaattcttaatcaaaattcattaaaaaagagtataatgattttaagttaaaattataataaaaattattaattaataataattattatttaagaattttatgttataattttaaaaatcaaaaaaggagtcaattatgtcagttacaaaacaattattacaaatgcaagcagatgctcatcatctatgggttaaatttcataattatcactggaatgtaaaaggtttgcaatttttttctatacacgaatacacagaaaaagcttatgaagaaatggcagaactttttgatagttgtgctgaaagagttttacaacttggcgaaaaagccatcacttgccaaaaagttttaatggaaaatgcaaaaagtccaaaagttgcaaaagattgctttactccacttgaagtcatagaattgatcaaacaagattatgaatatcttttagcagaatttaaaaaactcaatgaagcagcagaaaaagaaagtgataccacaacagctgcttttgcgcaagaaaatatcgcaaaatatgaaaaaagtctttggatgataggcgctactttacaaggtgcttgcaaaatgtaatttaaggggctttatgccccaattatacaaactaggttataatatccttttttaaaggataaaattgaaagtacttaattttttttatgaaaatcaccctaaatttgaagtaagttatgaaagaaaaattcaaatttcaaaaccaaatattatcataaaaggcccacgattttgtggtaaaaaaacacttatttttaattttttatctcaatttaaagcaagtgaaattttgtttttagatttatatgatacacgctttgaaaaacaaagtttagaaagacttgctgattttctgaatgaaaatttacaaattaaaattctttgcctttataatttggattttatccctaatttagaaaaaattaaaattcctatcatcttaagtacaaatataaaagatttaaatataaatgggtttgaagagcttgaactcgattattttgattttgaagaatttattagtgtaagtaagaaaaatttacctataaataatttagtaggtctttttttgcaaagtggacgcagtaaatttggagaaaaaaacatacttctaagacaaagctttactcttttagaattagaaattttaaagtatttagctttaaatttgggtcagcaaatcagtatttctaagatatttatagaacttaaaaaaagattaaaaacttcaaaagatagtgtttatcaggctataaaaaaattagaaaatacttatgtgatttatactttaaaacatgatgaaaaaaaacttcaaaagatttattttaaagattttggcctaagaaataatctttgtatttcgaaggatttttcgcatttatttgaaaatttagttttaagcgagttgtttaaatttaaagaagagtttttttataacaaatactttaacttttatagccaaatatctaaaattgcttatatttcaagtccaactttagatattgatttgattaaattacgtgctaagaaaattttaccaaaggctttagaacttggaatttttcatgtgatttttatcactctttcaagtgaggatagtttttttgaacaaggggttaaatttgaagtcatatcttttgataaattttcacttggattttaggcattgtttgattttgtatcgtatttttcaagattatattttttgatgatttttgtaataagattgatataatatcccttgcgttcggaataagaatctaaagttttaatagcctctagccctgttatctctttgccttcgctttcaaatttagctcttgcatcgcgaaacttttcataagcaaaatgacgatttaaatttaaaacataagagtcaacactatcttgcagactatcaaaaatcttaattttgtgttttttatctggatgtcttaaatcaggaattaaacctttctcaccccaagtccattctccaaaaagattgtttgcttctcttgcgaagcgactggtacctgtagcactttcaactaaagcttgggctatacccatggattttggaattttttgaatacgttttttatattctgcaaaatcataaagattttcaatgcgatatttgttttttatcgtgataagtttttcaagatttatttggtttgaagtcctaaagcctgttttgtaagcatctttaaaaaaggcttcgataaaagctctttcttgttcaatttttttaaagctttgatcaaacatttcattcatttttataaaaaaaatttgtcttttttgatctatatcaagtttgtaatattcttctccaaatccactctttagatcatcagcaaaaagtgggattagaaaaagactaaaaaaaattataattggcttcaaaacaatactttacctttccttcaaaaaacaattcttcatttttatatgcaaaccctacctcttcaccacttttaggagttattttaactttattttgtacttttttatttaaaaatgccagataaaaacaagcccccattcctgtgccacaagctaaggtttcatcttcaactccgcgttcataggtgcgaacttttaaatgattttcatctaaaatttttacaaaattaacattggcattatatttttgtctcattttttgacaaagcattgtatcaaattcatctaaattttgacaaaaatgtactagatgtggaactccagtgttgcaaagttgccaagtttttcctaactcttcaaaagtattttgcacgctttttattttgcctaaagatacttcaactttatcttgatttacctttgcttttattattcctgcaccggttaaaaaactcatgttaggatttattttgttaatatgatgtgcaaaatgtgccgcagcccttgagccattgccacacatagcagcccttgagccatcgttattataaaattcccattcaaagtcgtatttttcatgaggcaatattacgataaagccatccgcacctataccctcataacgattacaaagttctttagctaaagcacttctatcttcttttctatcagcatttgttatgacaaaatcattcccacttgcacaatatttataaaatttcacatttttcctttagaaatttcttgtattactttaacacattcttgcctaaaatcgacataagaattagtatttttaatgataaaatctgcttttttaagtttttcttcaatatctatttgagaatcaagtctcacttttgcagcttctaagctgagcttatctctttgcatgattcttttaaggcttaattctttaggtgtgtaaattacaatgactttgcctaaattttcataagcaccgctttcaaaaaaaagaggaatttctacaaaaaaagctttattttctttatctagaatttgcatttgttctaaaattttagctcgaattttaggatgagtgaaattttctaaggtttttttagcttctttgttgttaaaaacaatttctccaaggatttttctatcgattttcttttcttttgtgagtaaattttttaagttaaagggagaaaaaatcttttcaagttctaaagcattttcatctaaaattttatgagcaattttatctgcgctaatgcttttaaagcctaaagaattcgctatttctataaaagtgcttttaccacaagcaattgaagcggttacaaaaaaagcatttttcatcttatgccttattaaaacttttttcgttaaaatacctttttagttcttaaaggaaaataaatgaaaatttcatatgaagatgcaggcgtaagtatagataatggaaatgcctttgtagaggctataaaacctttggttaaagaaacttttaatgataatgttgtaggcggaattggttcttttgctggtgcttttagaatgccaagtggttttaaaaagcctgtgattttaggtgcaacagatggtgttggtaccaagcttcgcttggcaattgatgctaaaaaatatgatactatagggcaagatttagtagcaatgtgtgtgaatgatttgatttgtaattttgctacgcctttgtttttcctagattattatgctacagccaagctcgaagtagaagtagcaaaggctgttgtatcaggcattgccaagggatgtaagatggcaaattgtgcattaatcggcggagaaactgctgaaatgcctggaatgtatgcaaaagatgattttgatcttgcgggttttgcagtgggtatggctgaagaagatgagatcgatagaagtaaatttgttaaaaatggtgatattttattggcacttcctagttcaggacttcattcaaatggttattctttagctagaaaagtactttttgaaagtttaaaattaaaatttgatgacaagataggggataaaaatttaattgatattttattagagcctacaaggatttatgtgcgtgattttcttacattaaagccttatattagtgctctagctcatattacagggggtggtttagtagaaaatttaccacgcgttttgcctcgtggtatgggtgcaactatacgcaaacatcatcttaaaactcctgaaattttttatactataggacaggctgtagaagaaagcgaaatgtatagaagctttaacatgggagtgggtttagtaatggttgtagatccttctaatgtaagtaaggttttagaaaattcagatgcctttattatcggcgaaatttgcattaatgaaggtattgttttagagtgaaaacaaattattatgattatttatgtgctaaaatgtatgtaattttgcccataaaagcccataaagacaaactaaaattttatctttcttatgtaaataagaaagataaaatttttagagttaatgtgtggaagtgggcggttttgataaaaattgccaaagatgataaaacgaaatatttttgttcgaatgtattaaataaagggtaaaatgcacaatttaaatgaagctttgtttcaaaaaaagataaaagaaattcgcttaaaagcaatagcgagtattatttgtgggtttttaggtatcattccttatcttggagttttatttgttcttgcgagttggattttattttttattgtgctttatgatttaaaaatctatggtggtgctaaaaatttgtttaagaatttccttattagtgtagggattggatttttttggtcttcttgttaatacaagtattttatttgcaatgctaaagcctagaactggcatttttggtgggctttattttaatcaagataatatttttatggctattgctatatttttagtattgcattttgctattttggctttaatttttccttttttgaaagctttttactatgaaattgctagaacaacaaagcaaaagtatttcacttatgcttttaataccttttatttagggcttcttactttgattatcggcataggcttggtgtttttgctagcaagtttggttttttggattttagcgtgggtcaaatttaaagaatttgatgagcaagaactttcaaatttagaagaaagattggcaaaagcacaaaaaaaggtttttgattttgatttaaaatggattaaaatcacaatggcttcatttataattttaaacttgctcgttttaacattttcgtttatattagaaattattagctttgaagattttaggttttactacacaaaaaaaactttattttacacagccataattctagctttgcttagtgtgtttttgttttgtaaaaagataaaaaattacaaactttttatttattttttcatatggcaaggtttaagtgtttttggtagtcatcttctttttattcctgattttatggtagatcaaccaccagaaattgtatatggaagtttaaacataatattaagtctatgctatattatttttgcttttttattttttaaaattttgattcaaattacaaaggaaaaacttttttatcttatttttgcattttatgtttgcataaaaattttgataatattaattttctttatttttatgatggttgataactattatatatttacaaaaagtcctataaagatgctcatagataattataaattactttttcaagttgtttatttcgtttcatttttaattgtttggcttatgcttaaaggacaaaaaaaatgtaaaaatatgttagaatgatgaaaaaatactattttacgtagatgtttattaggatatattcgtatgtcttaaagctctttatggggtgttaagtaattataatatttaaaaattaaaaaatatatagtttatccacattttatagtttaacttctaaaaatttgatcatctcttttttcattttttagagctagaaaacatatgagtgaaattgctttaaagttagttagagcagttgatactaaatattttgataagaaattaaatagattgattttacttaaattaaagactttttgcctcgtgatacaaaattaagtgatgaatttttagttaaattgatattaaatatgaaaaaattataaatattaatactttttcaaataatagtgaatatagagggtttgattttttcacaaaagatttggatagaacttgcaaaaactttcttcaatatttatacttttaaattttgatgcaaatcctattcaatatagcattggcaaaataaactaaaaagcttaaaatagctatactcaaaagaattccaaaccatgcaaaatttcctgttccaagatttgaaaccgcgttagcaaggatattaactccaccaagtgctttaatgccttcagcaaatactccagcggcgatgattatgcttacgactgagataaaaatttcagccatagcttttaaaatcaccatcatatcttcacctaattttctagcatttctgtgtcttgcaaattcaacaagaaaaactaaagaaatgcttacaaaatttgccgtcacaacatcgagcttgatagtaaaaaaatacgctgtaaataaaaatacaacaggtaaccaaggaaagagtatgtaaaaagtagggcatttaggatcaatgatttgcggaatttcaacttcatcatttaaaacacctttttctttatctcttttatcaatccaagcaaaataaaaaggaatcaagatggcaataactacaacataagcaatcacactataaatttgataatttaaaaaaagccctacgacattatcactttgtcctaccatatctgccatattgattgaatttccatcttttggaccataatcaagtgcaattaaagaaagcacacatacagctgtaataggacggattttaagtgagattaaaacaggataaatacatgctaacaaaagtaaaagcaatccagcatagctagaaatgacgatttttaaagccattccaacaacaaaagttccacttaaaatcaagtatttatttttgatttttcctaagggtttatttgctaaaaaagcaagttttgccgaagcattgatatgtttcatgtaagcagcaaaacctgccacactcatgataataagtcctactccagaaagctgacttttaaaagtcgctgtgataaaagcatagctatcaagtaaaacattcaaaaagcttgtatgttctctacttggagcttttggtataggtgttcccgtgatgtaaaaagcaaaaataagcaagataatacctgaaagaaaaatacaaaaatgagattatattttagtatataataagcaacaacaattaccgctaaaagtgtagaacatatcataaaaattggcatgatttctcctaaggttattattagcttttattttattttagctaaaatttaactaataaatatttttcatttaaaattttacttattttttgcattataaaattaataatatgtatagtttggttactgaaaggtttatgtttgtataaaaaatgatttttatattataattataaacaaatcataaatattaaaaaggatctagtgtggcaagaattttggcatttgatataggaataagctctattggctgggcatttagtgaaaatgatgagttaaaagattgtggagttaggatttttacaaaggctgaaaatcccaaaacaggagaatccttagccttgccaagacgccttgcaagaagtgctagaaaacgccttgctagacgcaaagcaaggctaaatcacttaaaacatttaatcgcaaatgaatttaagttaaattacgaagattatcaaagctttgatgaaagtttagccaaggcttataaaggatctttaattagcccttatgagttaagatttagagctttaaacgagcttttaagtaagcaagattttgcaagagtgattttacatattgcaaaaaggcgtggctatgatgatattaaaaatagcgataatgaagaaaaaagtgagattttaaaagctatcaagcaaaatgaagaaaaactagcaaattatcaaagtgtgggcgagtatctttataaagagtattttcaaaaattcaaagaaaattccaaagaatttataaatgttagaaataaaaaagaaagttatgaacgctgcatagcgcaaagttttttaaaagatgaattaaagcttatttttaaaaaacaaagagaatttggcttttctttttcaaaaaaatttgaagaagaggtgcttagtgtagcattttataaaagggctttaaaagatttttctcatttggtgggaaattgtagtttttttaccgatgaaaaaagagcgccaaaaaattcgcccttagcctttatgtttgtagcgcttacaagaattatcaatcttttaaacaatcttaaaaatactgaaggaattttatatacaaaagatgatttaaacacgcttttgaatgaagttctaaaaaacggcactctaacttataaacaaacaaaaaagcttttgggtttaagtgatgattatgaatttaaaggagaaaaaggaacttattttattgagtttaaaaaatataaagaatttataaaagccctaggtgatcatagtttaagccaagatgatttaaatgaaatagcaaaagatattacccttataaaagatgagattaagcttaaaaaagctttaacaaaatacgatttaaatcaaaatcaaattgatagtttaagcaaattggaatttaaagaccatttaaatataagttttaaagccttaaaacttatcactcctttaatgcttgaaggtaaaaaatacgatgaagcttgtaatgagcttaatttaaaagtagcaatcaatgaagataaaaaagattttttacccgcatttaatgaaacttattataaagaatgaggtaactaatcctgtggttttaagggcgattaaagaatacagaaaggtcttaaatgctttacttaaaaaatacggcaaagtgcataaaataaacattgaattagcaagagaagtaggtaaaaattatagccaaagagctaaaatagaaaaagagcaaaatgaaaactacaaggccaaaaaagacgccgaacttgaatgtgaaaaactaggcttaaaaataaatagtaaaaatattttaaaattaagattatttaaagaacaaaaagaattttgtgtttatagtggggaaaagattaaaattagtgatttgcaagatgaaaaaatgcttgaaattgaccatatttacccttattctagaagttttgatgattcttatatgaataaggttttagtttttaccaagcaaaatcaagaaaagcttaataaaaccccatttgaagcctttggcaatgatagtacaaaatggcagaaaattgaagttttggcaaaaaatttacctgaaaaaaagcaaaaaagaattgtagataaaaactataaagacaaagagcaaaaagactttaaagatagaaatctaaacgatactcgctacatcgcaaggcttgttttaaactatactaaagattatttagattttttacctttaagcgatgatgaaaatacaaagttaaacgacacacaaaaaggctcaaaagtacatgtagaagcaaaaagcggtatgctaacatcggctttaagacacacttggggctttagcactaaggatagaaataaccatcttcatcacgccatcgatgcagtaattattgcttatgcaaacaactctatcgtaaaggctttttcagattttaaaaaagagcaagaaagcaatagtgcagaactttatgcaaaaaaaattagtgaattagattataaaaacaaaaggaagttttttgagccttttagtggttttaggcaaaaggttttagataaaattgatgaaatttttgtctcaaaacctgagagaaaaaagccaagtggagctttacatgaagaaacatttagaaaagaagaagaattctatcaatcatacggcggaaaagaaggagttttaaaagccctagagcttggtaaaatccgcaaagtaaatggtaaaatagttaaaaatggcgatatgtttagagtggatatttttaaacacaaaaagacaaataaattttatgctgtgccaatttatactatggattttgctttaaaagtattaccaaataaagctgtagcacgaagtaaaaaaggtgagataaaagactggattttaatggatgaaaattatgagttttgcttttctttatacaaagatagtttgattttaattcaaactaaagatatgcaagagccagaatttgtttattataatgcttttacaagctctactgttagtttgattgtttcaaaacacgataataaatttgaaacgctaagcaaaaatcaaaaaatattgtttaaaaatgcaaatgaaaaagaagtaatcgcaaaaagcataggaattcaaaatctaaaagtatttgaaaaatacatagtttcagcacttggggaagttacaaaggctgagtttagacaaagagaagattttaaaaaatgagttacgatgaagcttttaaaacactgcttattagctctaatgccaagctaaatttagagctaaatcatcttgtgattaagcaagatgaaaatatagccaaattgtttttaaaagatataaatatcatcgttttagaaagtttacaaataagcattagttccgcactttttaatgcctttgcaaagtataaaattatcttattaacctgcgatgaaactcatagtataaatggcgtttttactccttttttagggcattttcaaagtgcaaaaatcgcaaaagagcaaatgaatgtaagtgctcaaaaaaaggctattttatggcaaaaaatcattaaaaataaaatcctaaatcaagcctttatcttaaaaaaacacaataaaatagagcaaagcaatgagcttataaatttggctaaaaaagtaagcttaaatgatagtaaaaatattgaagctgttgcggcggcgctttattttaaaactttgtttggtacttctttttcaagagatgagctttgctttgaaaattctgctttaaattatggctatgcaatcattagggcttgtattattagagcagtttgcataagtgggcttttgccttggcttggcataaagcacgataatatttataattcttttgcgctttgtgatgatttgatagaagtgtttagggctagtgttgatgattgtgttttaaagcttaagggtgaaagtgagtttttaagcaaagatgacaaaagagcgttgattggcaatttacaaagtaaaatcaattttgatgggcaaaattatcctttaaacagagcgataaatcattatgtggcaaattttaaaaatgctttattgtatgaagatgaactaaagatagtaaaatttgatgattgaagataaatttatgcgcgtgcttttgatgtttgatgtacctactaaaagtaaaaaagagcaaaaactagcaagtaaatttagaaacaatcttataaaattaggttattttatgctgcaatttagcgtttatatgcgtatttgcaagggtttaagttctgcaaaaagttctattgaaaatgtaaaaaagattttgccaccttatggaaatgtaagggctttaatcatcactgaaaagcaatttgataaaatggagcttttgcttggtggcatagtttttaacgaaaaagttaataacgaaaccaatttaacgctttttgatatagatagtcatggagaatttaaatataaaaattcaaataatgaagaaattcaaataaacaaaaaacaagaaaaatatcatcagcaaaatttatttgaattttaaaagcggttttaggggattgtaaccccgcagagtcccgcaaactctttattttagtccctttttaaatttcttatgagattatagcataatttttgctatttttcatgaaaaaaccccgaaattttcattatctggtaaatatctattttaccataaagaaatttaaaaagggactaaaataaaccctagtggattgaaactccgctagggctaattacttcactaaaaggaggttgcaaatttgaaacttattgaaatttagggttgattaaaatcgaaataaaattatttaaataattttaaggcataaagataatatccactaaactttcattttctaacatttcacattcttttggtaccaccataagggcagctttattgttaagattatttataatcgcactagagccttctttcttgccttcaagattggctaaaatgcatccatttttaaattccacattacaagcgacaaattccaaataaggtgtttttttcttgtagcttccttgtaaaaaggctttgcaaatatagtctttaggctgaagtaaccaagagtttaaaatctctcttgcgtaaagattaaacattaccatagccgagtaaggaaaacctggtaaggcgatgatgaatttttcattagccttggctattttgatatgtctacctggttttatgtcggctttatcgatgatgatttcgtattcttttacagctttttttaaaaagtcaaaatctcccatagaaactccgcctgttgtaatcaaaatatcacaactttgcaaagcactttcaagggtagaaaaagtggctttttcatcatcttttaaaagtggaaaaacccttgtatcgcaatttaaatttttagctaaattagctatggcgatatgatttgaagagcggatttgagcaggattttccaaggcttctcctagatctttgatctcacttccgctacttaaaacccctacaataggctttataaacacaccaatgtgaaaaaatccaagttcagccaaaagagctatctcgctataatttaactttgtgccttttttgagtaaaatttcatcttttttatagttttctcctaccgcacgcacggcaaaagcttggggaacttttttttctataaaaagagtatcattttctacgcgtacattttcaacagggactaaagtatcgcttccttcgctcatgagtgaacctgtaaaggtttttacacaagtgccattttgcacgctaaattgtggcatagtacccgcaggtgtgagacctaaaatttttaaaggcttatcttgatcttcaaatttgatcgcataaccatccatagccgaagttggaaattcaggctgatttttaggtgcttttatgtcttgagctaaaatgcgtcctaaacactctgtaagggctattttttcaatcttttcataggttttgatatgagagtgtaaaatttttaaactttcttcataagacattaacatttttattccttcatactgatataaatttgagtcttgtttgttgtataaaattcaaaatctgtgtcaaattttctttggagacttgaatttttaaaaaattcattgatattttgccaaagttttggggcaatgatttcaggttttccaaaaccttcaaaaagcatgtatttgccaccttttatacagattttttcgccctttttgtgaggatttttcacgcccacacaaattttatactctagcttgtgagtgtttttataatcataatacacgctataaatttcatcaggtgtaccaaagatgctatgaaattttttccacaaaggaaaaatcaaagaactatttaaatcgctctcaagttcctcatcggtttgaatgcttactccataaatgctaaattcttctatctcttttatcatttcaaaagtcctgcaccgcaaagtttggttgatctttctttggcataaattctttctttgtttatcacatcatacttccaaatgggcgcacttgctttaaaatcttcaacaaattcattaagaagtttaagtcctaattttctttgtttgcttaaaattcctgcaaaatacgagctttcatgtatcgcaacatcgcctatagagtgagcaaaaagcaagctaataccatcaaaatctactcttttttgccactcatcaaaccatttttttaaaagcggttcataaatatcaaaactaagtgcctcaatacctccttcttcacgcacaataccacaaaaagtcagcaaagcaccgcagtttttatccttggcaaattcataccattggctataaattttaggaatatctaaagagccttgataaagtgtaaaatgtttcatttagcctccacaaactggcggtaaaagtgctattttatcaccatcttttaacttggtgttttcatcaaaaatgatttcatcatttaaagatacagcacaaagttctagccattcttttaaactctcatctttttgcaaaatttcttttaattcttttaaattttttacttcaagttctaaattttctttatttatagggcctaaaaattccacttttaccattttattcctttacttctaaatttcccatcattcctaaatcttcatgttctaaaatatggcaatgatacattctaagtcctttaaaatcttgtttcattctaagtcttaactcttcattaggacgcacatttatagtatctcttaaggctctaaattcggctttttgaactttgccattgagttttgatgagatgagttcaaattgcgtgccgtgtatgtggaaaggatgatccatgtgagatttatttatcactatccagtcttcaactactccaagcttggagcttaaatcaatgcgttttaaatcatagcttttgccattgattaaaaacatagacgcaagagcgatttttaattcgctttcactttttcccatcataccatgcatttgcatatgatcttcactcatgattatttctttaaattccttaggctcttctaaaggtttgaaaatttttaaattttttggaagttctaatttttctttttttaggctaatactagctaaaaatagggtattagattcttcttttaccatcattttatccctatcataataagcactttctagcttaaattctccatcttttggagcatcgattaaaacttctacgcgagaagcaggacttaagaaaagttcctctttgtaaatagctttttctataagtccaccatcagtaccaacaagtataaacttagctccttgtatgcgtaaatttaaatatcttgccgcagtagcattataaatgcgtatgcgttcgtttgtggcgagtttgattttaggtttaaattgtccattgatgagtacaaattctccttctctaccattaagccaatcatttagattgttgtttggaatttgagcgttttcatcaagacgcaaatcgctaatcatcaaatctctttcttttaaatgacttaaagcatctttttttgctttgatcacaaaagcccccgctaaacccataaaaacttgtttagaagtggtataatgaggatgtggatgataccagtaagttcctgcgctatcttgaggaatttcaaaacgatatattctttcttctcctgctaagataggatcatgtgggcttccatcttgatcaggtggtacaggaacgccatgccaatgtatggttgtagcttctttgagtttatttttgactaaaatttcaagtttatctccttcaaaaacttctatttttggagcaggcactagaccgttgtaagtataaaataaggtttttttacctttgataagctctatataattttctttgatttctagggtagcacgaaaaatatttttttctttactttcatttttgagcaaaggcaaggcttttaaaatttctccttgggggaattgttttggatctaaaagctttaaattttttggagcaaagttgataaaagaagtatctaagtcatgatttatagaatgatttttatgcatggagtgcatatcatgcataggatttgcataggctacacccatacttgctagagtgagtgcattaaattttaaaaaatttcttctattcattagtttttccttttgcttgattttttgtattatagtcattatttttttagttttagtaaatatttattttgaaaatttggtttaattttgttatgattttagcaatttaatcaaggaaaaataatgttttatgaaaatattcaaaccccagcttatattttagaagaagataaattaagaaaaaattgcgagcttttagcaagtgttggcgaaaaaagtggtgctaaagtgcttttagctttaaaaggttttgctttttcaggagcgatgaaaattgtcggagaatatctaaaaggttgtacttgtagcggactttgggaagcaaaatttgctaaagaatacatggataaagaaattcatacttattctcctgcttttaaagaagatgaaatcgatgaaatagccagtttatctcatcatatagtgtttaactctttagctcaatttcataaatttcaaagcaaaacacaaaaaaattccttaggccttcgttgtaatattgaattttctctagctccaaaagaactttacaatccttgtggaagatactcaagacttggaattcgtgctaaagattttgaaaatgtggatttaagtaccatagaaggacttcattttcacgcactttgcgaagaaagtgctgatgctttagaagctgttttaaaggtttttgaagagaaatttggcaaatggatagggcaaatgaaatgggtgaattttggaggaggacatcacatcactaaaaaaggctatgatgttgaaaaacttattgctttgtgtaaaaatttcagtgataaatatagcgtgcaagtttatcttgaaccaggtgaagcggtaggttggcaaacaggaaatttagtggctagtgtagtagatatcatagaaaatgaaaagcaaattgctattttagacacttcaagcgaagcgcatatgccagatactatcatcatgccttatacaagtgaagttttaaatgctagaattttagccacaagagaaaatgaaaaaatttcagacttaaaagaaaacgaatttgcttatttgcttactggaaatacttgtttagcaggtgatgtaatgggagaatatgcctttgataaaaagcttaaaatcggcgataaaattgtttttttagatcaaattcattacaccattgtgaaaaacacaacttttaatggtataagacttccaaatcttatgcttttagatcacaaaaatgaacttcaaatgataagagaattttcttataaggattattctttaagaaattaatattatttataatttgcataaaatgttaattttatttggaagagaatcaaagatgtaaattttatgcaaagtattttattttttcaaatataaaatcaactcaaatatctaattttcaatactttggtatgattttttaatattttaaatccttgtggaattttattgaaattcagtgatttttaaatcaaatagtattaagataaatcgatttaaaaatcggctttaaaatgaatattaggtatattttgcataatattcattcaagcaaaatttaaagctatttttgaaaattttgaatgcatgggagctttaatggatttggaaaaattaagattagctagaagtctttattatcaatgtctaggagagctttttgttttttcattttctgaagaaagattgtcaaaattacaagagtatttaaagacaatgcaagaatgtttatttgatgaaaatttaaaatcaaattttgatatcttgtttaagcatttagatgatgaaaattctatacaagcattttttaaagaatatgatttgctttttttaagtcttaaaaatagcattccaacgactttttcttacatagaagaaggttttgaaaattcaaatcctttactttgcgtgcgtcaaattttagtcaaaagtaaaataagacgcaatgaaaaattttttaaagaaagtgaagatagtgttggattttgtttattgttgatgagtgaatttttaaggcaaaatgaagatgatttagccaaagagctttttgaaaaagtgatcaataaaagcattgatgagtttttaggtgatgttttcatgaataaaaatgcgaatttatacaaggaaatttcaagtattgcattggcttttatggaatttgaaagactttgctttgaagtagaaaaacctgtaaaaataaattctaaaaaagtgcaaaacgatctatcgcgttcagaatttttaagaagagaagcaaataaacaaaggaggactcgtgaaaaatcgcagggaatttcttaaaaaatccgcttttgccttaggggctgctggagtgcttggtagcacgactttagctctagctaaagatgaagaaagaaaagatttagttaaaggtaaaagtaagaaaaaagaagtgctttttcaaagaagtgctaattgggaaaattattatataaaggctgagtaatgtcaagtgtaggtgaaaatatcaagcttacgcgtcgttcttttcttaaaatggcagcactttcaagcctagcaacaccgttgcttgctagaagtgaaactttaagagaagcgagtgctgatgagcttaaagaagcttatgaaggtagtaaaaaagtaaaaacagtttgtacagcctgttctgtaggctgtgggattattgcagaagtgcaaaatggtgtttgggtgcgtcaagaaattgctcaagatcatcctgtgagttcaggtggacattgctgcaagggatctgatatgatcgatatggtgcgttcacatgtgcgtttaaaatatcctatgaaaaaagaaaatggagaatggaaacgcataagttatgagcaagctttaagtgagattggagaaaaactagctgcttatcgtaaagaaaatcctgaaagtgttatgtttttaggttctgcaaaaatgagcaatgaacaagcttattatgtgcgtaaatttgcagcgttttttggaacaaacaatgtagatcatcaagctagaatttgacacagcgcaacagtcgccggtgtggcgaatacatttggttatggcgctatgacaaaccatcttggagacattcaaagaagtaaatgtatcattatcattggggcaaatccagcggtaaatcaccctgtgggttttagacatttcttaaaagcaaaagaaaaaggcgcaaagctgatcgttgtagatcctagatttacaaaaagtgcagctaaggcagatatttatgcaagaattcgtccgggaactgacattgctttcatgtatggaatgctaaaaattatctttgatgaaggtttagaagatacaaaatatctcgatgaaagagtttttggaatcgataagattcgtgaagaagcagcaaaatggacagctgaagaagtagaaaatgttacgggaatttctaaagaacttttggtgcaaatcactcatgaagtagctaaaaacaaaccaactacgcttatttgggctatgggtttaactcaacatactgtaggaacttcaaatacacgtttagcacctattgtacaaatggtacttggaaatataggtaaatttggcggcggagttaatatcttacgcggacacgataatgttcaaggtgcttcggatatggcttgtttaagcgaaaatttacctggttattatcctttaaatgaagcgacttggagatactatgccaaaatttggggtgtggattatgagtggcttttaggaaattttgtaagtaaagattggatgcataaaacaggactttcgcttgctagatggtgggcagcagctttaaatggaaaagatggcaatgatgctatcgataatgcaggaacgcctttaaaagctttagtagttatgggaaatggtatcacttcaaccgcacaacaagttaaggttaaagaaggtttggaagctttagagcttttagttttggctgatccttttgtgaatgaagcagggattatcgcagaaagaaaagatggaatttatcttttacctgcagcaacacagtttgaaacaagcggaagtgtaacagctacaaatcgtagcggacaatggagatttaaagttgtagatccactttatgaaagtatggaagatcaagaaattttatttgagcttgctaaaaaattaggtttttatgaagacttcaccaagactttacgcgatgaaaaaggtgagatcgtttggcctgaaaatgcaacaagagaaattgcaaaagcagttagaagtatagggcttaatggttggagtcctgaaaggcttaaaaagcatactttatactgggataaatttgatgaggtaactttagaaggaaaagacgaagttgctggcgagtattacgggcttccttggccttgttggagtgataagcacccaggttctcctgtactttataataccgacattgaagtagcaaaaggtggtatgggctttagaaacaattttggacttgagtatgaaggagagagtttactggctaaaaatgcacctttaaattcgcctattaatacaggttatccacaaattactaaagataatatagaaaaagttttaggcattactttaagtgctcaagaaaaagaa

SEQ ID NO: 3821 - DNA, 21668 bp, synthetic construct
  misc_feature 1..21668: note = Synthetic
  source 1..21668: mol_type = other DNA
ttggtatggtaaaaaagaaataacaaacccaaaaacaggagaaaaacgcactataaacatcaatgcaaatcgcttaaaaacaatttatcataccaatatgcaaagtgcttacgcaaaagcaagagcaaaacagcttagcacttattcttacaaaacttactgggtatataaatgtgcacttttagaagattcaagaagtgagcataaaaaaatgcacaattgtgctatacacagagatgatccattttggaaaacatcctttccgcctaatgattataattgcaaatgtaaagtcatagcagtaagcgaaaaagaagcaagggctaaatataaaattttagaaaatccaaaaagcattgcttctaaaaattttgcttatgataaaagagaaaattcacaaatcccaaaagaaactagaataagcttagatgagagcttagaaaatttaccaaaaatacaaaattatgaaaatttaagtgataaagaattaatagataaggtttatgaagcttttaatgtaaaaaaaggagatttgcttgttgataaaataggagatgtaataagcttagatgatgattttttttatgataaaaagaagcagactactaaaatcaaaaaacaaaataggcatttttacttagactactttccaaagcttattaatgaccctgatgagattagattaagtatggatgctgaccctagatttaaaggctttactaaaaaaacttatattaagtatttttatgataatggagtaaaagctcttgtgatggtgctaaatcaaaaaggcaatcaaatcaataataaaaccatgtttttaagtgaagataatagctattttaaagagattttaaatcaggggaaaacgatttataaaaaacaataatcaatcagcgactaagccctgagcatgatgttcccgcgtcgcatctgggttttggtttagataaaatctagtctatccaaacatcgcttaaagcgaccaaagggcataatgattgacttttagacattataaaaaatcttattttaaagtctgcttaaataaagtccagagcatatccttggtttcttcttccattgctctggctactcttttgtttatatttaaattttcatcgatgggtaaaaaaggtcttgctattacatttttagagccaaattgatgcactctggcatacgcaaagcctttataggtggcattaagtgctacaaaagctctatcattttccactccactatgtaaagagctttgcatagagcctgttgcaaaaagctttttagtatgcatgatcttttgcgcttttcttgattttagtgtgctttgttttaaaggagcccattttttgccattagagtcttgctctttttctaaattttctttactttctttataaagtgtttcagcaattatttcttttaaaataatctgcttttgttcgttttctagattttcacatttttttaaaaaattctcaagaccctttaattcaaagctcttcatcaaacaagcctttttgagtttcttttatataatattttgcccaattatctactttgataagttcaatagacataaaagtgtatccgcacttaagacatcttctaaatctttcattggtatctgattttatagtttttaagactttagttttttcattagcacatctagggcagatcaaaataaatcctttaaaaaagcttttaaaggattatatctatttttaattattttatttagttttagcaatcttttctaaaaccacaagcattatagtgcagtcttttttgctaagagtttgaagtgagtatatatctttttttaaagtttttttacaaagtttgtaaaaactaaaaataggcatttttgtttgttttaataaagcttttaaataaaaaaattgtttattagaactagcttttttaagcattaatctgcccttaaaatcaggtacgaagtttatatcatctttaattttaccatcaaaaatatcaagcaagattttaagctcatctatacttaaatcttttgagcttaaaacctcaaatcttaaagctaaaaaatcttgccaagcattattttctttataatataaatactctttgtgcatgtgtattttagctagaagttgttttctaagcattgcttgtttaggactcatagcaaacctcttatatagagttctttttttaaaaagcttctactaagcccacttacacgagagagcttggctatatttactttgccatttttgtgtttataaaagccattttcatcatttaaaacatcttttaaaagtgttttaaaagcccttaaagcaccatttcttttactcatcttttctttccttgctaaataaaacttaatcaagcccattaaatcaatggactttgttaaattttttggcttttttaacatatttcatttttatgttaaaatttttaatattttttaacatttcaaaagttcaggattctcgtggatattgccgatagtttcaatagtatatccttcatcttcaactaaataaattaaagagcctatgtaatctccattttttccttcaaaataaaaagtcccttctttgtgaatgctgatttttgctaaaaagtaatcgtatagacttttaactttaacaatatcattctcgtatacttttttacctttcttgtcataaagccctgtaaaaagctctatttcacaatcctctttaaactcagataaccttgttttggcttcttcaccataaacatattttgtttggcatttgcaatccttattaccacaacccttgtgatgcttatcccaaactctaaaatcaaaatcttgtagtttcatttgttacctccatttatactttttatagttttttgccattcctcatcgcttttaaactcattattaagttcttttaaaagtttaagtgcttcatcattagacaaattagaaagaatagctcttattctttctaatggcttgatatccttatggataattccaaagaattcctcttgctcttttgtgcttaaatcttcaaaaagttcagccaaatcatgagcatctatatcttctaaatcactcgcatctatgcttacattgacatacattttttatccttttgttttaaattaagttttaaaaacttaatcaaatccgccttagcggacttgttaaattcttttaagtctaattttttgctttgaagtcattttcttttttcttttaaagctttgcttttttagcttaggcttatttttaaaatcaagttctaaaaagccattaaaatgagctgtttttgttttaaaaacactatttaaaagtttaaaagtcgctaaggaaagctctctcatttttcaatctccaagctttcaatctttggctctattctaaaattatcttttacaactcttttaagtcctagctttactaaggtgctatcttcaagctctgcaatagtatctttattaagttcttctttataagtaatgcaatcattaagtccatagctttttaaagctttgattaagttttctagtttttctttcacacgtggtaaagatacacttttacttaagcgatagccaatcttgccaaaggtaaattctttagatcttttttcggcaaattcatgcttgttattttcacaaaaagtagtgatacattgctctatgtatccaagctcatcacttaaaaccttaatctctcctgcacgagcttctttaatctcattgcaagctaaagttacttctccattaatcttttctatttttacactaagttctgccacttttttaagtgctaaattaacatcttctaaattatttatttgcatttaaatctccttttaaattaaatttgttaatttgataatcccaaagaactacgccatatcttaaaagcactgcgtgtttagttcttttcttaactatccttaaacctttttttttcacgcagtgtcgcggagccttcaggtgggttaagggagtgtagctctttatcgcaaaaggtggctttgccacattgcgaagtcaaagaggcaactccaaaactagctctttaatgccaagctttttagctaatgctaattcttcttgcataccttgtgaatattttgcatctttgtgggtgcttatataaatataatcacttgcttttaaaagctctaatcccatttgtaaagctttgtctctgtgtttgttttcatccaaataactaaattgtagtatgggtgaaacaggcacaaaaccttcacattcacgcataatttttaagcattcttgctgagctacactaatagcctgagcttttctttgactttctcttacagctaaagctttgtaaggagaggctacataaactaatgccattgttaatcctttctaataaatttaagttttaaaaaacttaatcaaatccaccttagtagatttgttaaattttctaatacgccttaattactccatttttatcttgatataaattattttgcaaggctagatgatcaagttttgaatatttaaaatgcaagttagcttttttgctcatatttcctaaatgtaaaacatttctaccaaatttactatgactgtttaggctaactgcttgtttgtttcttctgatatcatcgataataatatatttaaaacgcttgtctccttttggagtttctaaaatttcttttaagctccaacctttttcttttcttttcacataaagcttgtgggtaatcccatatttattacaaatttctatttgttcttttatgtttaaaccaagcttatctttaagtttaaaatttttagtatttaatggtgtatctaaaggcatttttcttttttttctatctttaaaacaataataacttaactgcatttttccctttctaaataaatttaagttttaaaaaacttaatcaaagtgctttaatttaagcacttttgttaagctttttacccaaatgaaaacgaatgattttttttgcaatataatcaggataaattccttttaaaacatctacaaacactccactttctttataaataatgcttacaccctttatctcaaaaagcgaagcactataatcagctttctcacctttaatcattggtatcattttttctctccttgtattaagttttctttctttgctttttcttttttgattaagtcaatcgtttcaaagatagccatccacttgtctttatttttaggactctttaactttctaagagcttcagtatagatttgatgaacgcgtgtcacgctaagattaagttctttagctatctcttcaaaactcataatataaccatctcgcttgcactagttaataactcatcatttatttcgcactcttcaagttctgcaagtcttaaggccttttttaaaagctttgcagagcttctaaaattaccattgctaaatttaaaatagcccttgccaaaaaactcatcactttcttccttgctaagtcctctcatcatccatttaccacaaatccttgagtaaagttgtttaagctctttgtttttacccattaggtttttgtataaaatctcagttcctactaagattaaaggcactctagcaaaatccgcaatgcgtcttaaatcctccaaagcttttagtggtagatattcggcttcatctacgattaaaatcttttcattggtctttaaaaatcttgcaattgcttttagttttgaagcattgttgctatttgcttcgattttaagagcatttaaaagctcatcaagcattacacccacacttgtatgacaagttgcctctattaaaatactttgtggtctggttttaataaactcgtttataatagtggtttttcctgttcctgcttctccaaaaataagtgcgatttctttttcatttacagcttcgctcattacaaaagtagccatagaaaaatcacggcttctaaaaagttgttcttttttaggtttttcattttgcttatctttgtgattagcgataaaatctcttatctttttactccataaagccacatcacctttatagcttgcacttttaatctgtgagattaaagaagcactcgcaccaatcgctcttgccaatgcacttggcttcataccgctttgctctaaaaagcattctaattctttgcttagttcttgcatataaatccttttgtttttaagcttttttaaaagcttttaaaaactttcaaagcgtgtttaaatagactttaaaagcttttaaagacttttaataccctgcctttttggcagcattttcccattttggaattttgcatttggtatcttttataacttttgtactcaaatgttcaaaatcaccattgctaacaagggcttttgaaaattcaagttcttttttagcgttgttactagcttttgtttttgggcttttgactttttctagtttttccttgccaagagctaaatacttttccatattcttttctaaaatcattctttgctcatcgattttgtctttatttgcttttatggctctatttacaagttttctagcaactttagcttcttcaatgcttactccaagttctaaatctaagttgtttgctacacaaataagttctttttgtttatcaaagcaaaagatttcattttgattattaagattttcacacacaaacacttcttcatgggtgtataattttggattataaaaaagagtgccattaagacttaatcctttatttagcacctttctaagttttaattcaccgcctaaatacatactaaggctaagctcatctatagtgatagcatcttcaatctttgcttcataactttcttttggggtagcacctagtcggtcaagccatttattattcataaaatacgcactataatcatcaatgcactctctcatatactcaagtgttttaagtcttctttgatttgtcttatagccttttttaagtcttctttcttttttagaataaaaaaactcaatagcttgtctttctttaatattagctcctatgtatccaactaagtttgcagtgagtgagttttgtaaatctttgaatttattttctacataaggcttactccagccactgtaagctggcatcgctttataatcaatgtttaatctctctaaaagagctttgacatttttgcttaaaaaagccttgccattatctgagtgtatgcattttggcacaccataagtgctgatgtattttgcaatggctcttgctatgcttaaactatcttcactaaagcctagataaaagctagccacaccactataagtatcgattaatgatattatagtgtagcgtttatgccaagagcactcatcgccttttagcccataagtttcattgataaaatctactttacaaatagcatcaagtggacttgcatcaatttctacgatttcattgatggtatttactttccaattactcacaccaagtgctggtagatgtctgcttatagctccatcttcgccatgcaagatgatattttttataagtttgttttcttttaggtattttttcatacttcttaaaacacactcatagcttataaattcatcttttttgcctagaaaatcttttaaatctaacttgccattctttgctaattcataatttaataccctgtggatattagaagcattaagccttcctttttgagcaagcaaagtatttataaaaagctcttttataccaagagtgctaatggcatcatcttttttattttctcttttatctattaaagcatcaagtccgtttgctaagtattctttttgccaagaaaagagcttgttttgtgtgagcttaaactcatagatttttttagcgttaatgtaatttataaaatcatttgtgcttatcttgcctttagcatggagccattctttaatcacagcggctttttgtaaggctaaattttgctttttagaactggcttttgcaaagaggcttaaactatctttgtttatttgtatttgattttcgctaagtttggttttgtcagtgttttgcacttgtaaagctttagaatttttaagcaaaatatcatcgtttaatgctttgcttaaaacttcttgtgttgtttttgagcttatagtagtattgcttatatcttctatgttaaaaccttgctctactagctttgcttcttccttgcttaaaggtttagaccagatttgaagggttttgcctgcatgaccaccaacacctttggagtatttaaagtataatatattgaactttaaaaggcaaaattttttactttttttatgagctctattagcggattttattatagtatctctatttaaattatatttttctgcaaattctttactacttacccacattcaagccaccttaaacccatccttttctagcatttcttttaattctttagctctaccccttatacccttaatcctaccatgagacaaatcataaagtatagttatatctttatgatttaagcccttagccttagcccaagtcataagctttacacctttagtactcatagtttttacaagtttatttttcatcttttttcctaaatatgttataatcaatcaaaaaaggagcttttatgcaagcaaatcttaaaaaaattcttatagaaatgcaaacacaaatccacgatttattacttttagctcaagaacaacataatagctataatgagctcaccaaaaaactaaataacgattttctaaaaataacaaaagagcttagaaatcctttagataaagaacaagctgcttttgcaacacaagcacttgaaaaacactttcaagagtgcaattctctaacagatgaattttcaaaacaatctcaaaaagcttttgatgatcgttttaaaaaaattttagaaaattatcaaaaaattaaagatctttcctaggtttagtttttatgcctatataacctgtcagtatgataggtttttttaaacacttgctctttttaggtttattctttttcttcatatttttcctttaatattatttttgcttttttgtgttaccattaccgaaaaagttatgtaattatagtataatttattgaacttgtcaagtatttggagtaaaatatggaactttctttaagaatgaaagaatatagggagtactttggttggacgcaaactgatttatctgagaaatctggcgtatcaataagcacaattaaaaagtacgaagctggatcagttgataattttacctatggcaatttaaaaaaaattgcttcagcttttaatctatctccagcttcatttattagtgaaaatatgtccgacaatagtccgacaatatctaacaaaatatgtccgacaaacgtaaaaaattgtccgacaagcaatgtaattttagaaaattttactcaaaccttaaacgatgatatgataaacattcctttttttgaaaatgtaagagcaagtgctggaagtggcgcttataacgatgaagaaagcactcaagctttgggactttctaaaagttttttgcgtgaatgctttggtttatactcttttataaatctctctgtgattttaggacaaggcgattctatgacaccaacacttcctgaaaactgctatcttttaatccagcaaggagaagtggcagaaggcgaaatttgtgtaacacgcattgaagatgagctttatgtaaaacgccttcaaaaacgccccaagctaaaactccttagcgataacaaagcgtatgagcccattaatttagaaggtgaaaactttgaaatactcggacgcgttgtaggatattttaaaaagactactctttaatttttaaaggtgtttaaaagattttgtaaagtatttgtaaaaagaatgtaaaaatgtgtaaagcacaatgtaaaaaatgtaaagataaaagctcactttgatttctaaaaaaatctcatcaaaatactataaaataatactttgattaaaatttctcttactttacttttttacatatctttacaataaaaaagactttttacccgcatttaatgaaacttattacaaagatgaagtaactaatcctgtggttttaagggcgattaaagaatatagaaaggtcttaaatgccttacttaaaaaatacggtaaagtgcataaaataaacattgaattagcaagagaagtaggtaaaaatcacagccaaagagctaaaatagaaaaagagcaaaacgaaaactacaaggccaaaaaagacgccgaacttgaatgtgaaaaactaggcttaaaaataaatagcaaaaatattttaaaattaagattatttaaagaacaaaaagaattttgtgcttatagtggagaaaagattaaaattagtgatttgcaagatgaaaaaatgcttgaaattgatcacatttacccttattctagaagttttgatgattcttatatgaataaagttttagtttttaccaagcaaaatcaagaaaaacttaataaaaccccctttgaagcctttggcaatgatagtgcaaaatggcagaaaattgaagttttagcaaaaaatttacctactaaaaagcaaaaaagaattttagataaaaattacaaagacaaagagcaaaaagactttaaagatagaaatctaaacgatactcgctacatcgcaaggcttgttttaaactacactaaagattatttagattttttacctttaagcgatgatgaaaatacaaagttaaacgacacacaaaaaggctcaaaagtgcatgtagaagcaaaaagcggtatgcttacatcggctttaagacacacttggggctttagcactaaggatagaaataaccatcttcatcacgccatcgatgcagtaattattgcttatgcaaacaactctatcgtaaaggctttttcagattttaaaaaagagcaagaaagcaacagtgcagaactttatgcaaaaaaaattagtgaattagattataaaaacaaaaggaagttttttgagccttttagtggttttaggcaaaaggttttagataaaattgatgaaatttttgtctcaaaacctgagagaaaaaagccaagtggagctttacatgaagaaacatttagaaaagaagaagaattctatcaatcatacggcggaaaagaaggagttttaaaagccctagagcttggtaaaatccgcaaagtaaatggtaaaatagttaaaaatggcgatatgtttagagtggatatttttaaacacaaaaagacaaataaattttatgctgtgccaatttatactatggattttgctttaaaagtattaccaaataaagctgtagcacgaagtaaaaaaggtgagataaaagactggattttaatggatgaaaattatgagttttgcttttctttatacaaagatagtttgattttaattcaaactaaagatatgcaagagccagaatttgtttattataatgcttttacaagctctactgttagtttgattgtttcaaaacacgataataaatttgaaacgctaagcaaaaatcaaaaaatattgtttaaaaatgcaaatgaaaaagaagtaatcgcaaaaagcataggaattcaaaatctaaaagtatttgaaaaatacatagtttcagcacttggggaagttacaaaggctgagtttagacaaagagaagattttaaaaaatgagttacgatgaagcttttaaaacactgcttattagctctaatgccaagctaaatttagagctaaatcatcttgtgattaagcaagatgaaaatatagccaaattgtttttaaaagatataaatatcatcgttttagaaagcttacaaataagcattagttccgcactttttaatgcctttgcaaagtataaaattatcttattaacctgcgatgaaactcatagtataaatggcgtttttactccttttttagggcattttcaaagtgcaaaaatcgcaaaagagcaaatgaatgtaagtgctcaaaaaaaggctattttatggcaaaaaatcattaaaaataaaatcctaaatcaagcctttatcttaaaaaaacacaataaaatagagcaaagcaatgagcttataaatttggctaaaaaagtaagcttaaatgatagtaaaaatattgaagctgttgcggcggcgctttattttaaaactttgtttggtacttctttttcaagagatgagctttgctttgaaaattctgctttaaattatggctatgcaatcattagggcttgtattattagagcagtttgcataagtgggcttttgccttggcttggcataaagcacgataatatttataattcttttgcgctttgtgatgatttgatagaagtgtttagggctagtgttgatgattgtgttttaaagcttaagggtgaaagtgagtttttaagcaaagatgacaaaagagcgttgattggcaatttacaaagtaaaatcaattttgatgggcaaaattatcctttaaacagagcgataaatcattatgtggcaaattttaaaaatgctttattgtatgaagatgaactaaagatagtgaaatttgatgattgaagataaatttatgcgtgtgcttttgatgtttgatgtgccaactaaaagtaaaaaagagcaaaaactagcaagtaaatttagaaataatcttataaaattaggttattttatgctgcaatttagtgtttatatgcgtatttgcaagggtttaagttctgcaaaaagttctattgaaaatgtaaaaaagattttgccaccttatggaaatgtaagggctttaatcatcactgaaaagcaatttgataaaatggagcttttgcttggtggcatagtttttaatgaaaaagttaataacgaaaccaatttaacactttttgatatagatagtcatggagaatttaaatacaaaaattcaaataatgaagaaattcaaataaacaaaaaacaagaaaaatatcatcagcaaaatttatttgaattttaaaagcggttttaggggattgtaaccccgcagagtcccgcaaactctttattttagtccctttttaaatttcttatgagattatagcataatttttgctatttttcatgaaaaaaccccgaaattttcattatctggtaaatatctattttaccataaagaaatttaaaaagggactaaaataaaccctagtggattgaaactccactagggctaattactccactaaaaggaggttgcgaatttgaaacttattgaaatttagggttgattaaaatcgaaataaaattatttaaataattttaaggcataaagataatatctactaaactttcattttctaacatttcacattcttttggcaccaccataagggcagctttattgttaagattgtttataatcgcactagagccttcttttttgccttcaagattggctaaaatgcgtccatttttaaactctatattgcaagcgacaaattccaaataaggtgtttttttcttgtaacttccttgtaaaaaggctttgcaaatatagtctttaggttgaagtaaccaagagtttaaaatctctcttgtgtaaagattaaacattaccatagccgagtaaggaaaacctggtaaggcgatgatgaatttttcattagccttagctattttgatatgtctacctggttttatgtcggctttatcgatgatgatttcgtattctttgatggctttttttaaaaagtcaaaatctcccatagaaaccccgcccgttgtaaccaaaatatcacaactttgcaaagcactttcaagggtggaaaaagtggctttctcatcatcttttaaaagaggaaaaacccttgtatcgcaatttaaatttttagctaaattagctatggcgatatgatttgaagagcggatttgagcaggattttccaaggcttctcctagatctttgatctcacttccactacttaaaacccctacaataggctttataaacacactaatgtgaaaaaatccaagttcagctaaaagagctatctcgctataatttaaccttgtgccttttttgagtaaaatttcatcttttttatagttttctcctaccgcacgcacggcaaaagcttggggaacttttttttctataaaaagagtattattttctatgcgtatattttcaacagggactaaagtatcgcttccttcgctcatgagtgagcctgtaaaggtttttacacaagtgccattttgtacgctaaattgtggcatagtacccgcaggtgtgaggcctaaaatttttaaaggcttgtcttgatcttcaaatttgatcgcataaccatccatagccgaggttggaaattcaggctgatttttaggggcttttatatcttgagctaaaatgcgtcctaaacactctgtaagagctattttttcaatcttttcataagttttgatatgagaatgtaaaatttttaaactttcttcataagacattagcattttttatccttttaaaagtcctgcaccgcaaagcttggttgatctttctttggcataaattctttctttgtttatcacatcatacttccaaatgggcgcacttgctttaaaatcttcaacaaattcattaagaagtttaagtcctaattttctttgtttgcttaaaattcctgcaaaatacgagctttcatgtatcgctacatcgcctatagagtgagcaaaaagcaagctaataccatcaaaatctactcttttttgccactcatcaaaccatttttttaaaagcggttcataaatatcaaaactaagtgcctcaatacctccttcttcacgcacaataccacaaaaagtcagtaaagcaccgcagtttttatccttggaaaattcataccattggctataaattttaggaatatctaaagagccttgataaagtgtaaaatgtttcatttagcctccacaaactggcggtaaaagtgctattttatcaccatcttttaacttggtgttttcatcaaaaatgatttcatcatttaaagatacagcacaaagttctagccattcttttaaactctcatctttttgcaaaatttcttttaattcttttaaattttttacttcaagttctaaattttctttatttatagggcctaaaaattccacttttaccattttattcctttacttctaaatttcccatcattcctaaatcttcatgttctaaaatatggcaatgatacattctaagtcctttaaaatcttgtttcattctaagtcttaactcttcattaggacgcacatttatagtatctctgaaggctctaaattcggctttttgaactttgccattgagttttgatgagatgagttcaaattgcgtgccgtgtatgtggaaaggatgatccatgtgagatttgtttatcactatccagtcttcaactactccaagcttggagcttaaatcaatgcgttttaaatcatagcttttgccattgattaaaaacatagacgcaagagcgatttttaattcattttcactttttcccatcattccatgcatttgcatatgatcttcactcatgattatttctttaaattccttaggttcttctaaaggtttgaaaatttttaaattttttggaagttctaatttttctttttttaggctaatactagctaaaaatagggtattagattcttcttttaccatcattttgtccctatcataataagcactttctagcttaaaattcccatcttttggagcgtcgattaaaacttctacacgagaagcaggacttaagaaaagttcttctttataaatagctttttctataagtccaccatcagtaccaacaagtataaacttagctccttgtatgcgtaaatttaaatatcttgctgcagtagcattataaatgcgtatgcgttcgtttgtggcgagtttgattttaggtttaaattgtccattgatgagtacaaattctccttctctaccatttagccaatcatttaggttattgtttggaatttgagcgttttcatcaagacgcaaatcgctaatcatcaaatctttttcttttaaatgacttaaagcatctttttttgctttgatcacaaaagcccccgctaaacccataaaaacttgtttagaagccgtataatgaggatgtggatgataccagtaagttcctgcgctatcttgaggaatttcaaaacgatatattctttcttctcctgctaagataggatcatgtgggcttccatcttgatcaggtggcacaggaacgccatgccaatgtatagttgtagcttctttgagtttgtttttgactaaaatttcaagtttatctccttcaaaaacttctatttttggagcaggcacgaggccattgtaagtataaaataaggtttttttacctttgataagctctatatgattttctttgatttctagggtagcacgaaaaatatttttttctttactttcatttttgagtaaaggcaaggcttttaaaatttctccttgggggaattgttttggatctaaaagctttaaattttttggagcaaagtttataaaagaagtatctaagtcatgatttatagaatgatttttatgcatggagtgcatatcatgcataggatttgcataggctacacccatacttgctagagtgagtgcattaaattttaaaaaatttcttctattcattagtttttccttttgcttgattttttgtattatagtcattattagtaaatatttattttgaaaatttggtttaattttgttatgattttagcaatttaatcaaggaaaaataatgttttatgaaaaaattcaaaccccagcttatattttagaagaagataaattaagaaaaaattgtgagcttttagcaagtgttggcgaaaaaagtggtgctaaagtgcttttagctttaaaaggttttgctttttcaggagcgatgaaaattgttggagaatacttaaaaggttgtacttgtagcggactttgggaagcaaaatttgctaaagaatacatggataaagaaattcatacttattcgcctgcttttaaagaagatgaaataggtgaaatagccagcttatctcatcatatagtgtttaactctttagctcaatttcataaatttcaagctaaaacacaaaaaaattccttaggtcttcgttgtaatgttgaattttctctagccccaaaagaactttacaatccttgtggaagatactcaagacttggaattcgtgctaaagattttgaaaatgtggatttaagtaccatagaaggacttcattttcacgcactttgcgaagaaagtgctggtgctttagaagctgttttaaaggtttttgaagagaaatttggcaaatggatagggcaaatgaaatgggtgaattttggaggaggacatcacatcactaaaaaaggctatgatgttgaaaagcttattgctttgtgtaaaaatttcagtgataaatacggtgtgcaagtttatcttgaaccaggcgaagcggtgggttggcaaacaggaaatttggtggctagtgtagtagatatcatagaaaatgaaaaacaaattgctattttagatacttcaagcgaagcgcatatgccagatactatcatcatgccttatacaagtgaagttttaaatgctagaattttagccacaagagaaaatgaaaaaatttcagacttaaaagaaagcgaattttcctatttgcttactggaaatacttgtttagcgggtgatgtaatgggagaatacgcctttgataaaaagcttaaaatcggcgataaaattgtttttttagatcaaattcattacaccattgtgaaaaacacaacttttaatggtataagacttccaaatctcatgcttttaaatgcaaaaaatgaacttcaaatgataagagaattttcttataaggattattctttaagaaattagtattatttataatttgcataaaatgttaattttactcggaagagaatcaaagatgtaaattttatgcaaagtattttattttttcaaatataaaatcaactcaaatatctaattttcaatactttggtatgattttttaatattttaaatccttgtggaattttattgaaattcagtgatttttaaatcaaatagtattaagataaatcgatttaaaaatcggctttaaaatgaatattaggtatattttgtataatattcattcaagcaaaatttaaagctatttttgaaaattttgaatgcatgggggctttaatggatttggaaaaattaagattagctagaagtctttattatcaatgtctaggagagctttttgttttttcattttctgaagaaagattgtcaaaattacaagagtatttaaagacaatgcaagaatgtttatttgatgaaaatttaaaatcaaattttgatatcttgcttaagcatttagatgatgaaaattctatacaagcattttttaaagaatacgatttgctttttttaagtcttaaaaacagcattccaacgactttttcttacatagaagaaggttttgaaaattcaaatcctttactttgtgtgcgtcaaattttagtcaaaagtaaaataagacgcaatgaaaaattttttaaagaaagtgaagatagtgttggattttgtttattgttgatgagtgaatttttaaggcaaaatgaagatgatttagccaaagagctttttgaaaaagtgatcaataaaagcattgatgagtttttaggcgatgttttcatgaataaaaatgcgaatttatataaggaaattgcaagtattgcattggcttttatggaatttgaaagactttgctttgaagtagaaaaacctgcaaaaataaattctaaaaaagtgcaaaacgatctatcgcgttcagaatttttaagaagagaagcaaataaacaaaggaggactcgtgaaaaatcgcagggaatttcttaaaaaatccgcttttgccttaggggctgctggagtgcttggtagcacaactttagctctagctaaagatgaagaaagaaaagatttggttaaaggtaaaagtaagaaaaaagaagtgctttttcaaagaagtgctaattgggaaaattattatataaaggctgagtaatgtcaagtgtaggtgaaaatatcaagcttacgcgtcgttcttttcttaaaatggcagcactttcaagcctagcaacaccgttgcttgctagaagtgaaactttaagagaagcgagtgctgatgagcttaaagaagcgtatgaaggtagtaaaaaagtaaaaacagtttgtacagcctgttctgtaggctgtgggattattgcagaagtgcaaaatggtgtttgggtgcgtcaagaaattgctcaagatcatcctgtgagttcaggtggacattgctgcaagggatctgatatgatcgatatggtgcgttcacatgtgcgtttaaaatatcctatgaaaaaagaaaatggagaatggaaacgcataagttatgagcaagctttaagtgagatcggagaaaaactagctgcttatcgtaaagaaaatcctgaaagtgttatgtttttaggttctgcaaaacttaataatgaacaagcttattatataagaaaatttgcagcattttttggaacgaacaatgtagatcatcaagctagaatttgacacagcgcaacagtcgccggtgtggcgaatacatttggttatggcgctatgacaaaccatcttggagacattcaaagaagtaaatgtatcattatcattggagcaaatccagcggtaaatcaccctgtgggttttagacatttcttaaaagcaaaagaaaaaggtgcaaagcttatcgttgtagatcctagatttacaaaaagtgcagcaaaagcggatatttatgcaagaattcgtccaggaactgacattgctttcatgtatggaatgttaaaaatcatttttgatgaaggcttggaagatacaaaatatcttgatgaaagagtttttggaattgataaaattcgtgaagaagcagcaaaatggacagctgaagaagtggaaaatgttacagggatctctaaagaacttttggtgcaaatcactcacgaagtagctaaaaacaaaccaactacgcttatttgggctatgggtttaactcaacacactgtaggaacttcaaatacacgtttagcacctattgtgcaaatggtacttggaaatataggtaaatttggtggtggagttaatatcttacgcggacacgataatgttcaaggtgcttcagatatggcttgtttgagtgaaaatttacctggttattatcctttaaatgaagcgacttggagatactatgccaaaatttggggtgtggattatgagtggcttttaggaaattttgtaagtaaagattggatgcataaaactggactttcacttgctagatggtgggcagcggctttaaatggaaaagatggaaatgatgctatcgataatgcaggaacgcctttaaaagctttagtagttatgggaaatggtattacttcgactgcacaacaagtaaaagttaaagaaggtttggaagctttagagcttttagttttagccgatccttttgtaaatgaagcagggattatcgcagaaagaaaagatggaatttatcttttacctgcagcaacacagtttgaaacaagtggaagtgtaacagctacaaatcgtagtgggcaatggagatttaaagttgtagatccactttatgaaagtatggaagatcaagaaattttatttgagcttgctaaaaaattaggcttttatgaagactttaccaagactttacgcgatgaaaaaggtgagatcgtttggcctgaaaatgcaacaagagaaattgcaaaagcagttagaagtatagggcttaatggttggagtcctgaaaggcttaaaaaacatactttatactgggataaatttgatgaggtaactttagaaggaaaagacgaagttgcgggcgagtattatgggcttccttggccttgctggagtgataagcacccaggttctcctgtactttataataccgacattgaagtagcaaaaggtggtatgggctttagaaataattttggacttgagtatgaaggagagagtttgcttgctaaaaatgcacctttaaattcgcctattaatacaggttatccacaaattactaaagataatatagaaaaagttttaggtattactttaagtgctcaagaaaaagaaaaaatgggatcaacttggtcttatgatgatagcaatatcatagcaactaaatgtatagaaaaaggcatagttccttatggaaatgctaaagctagagctgtagtttggacttttaaagataaaattccactccaccgtgagcctttacattctccaagaaacgatttggtacaaaaatatccaagttttgaagatcaaaaagcactttatcgcgtggatactaaatttgtttctgtgcaacaagctaaggattattctaaagaattcccgcttaatcttgttaccgcaagacttgtgaatttaaatggtgcaggtatggaaaatagagcatctatgtatctaacgcgtttaacacctgaaatgttttgtgagatcaatcctgaattagcaaaagagcaagacattaaagcaggagatatg

SEQ ID NO: 3822 - DNA, 21309 bp, synthetic construct
  source 1..21309: mol_type = other DNA
  misc_feature 1..21309: note = Synthetic
gtttagatttatttgtgtgtgtgtttccccctccctttgcggagggggctagggggtgggtagataccacctccacgcttcaagcaaagctagcaactgcaaacaaacacagcattttcgtcattgcgagcaagtcgaaagacttgcgtggcaaaacaagcaaagcgtagtttctttagtaatgacgaatctttccacgcttttgccaatgcaaaagatacccacccccaaacccctccgcaaagggagggggctttaagagagtcgaacgcgattactctaagggaggaggcttttgtcctcctcactcacaaagtagcaagcgcacttactctaagggagggggtttcaagaagtttccctgtaaataaaactatttgtcatactgagggcgtagcccgaagtatctcaaggaatatctcaaaagattctgcaaacaacacaaaacaaaaaaagagatattttgcttgtctcaatatgacaacgcataaaagcgtggattactaaagaaactgcacttcgttcgttttgccacacccatttcatttgctcgcaatgacgaaaatcgccatttaagcattagcaaaatatttcaaaatctctcttaagccgaaatgctcttaagcaaaacttcagcttcattttttagtccaattttataccaaatccattcctaaaatcttaccaagctaacaaaatacatccaccaaaaatcacaaaaacagcagtttttgcaaaaacacgattcccaaacccacgcaaaatacacacttacacagcaattggttttagccgcttgttaaattctcttatggtaaaattacattatggctcgtaagcgtgggagatttgttttagccgcttgttaaattctcttatggtaaaataagtagggtatgcttcttctactccaccaggttttagccgcttgttaaattctcttatggtaaaatccctgtggtcgttgtatttgctgtcgtgtggttttagccgcttgttaaattctcttatggtaaaataatctcaaggtttaggtaaatctgtcctcagttttagccgcttgttaaattctcttatggtaaaataaagagctttatccttaaggaagcgagaaagttttagccgcttgttaaattctcttatggtaaaattaagccagcgttttggtcgacctgttgcaagttttagccgcttgttaaattctcttatggtaaaattacttgcgtagatgattctcccgcgcgaatgttttagccgcttgttaaattctcttatggtaaaatttgcttgtgtttaaatgagttaggaaatttgttttagccgcttgttaaattctcttatggtaaaatcgcgaaatgctactcttggtaacacttacagttttagccgcttgttaaattctcttatggtaaaatcaatgtaacgcttaaattaaatagcaactagttttagccgcttgttaaattctcttatggtaaaatagagacaaaatgagggtaacacatcaagtcgttttagccgcttgttaaattctcttatggtaaaatcaaaaaaattatattaaatgaagcgaggtggttttagccgcttgttaaattctcttatggtaaaattagggcgattatcctctatgccttgattttgttttagccgcttgttaaattctcttatggtaaaatgcatcatgagtttttttaccaggctctgtgttttagccgcttgttaaattctcttatggtaaaatatcctgtgagaatatatcgattttatcggcatttgagagtttttgacagcccaaaatccccataaaatcgagataatcaagcatagagagtctaacaagcggctaaaataagggaagcaggaaatcccgcagggtcccgcaaggggtaaaacgcaatgaatggattgtgttgagctaatccctaaacctgcccgtttttttgattctactttttaccttacacatacttaaagcataaccacacttagatacacctactcagcctacctcacccacttccaaagtcatatcacttcacacaatgccttttaatatttttgtcaagcaaaatttgctgataaaagatattcccccaaatacttaaaaagcaataaagagatatttcgctaatgctcaatatgacaaggacagccaatcacaaggtggcaatgataatacagcaataaagacagcaacgataaagcgacaaatgacaaatagcgataatctctaaccataataagcgataaatatacttcactaaaatatgacaacaaaaaatttgggttggtttatagcaagatagagcatagaaattagcaatgaaaaaaaacgacaaaatcaaataagcaaacaatccccaccaatccctagaagtatcaaaatcatcaaaagacaccaaaaaagataccaaagcaaactaaaacttcagcaaaacccacaaccaccaaaatcccacaaacccaccaaaaatatccccaaaacccccaaatattcacaaaacctacatagcactttttgaaaagtcaatcaaatcctgcgttgttcgcacggcttttggcagtgataaaagcgatatttcaaacacctttagcgcggttagcgcatcggcataggcacgatgtgaagtaggcgtatttatccccaaaaattcatttagatactgcaaagaataccgcttagcaagtatcgtcctgcgggctaaatctatggtgcatagctttgggtttagtagcttataaagccccgcttgctccatagccgcgcttacaaacccatagtcaaaccccacattgtgtgctacaaaaacactctgtgccaaaaactccctaaaatcacgcaaaacctctcgctcttttcgtgcgttttctagcattttgggtgtgatttgggtgatttctacgatagtttctgggacaaaatacgcgtggataagctcgctaaactcgcccaaaattttgccatttttccactttatcgcgccgatttcgatgatttggtgctcttgaggtttgctacctgtggtctcaatatccacaaagcaaaattcctgttccctccacgatagctcattgtgcgctaggaagtaggtatccccgcttgattctagtggcaagccctgcgcacgcagtagctcgacttgtagatacgcttcctctatgtcaaagtctttatcaaagtctctagtcccaaaatctttggcaaaatcttgcgtgaaatctaagctagattctagtctgtccccaaaatcctgccctagatttttttccacacttttttttgcactttttactacgctactttttactgcacttttttttgtgcttttgtgtggatttttgtgcgtgcttttgctatctgtgtagattgcttgatttttgctagattgttgcaaaatcccataaagttcctcataagagattttgctttttgtcagccttgcttgcagttcctttgcgatactcaaagtcatatccttagtctttagcccgattttttacaatctctatcgtgggttttttagcaagtctatggcttggtgataatccctagcaccaaagacaaaactccccgctacgagtatatctacacctgcttgcttcaaagctagggcatttttgtcatttaccccgccatcgacttctattaggcattttggatttttggcttctattagttcgcgcaagtttcgcgctttttctagcacagatgggataaactcctgcccaccaaatcccggatttacactcattagtagcaccatatcaatatctggcaaaatatagcgcagattttcttcacttgtgtgtgggtttagcacgactgcgggacgcactccattatctcgtatgtggcttatgaggcggtggagatgcttcacttcctcgatatgcacgcttataaattctggctttagtggcaaaaagctatctacaaaactttctactttttctaccattaggtgcacatctagtggctttgtggtggcgtttgctacgctttttatcacaggtgcaccaaatgtgagatttggcacgaagtgcccatccataatgtcgatatggacaaaatccgcccccgcttcgcagatagaggctacctcctcgccaagccgcaaaaaatcgctagataaaatacttggtgcgactagcatagtggcaggctttttgtggtggaatctacgcagtgggtgcaaagatgagcggacaaaaatatgtcaaatgaaagtatgtgaagcaaaagtgcaagtggcatagagggtgtagaaagtagattttgcatcgcgtgcctttttggttggtatctttaggtgtcatatttgtagcgaagttttggcgataaatttcaaaaattaaatgctatcataagtgtattaagaatataattaagcctttataaaaactagcaaaaatataaaaattcacacaaaatctaacaaagcccgcgcttaaaagagtagcaaaaaagagtgaaaaaggagtgaaaatgcaagcccaagcaaaaatagattttgcagcactaaagctatgcctacaagagtgtgctatcgctgtgcatagcgcactacaaagtgaaaatgtaggctatctatctagcacaaattctagtggggatatgcagctaggcgtagatgtggcgtgtgataaactcatagaaaaaaagctcttagagctagagtgcgtaaagggagtatgctctgaagaaaaacaagaagcactctataaagattctagtgcaagtcttttggtagcttatgacccgctagatggctcaagtctttttgactcaaaccttagtgtgggctctatatttggaatctatcaaggggagtttgcctctagtgcgatagtgggagcgtgctatgtggtgtatggaccgcgcttagagctagtgtgggcagatagcacagatgatgaggtggggcattttttgtatgattttgctaggggggaatggattagtaagccagccttgcatttgggcgaaaaaggtaagctaaatgcaccgggtggaacacaaaagcattggagcgagaagcacaagtcgctagtggattctctttttgtgcaagggtatcgattgcgatattcggggggaatggtgccagatttgcaccagatacttataaaaggtggagggctatttagctaccctgcgacacaagacgcaccaaaaggcaagctaagaaaactttttgaggtgtttccatttgctttcatctaccaaaaagcaggtggagagggcatagatgggcactgctctttgctagagctagggtgtgatggactgcacgataccacgcagtgctttttaggtagcaaggcagaaatcgcccttgtaaaggaagcatataaataatttcacgataaagagatttaaaaagcatttttagaaaaacgattttatagcctaaagactttgcaaaggctttgggcttgcaaacattttgcaaacataaggataagaaaatgagtgaaataaagacacctgataatgtagcacagagcgcagaagtagcaaatggcgcaatggatatatttgagaaaaaactccaagatgagctaggcaacctcaaaaattgccagcaaagtagcggggtggattcttgctttgtgtgtgagaagatgctagagtgtcccacgcgcaaatcctatgtaagtgctgtgtatgagagtatgggcaagggacaagaaggcatagattttgatttctagatgaaatctaaattttgcttggcagggcaaataaacataaaaggctagaggaaatggaatttttagaggattttttacacacgaaagacatacaaaaagcaaagatttttgagcttttgagatgcaaagagcaagaagcaatcatcttgcaatatatgacaaaagcactcctagatggcgtgcaagaagtgggcgtgatagagctagtgcacaactgctttggcgagcaaacaagccaagatagcctaagcacaccacaagacttgcaaaatcctgccaaagctaccaaaaaaacgacaaaaaaagattccttgcaaaaacaaaactcactccaaaatcccctccaaacctcactatatgacaaaccaaagcaatccctaatcattacccacctccccactatccgcacgcttttggatttggggtggattgtccttagtgagatgtcgcgatttaagcagccaaatatcaaggacttggctttgctagagctactaagctgtgaggtgagcctctctagcgcgtttttgcgactcatagagagaggacatagcgaagtgcaaatgcccgatgaaacaccttataatgaccatctagagtatgtcaaagaccaatttttgcgcatacatttggcaagcaaatttagcccacaaaatgacaaaaaaaacaccgcgctaaaatcccaaataaacgcactagaaaaccgcataaaagagcgacttctcatcaccacaaaagagatttcagcacacaaaatcatcaaagactacgcactaaatccaaaagaagaaatgatattttttgccctgctaaaggaggaatactatggaggagatggctactaccgagatatgaacaacctcatagacttgataagtgaaagcgaatatgacaaaatgaaaaatcgcgccctacttgatgaaaaatccaccctcatagaaaagggactacttgactttggggaaatgctaaatccatttggtggaatcgtgcggacattttatatccccgaagagattttgcacaaggttatccgcgagccctacaagaaaaaaagcaaaaaaatcgccctagcttctgtgctagaagagcaagaaatctttgagctactgcgccccaaaagtagcctagatgaaatcgtgctaccacaatccaccagaacaatgatagactctatcctaaagcaagtagactctagcgtggtggctagactaaagcaatgggggataaaagacaagcacaaaggggtagaagcaaaaatccttttctacggtgccgcaggcacgggcaaaacgcttagcgcacttgccatagccaaagccctaaaaaagcaagtgcttagctttgactgctccaaaatcctctctatgtatgtgggcgagagtgaaaaaaatgtgcgaaagatatttgacacatacagcgacataagcaaaaaaatcaaaaacgagcctgtgctactactagatgaggcagaccaattcctaagcacacgcataacctctagctctggcgcggagaaaatgcacaaccaaatgcaaaatatatttttggagcaaatcgagcgatttagtggcgtgctagtggctacgacaaatctcgtagagagtatagattctgcgttttctaggaggtttgactacaaaatcgagtttaggcgaccaaacgaggagcaaagacgcaagctgtgggaaaaatacctccccaaaaacgcacaatatgagccaaactctaccatagaatccctctgcaaagagctatctagccatagcttaagtggcgcacaaatcgccctagtgataaaaaacaccgcctataaagtcgccactagagataagcctatctttgccaaagatgactttatcgaagctataaagcgtgagctaagcggggactttgatagtagcaaaagcgtggggtttatatagcttttagctagattttgctcaaaaagtgggtttgtaagggaggttgtatttagttgttttttgcttatttttctgcataaaaatttgtgtgtatttttatgggttttgcaaaaatattgacaaaaccattttttttttttttgtagaatcttgctctaagaaagctaaggagtggaaatgtcgcaaaatcaaaatacacaatctcatctcaatcctactacacaacccaacacacaattaggcgcacaatcaagcacacagctaagcacacaatcaggcacacaaagtttgaaaatcttaggctttgatataggtgtggcgagtatcggctgggcgtttgtcgagggtggggagctaaaagactgcggagtgagaatcttcacaaaggcagaaaatccaaaagacggcagctctctagccctgccacgccgtgaggcaaggggagtgcgcagacgactagcacgaagaaaaggtaggctaaatgcgctaaaagtgcttatctgcaaagagtttgggctaaatcgtggcgactatctagcaaacgcaggggaattgccaaaggcgtatcacacaagtaaggatacaaaaagcccatatcagctccgcgcagaatcgctaaatcgcaaacttagtgccgatgagtttgcccgtgtgattttgcatatcgcaaagcatagaggctatggcaataaacacgcaaaggaatcaaacgatgatgatagtggtaaagtcaaaaaggcgataagcgaaaatcaaaaagtgatgagtgaaaaaggctacacaaccgcagggcagtatctctatggcgagttttatcaaaaggaaagaaacgagcaagaaattcaggcaagggtggaaactttaaaggcgtattataagagcaacaaagtaaaggtagaaaatcaaaataaaaataagttagaaagacaaagcccaaatcaattcaacaatatccgcaataagagcgaaaactacgcgcgttgcttggctcaaagcgaattgcaaaaagaattagagattatttttgagagacaaaagcaatttggctttgaatttagcgacaaaaagcacaaaatcattgatgcaaatggcaaactccaagagctagattttgcagacgcagtgctagaaatcgcatttttgcaacggccactgaaatcccttgcagacaaagtcggcaaatgcacattttatgagagcgaaccccgcgcaccaaaagactccttaagtgctattgagtttgtcgcacttacgcgtatcataaacaccctagcaaatatcacaaagcgcagtggagaggtatatagcgcggataaagtgcgcgagattctctcaatcgtgctagacaaaggcgaaatcacttataaaaacttgcgcaaagtcatagctcttgatgaaaagctacaattccccaaagactccaaactagactatgcaaaagaggacgctgaaaaagcaaaggcaatagaatttagcaaattaaaagcatttagaaaggctttgggtgggagttttgagggattttctcgtgccgagctagattctatcgccacagatattgcgcttaccaaaagcaaagatgagctaaaagccaaacttgccaattatcaaagcctaaatgatgagcaaagagaaaaattaagtgagctaagttttgataaatttattgatttgagttttaaggcattggaggcgattttgccccttatgcgcggggatagtggcgagtgcaagcggtatgatgaagcgtggagagaagcagggctagtcgaagtagccaaaaagacgcaaaaaggcgatagcctcccacctctaatacaatacgagcaaaatctagcaaatcccgtagtggcaagggctttggcagagtatcgcaaagtgctaaatgctttgcttaaaaaacacggcaaggtgcataagattcacttagaatttacgcgccaagcgggtgtgagtagcaaagagcggggcgaaatcatagccgagcaaaataagaggcttaaggcaaacgaggaagcgcgaaaaaggtgtgaggaatatggactaattccaagcggcaaaaatatccttaaactcaaactttggcaagagcaaggtgaattttgcgtatatagtggtaagaaaatttgtagagagcattttttagacccaaaagccctagaagtcgagcatatctatccatattcgcgcagttatgatgatagccaaaataacaaagtgcttgtctttgcagatgccaatcaaaacaaacgagaaaaaacgccttatgaggcgtttggtggcgacacacaaaaatggaatcagattttagggcgtatcgaaaaactaccaaaggcaaagaaaaatcgtatcacaaacaaaaattttgccaacaaagaagctgggtttatcgcgcgaaatatcgtagatacgagctatatcgccacacttacagcaagctatacagatgcgtttatcgagtttttgccactcacagaaaatgaggacactacgctagggcgcggcgaaaagggaagcaaaaagcacataagtgtggtaaatggctcactaacggcaactatgaggcattattgggggctaaacactttgctagatagtgaggatagcgagaaaaaagatagaagcaaccacctccaccacgccctagatgctataatcatcgcttatgtgaatgatagcgtgataaaggcttttagcgactttaagaaaacacaagagcaaaacaaagctcacttaatcgccaaagagatagaatcagccgagtataaaatctcacgcagatttttcgcaccgagtggctttgaaaacaatgaggcgtttcgtcaggctataaagcgtaagattttgggacaatctcgtgaatctagagagaatgatatgtcaataaatagcgaggctatgggcgaaaaagtaggtggaatctttgttagcaaaccaccgagaaaacgcgcaagaggtgctttacataaagagacttttaagtcgccttatgatgaaaaagtttataaagattttatagacaacaagaaactaaaagaattagagaagttaaaacaagataaaccaaaagaatttttagagtttatcgaaacagctgtgaatcgcgccataaagctaggcaaagtccgccaaatcggtagcaaaatcgccgataatggcacaatggtgcgcgtggatatttttcgccataaagtaagtggcaaattttatggtgtgccaatttatacgatggatttcgcacttgggattttgccaaacaaagccgtagtgggtggcaaagacaaatctggcgtgataaaagattggctagaaatggactcaaattatgaattttgttttagcctttttaaagatgatttgattttggtgcaaaagaaagagatgagcaaggcggagttgtgctattttatgggttttggcattgcgacagcttccattagtgtcgaaaaacacgacaatcattttgatacactcacagaaaatcaaaagctactttttagcaatgccacaccaaaagaggtaaaagggttaagcataggtatccaaaatctaaaagtctttgaaaaatggcaggtttcgccacttggcgaggtaagcaaggcaggattcaaagagcgagagcctatcgcacttaaatccacaccgaaaagattcttgcaaggatagccaaaatgtttgattcgcattttcgcacgctatttataagtagtccagcgcatttgcgactagaatccaagcgactaatcatagagcgcaaagaatctactactatcccccacaaagccctagcacacaaagaagcaaaagatagcgataacttgagtgatatatactccccttacaaaagcgacagaaaagatagtgtggctataccgctagctgatattgcctatatcatactagaatccccgcgcataacccttagctctgccctgctagacgcactctccacgcacaaagtcgcacttatatcgtgcgatagctcgcacttgcctagcgggatttttacgccgtttttggggcactatcgttcgctagccgtgcttgagtctcaaatcgcgttaaaaaagcagacaaaaagcattatttggcagcaaatcataaaatccaaaattaccaatcaatgctccgccctaaagctagccaagccaaatgagataaaagcgatagattctctccaaagcctagccaaatctgtccagctaggagactctacctataatgaagcaaaagctgcggcaatctacttcaaagcactttttgggaatagcttcatacgaatgcgtgatataaatagccaaataaacgcaatcaatgagctagagacacaagcccaagtggctggcgatagcacagcagatatagcagacacaaaagatagtgcgccaaatgctatcataaactccgcgctgaactatggctatgccatagtgagggcggctatcgtgcgcactctatctagtagcgggctaaacccagcacttgggctatcccacaccaatgtgtttaatccatttaatctagctgatgacattatcgagccatttcgtgcgtttgtggactctctagtggtggaaatgctctcatcaggcgagtttttgcaatctagcgagctatctctacaaaaccgcacaaagctagtccaaatcctaagcacgcaggtgtgtatgctctgcactgcccccgctacacaagcgcacaccacacatacccaaaatctctcaaacgccacaaacaaaggcaagctctacccgcttatgcgtggtgtcatcatctgcgtgcaaagcctagtaaagctcatagaatcaaacggcgacataagcgggctagggtttgatttgcctgtatttatggaggatatttcaaatggaagagaagtttatgagggtgctagtgatgtttgatatgccaacttctaccaaagaggacagaaaggcaagcgcgaaatttcgcaaagacttaatcaaagaggggtttatgatgttgcagtttagcgtgtatatgcgcatctgcaaaggcgtagcaagcgcaaacaatcatattgataggctatatctctacctcccgcgcaaagggcatatccgcgctttgatacttacagagaagcagtttgataatatgcgacttctgctagggcaaaaaagtgagtgcgagaaagcaaacgccccaagacagctgactttgttttaggggattttgcttttttgtggattttgtgcgtttgttttgcgtttgttttgcgctttgggtggtgggctaggggaggcttaggcttattgtttggacttaaagtttgtgtgattttgcgctaaaaatgtgtggatttattgcattatttaagaaaatttggcatatttatcgtttctaaattttattcatagaaaggacacacaatggaaaagattggaatcttttatggaagcgatggcggaaacgctaaaggcgtagcagagaaagtatctagcgcactaggaaatgccgagctaatcgatgtggcaaacgcaagcaaagaccaacttgcagggttcaaaaaccttgtgcttgtaacccctacttatggcagtggcgacttgcaaagcgattgggacgattttttgggctcgcttagcgatggcgatttctcaggcaaaactatcgggcttgtaggacttggcgaccaagacacttatagcgacactttcgctgatggtatctctcatatctatgcaaaagcaaaagcaggcaaaatcgtaggacaaacttccacagagggctatgagtttagcgactctcaagcggtagtagatggcaagtttgtaggacttatcatcgatgaggacaatcaagacgataagacagatagcagaatctcatcttgggtagattctatcaaaggtagctttgcgtaagaatcttcgcctctaaatactttgtaaatgcctccaaatcatttgtgcttctagcttagggcagggtgcgggtttggaggctttttatttttaaacttgctttagtttggctttttgcttctgctaaaaacttttttactatttttttactactttttttgtttttctctcattttaagattttgcttttttgcagattttgtgctacactttgggaatatattttgcttaaaatccttaatttacttcccaaaaggattttcctatgagccctatcagtagtatttctagcacaagcaggacagatacttccgcgctagccgagctttttgcaagtcgctatgccccacagagtgctaccctgccacaaaccccagcgcaaaatatcacccaagacataagccaagcccaaaaccacctagacacaagtggtgcaactactcctgctagagattctgccaaaacaaacacgcagcaataccctcaaaccacccaagatagcaagactgatagcaaaatcccttacaacagcgcggaaaaagacacattgccaactttgcaagactttatccacgaccctacaaatgagcaaaactccgcgctaaatctagtaagtcaaatcaaccaaatatccaacataaaccaagtaagcgatacccaaaacaccgctcaaacacaacaaggtgtgcaatccataagccgacttgaagatacatttaccccatcagatgaacttagcgcggctatgagggcaaaatcgtatttcaaaaacgcacttattgatgctgatagcttcaaggctatggctcgccagcttcacaatgacggcgtaatcaaccgcgatgaaatgatgatggtggattttttgagtgaaaaatcgccaaatatatcgcttaaggattttgactctatgataaaaaacgacaatcttagtcgtgagatgcgcgggcttatcgcacagcttgtgcaaaaaatccatttgatgaattacctaagtggtggtgcacttgcctaatagggctaaaatagctcataaacgcgcttggctaggcaaatctacttaaacaaaatctagcaaacgtccccaatctagcacaaagattgcccaaatctttataaataccgcaaaccacaatgataccaaagacactatcaaagcaatgggtggatttcctagatgatgagttttcgcaaaaatattttggcgatatagtagcccactacaaaaacgcactaaaatccaaccaaaccattttcccaccaaatcatcttatttttaatgctttcaatctaactcccccacaaaatgtcaaaatcgtaattctagggcaagacccatatcacgggagtgtgtttatcactgatagcaagggagtgaagcgcgaagtgccacaagctatgggactaagctttagcgtgccactaggtgtgcctatcccacctagcttaaaaaacatttacaaagagctacaaatctcacttggatttgtcccaccaagacacggggatttgagtgcttgggctcaaagaggtgtgctacttctaaatgcgattttttctgtgcaaaaaggcatagcaggctcgcataaacactttgggtgggaagcatttagcgatagtgtgataaaaaaactatccagcaaaaaagaggggcttatctttatgttatggggcaactacgcaaaacgcaaagcaaccctcatagattctagcaagcacattatcttgcaagctgcccatcctagccccctagcgcaaggttttgtaggcagtggagtgtttgcaaaggcaaatgccgcgcttatagaaatgggcaaggaagcatttgattggagtttgccacccttaggctaatccctgctaatgtgctagaatcgatttttgtagcgtataaaaggtataaaatgaagcatattttgtttgcgttattttttctttgtgggtgcaaaagcgtggatttgcagggtgtggatttgcacagcgagggcttgctaggacaacggtctattccccaaaaactagccgattcgcccaaagatagcattatcaaagtccttgatgaaaatgggaaaattcgctgttatatgcctgatgtgcggagtgtgtatgtcgtcattggcacttgtcgcacgagctgggcaaaacccgctaggtatgatgtctttgggcgaatcgcttataatgtagaggatacttggctttgcctaagcgcacccgaatcagtggcgcaaacaaagcgtaaaagtaaggactacctaacgctaaagccctgcgtaataaacgataaaaaacagcggtggaagctcaaagatgatttgttctactcacttgatgaaagctatgtgataaaagatgatagcgcgtatctatatgcggcaagcgtgcgtgatacaagcctaaagctaagcaagattcacacttcaatgagcgagtggctaagcaccattgcgcgtcctgcaaatcttagcattctaacttccctagcgtgggattacaccacgagagagggcgcacagcgatattttctctacaataacggctcgggtagaaacaccacggatttgtattataacttagagagcggacatattgcgcaatatgacggctacaaggggctaaactgcctttatgcggatttgggcggggcgcagtggagctgggcttggtggggcaaatgcacggacgcaaaagctcctagtaaaaatcgcgcttattggcgatttatccgcgttagcgaggctgaatctgtcctattaaactttcaaggtgctgcgttgcgcgtaactagcacgggcattcattggggagtgccatacattgtcgcacccaaatatctgctaaaagatagttcaaactaccctacttcgcgcttcatcatcgacaaagatacgcaggattggcttagatttatctacgcaaatatcggggataatctgcccttttgcccagccccctcaaataaaacgacaaaaagcgcaaacacagaacaaaatccacccaaaaatcagcttaaaaatcaagctccccataaaaatccgcaaaacacacattccccacaaaatctaaaaaaccctcctaatgattttgtcataaacaattcttggcttgctaggcttttggcgattatccacacgagcgatagtggggagagtagcgtaggtgtgtgcggtatatgcttgttacaatcttttcaaatcatcgctgaaattttggaaaatccattatccccacgcacaaatggaggatatttttttgatacgcaaaacggagcaaacccttttacctcatttgagttacgcaattcattgctttatcatacgctagatgacattgtccgctggtttcctgcttatgtggagagccctactatcacagagcaaatgaggtttgactacaataacaacctagccctaatgagcgcaatcgcacttttgccacaatatgattgggcaatcaccacccgcgcacaagggcggagcgatattcctcgtgtgatagattctatatttggctcggcttatggaagtgcatttgtagtgctacttcgtatgcagagtgcacagcaagagggaggacacgctatggtggctatgaggacaagtgctggtgtggtgcttatccccacaaatgcgccaatgagtgcggaggaacttcgcatttttactacgcctttgcgcgatagaggcgagtttttgactagatttagtgagtatggctttagtatcacaaatatcgcgctacttggcgtgcgcggattgctagcaaatccatttgctagcaatatctcgcttggcaactgcacgggcgagggcgaaaatagacgcggtagtggcacaactcctacaagtgcacttgtaaatcaatgcgctagcgggcgatgcttggagtagttggatttcatagccctcctcatttttgcccttaggctttttgggattttgcaccacttttgcattagacttatttttctaagcacaagcgcgattcttacaaaatgctttttgtttgccaaaaaaaatgcaagcaaaatttagtataattgcgcggtttgtgaagcatagccaaaaggcaaaatcatagaatctttcccttgcttttgcgtgattttatctatcaggtgtgaaatgttgcaaatttttagcgattttaaaagcccaaaagactttttacaagagccttacaagtgcgcattgcaaggcgattttagcgcgcaaaatctgcttatttttgatgataatctaaacgctatgcagtttttaatccaagaaaagggctacaaaaacgcgctagatttaatctacatagacccgccatttgcgacaaacaatacctttagaatgggcagcaccataagcgcgtctctaagcgcaaatattgcttatgatgataagtttagtctagaatcttacttggagtttttgtattatcgccttgtgctaatgcgtgagatgatgagccaaaagggtagcatttatgtgcatacagatagcaaggtggggcattatgtcaaaattttgcttgatgaagtctttggcagggagcattttataaacgacattacgcgcataaagtgcaatcctaaaaatttcgcaaaaaagggctatggcaatctcaaagatagcattttgttttatagcaagagcggggaatttatctggaatgagataagtcaaaaggtgcgtgaggaggacttagccaagcgatttagcaaacgcgatgaaaaaggcacatacaccactatcccgcttcacgcaccgggggaaaccaaaaacggagagagcgggcaagaatggaatgggctaaaaccaccgcaaggcaggcattggcgttgcactctgcgtgagctagatagactgcaaaatgagggactaatcgagtggagcaaaaacggcaatccgcgcaaaaaaatctacgccaaagactacaaaagcaaaaaaatccaagacatttgggaatttaaagacgcacaaaaagtatcctaccccacgcagaaaaacaccgcgcttttgcgccaaatcatcgcaatgtcttcaaatgcagattcgcttgttatggattgcttttgtggcagtggtggatttttgcgcgaggcatttggcttaggccgcaagtttatcggcatagattctagcaaggaggcaatcaaagttagcaaagagtggttgcaaaaatgcaaggaatcccaaaaatgcgcgtgtgcaatctgtgagagaagccaaaaatccttatctccaaaatccacacacaaaatccccgccgtgtgaatctagagcaaaaatcaaatttggcacactctaagcacaagcgcgattctcacaaaatgctttttgtttgcaaaaataaatgcaaacaaaatttagtataattgcgcgaaatattagccataaggacacaaatgactttagcttcgcaaaaatgctacacagattctacaagccaatctagcagtttgcaaaatttccctttgtttttgctaggcgatgcaaaagatacgctaaaaaccctgcaaccactaagcattgattttgtgctgacttcgcctccttatgatgatttgcgtgattatgaggggtttagctttgattttgaagctattgctagcgagctatttcgcgtgctaaaaaatggcggggtaatggtgtggattgtgggggattctgtggtaaatggcagtgagagcttgagtagctttaggcaggcactgcatttcaaagatataggatttagaatccacgatacgatgatttatcaaaaaaacaatttttcaaaccctagcaagacgcgctatcatcaggtgtttgagtatatgtttgtcctctcaaaaggcacgccaaagacattcaatccacttatggataggaaaaatgtctatgctgggcatacgacatttggcgaaaataccacgcgcaaaaaagacggcaacttcacaaagcaaaaaaagcgcgtaatttcagaatttggtatgcgttataacatttggaaaggcaacacttcagggcaggaaaatatgtgcaaatccataaagcaccccgcgacttttccgctgtggctagcacgcgaccatttgcactcgtggagcaaccaaaatgacattgtcctagaccctttttgtggctctggcacgacaggtgtagcctgcaaggagctagggcgcaacttcatcggctgcgagatagaatcaagctacctagatttcgcaaaagagcggataaaaaatacgagggtagaaaatggattattctaaacaatctatcaatgagagttatgccaaacttggcacgattagcaagctaaacaacaaacgatttccatttagagaagtgataaaaaacatagaaaagcgtgaggttttagaatttaaaaacgctagattgctaggcttgctaaaaagtgcgtgcaaaaacaccataacgcctgtgaataatatcgagtttagcgggcgtccaaatgagtttggcaatatcgtggcaaatctttttgccatagagtgcaaaggcgtagggctagactaccaaaagccaaaagacacgcagggcaagggcaaagaaagtggctatcctgatgggttagtcgtgtttgaaaatcaatatttttacaccgagctaaagacttgcgagcaaagcaagcaaaatcaaacattgcgttcatttttttactccccctccacacattctaaaatcctctatgatgcttcccatctagtcatttgctttttgacatacaaaaatggaagcgcgttgctactaaatggcgaatttcacatagtgtatatgtatgaaaaagaagtgaaactaaagctagaatacaatatcaacaacaaagaactatacggtggcaagttgctataaacctagcgtgagaaagaacaccaaatgctagccctcatcatttttgcccttacgctttttgggattttgcgcactccttttgggcttggcatttgggtgtattctagctttggtgcgctcgctacgcttacacttgggctagtggagatgagcgacttgggcgtgattttcgcgcttatttgggatagtgcgcttaccctcattgcgcttattgtcattagcttttgcttgcaggggcttgggttttttgagtggctgattttttatgtgctaaagttttgcgcgacttctcgctattctccccacgccacaaatcccgaatctagagcgcatttagccacgactttgtgcataaacacgcgcaaagcatttgtcgcactcattttgcttagcgcaattttgagcgcggtgctagcaaatgatggcgcggtgcttgttttgacgccattggtgcttgggctgtttttgcgtgccaaaaacgcgacttcgctacaaatcatcgcatttttgttcgccaccgcctttgtgtgcgacattagctcaaacccgctcatcatctcaaacctcacaaatatcatcaccgcgcacttccacacgcttagctttgcggaatttgcccacacaatgcttctgccaaatctttttggtatttttggtgcgctaatgctctttttggtgttttttcacactccgcttcgcactccgcttatctttcgcacgccctcaaagccaaagctacaaaacgcgctttttgccctgcattgcgctactttagcggtttttatcgctagctttttcctctccacacattttgacttgcctctaagtctaaattgcgcactttatgcggggattttgcttatcacactatggcgcaagtcgcgccaaaaagccatagctacgatgaaacgcgcaccttttggcattatc

SEQ ID NO: 3823 - DNA, 19675 bp, synthetic construct
  misc_feature 1..19675: note = Synthetic
  source 1..19675: mol_type = other DNA
tcttgagagaaatttgtatctttttgtggatagaagtttaaatttttcatctcttttgcagaaaaattaagttcatatattcttagatttaaatcaatgctttgtaattgagagcttaaaactttagcttccctaaaagtctctttattataaagattagtaactttaaaatgatcccaacttctcatggtgctaaatgcttttagtatctcaagatcttctatcccaggctcatttgccatatatcttttatcactaaaacccttgggtagtttttcaatttcctctgtagaataagattctttgatttctggcataatttgtgtaaagacattatagtattggttaagagtgttggctatatctatatgtttgaatacttcttcattggttaaattagggtcgaacaatccagtagccaatcctccataattccttgtcccaattctaataatttcctctaaggtgcttttatgcaatttaaacccacttggaagttccgcagcagcattaaaatcctctcctagataaccttgcttatctacactataaccataaaactcattttgtatccttacctcttgtatttgggatttgtttgtcttagcatttcttatgagtaattcatcttttaataactctgctactatatctgtctttttgtgttctatagtagttagattgttaggtatatattggataaagtcggatagggaatgcttcaccataagatttttagtatccacagaatgtgaagtatctaaaacttcttgtgtggtaacattgggctttagaatctcttgagatttcccattagtagcttgatttatagcactagggctaaagctataaacattatgacttgaaactttcattctatcctcctaatattaatactgggctttaaattgccttaatacttcctgtgcattgcgataatgttgccaaaattcataagttttaccactaggagtagcataagttaaataatattgtttatacccattcatatatctatattgtgccacaattaagccattgaagccaaattctctagccacactatagggattacctgaatcatcacgcacaagatacgcatacgatctaccatatccataataatcatatcttgaatccctagtaaatccatatcccccaacaactctcccctcctcctctacactcaaaagtctcacacccttatcataatcacttaaggcaccattagtaacctttgctaaaaaatcctctgcaaaagcaaccatagaaaggaagcttagaatagccattacattgaaaagttttttcattttgaatctcctttgaaattattaagattgaatctcactatagtggaaccaatcttaaaaagctcttttctttgagtttattatgttaaaagtctttatgttgttaccttttgttaagggttatttttaaaattttttccataggctgaagccaaaaatcgcatcaggtgcagcagaacttcccccaaagttaccactaacagaaatcgctgttgtagcgtttatgctataggtggaacctaaagaaagggtgggaatagaacgcaattccgaactttgattttcattaatcttcctctctgtttggaatctttgttctactcctaaatctaaagtgatttttgggcttaagataatagagagattcccaccgatataaatgctattcccataatcaatcttgcccattttaaactttctaccttgattatatccaactcctgcataggcagaatacactacagggtcgctatatcctcttagagccatctctaaattttgggattttaaatagaaattttttgtgtgttctatggctgtttctctctgtattactgcactttgaaatttaacttgtggcacaaaatctgcaacactatcaaaagtataaattaatccaagccatagggaatcaaagcttaaattattttcgtttgaaaaattgctattgaaagcatttgtgtattctttccttgcgtaacttcctccaccagatattaaaacatcaaattttggtgtcaaggtgtaaataaaggtttgattgagggagatttgcttagtatctttccatatcgttgtatctccttggattgaaagggtgggatagagggcataggaatttgcattgcctgtgctaagcaaagaaaagtttgtaatgctccttaatcctaattgttttttgaaaagattatcaatgtttaattcatcacttgccaaaagatagctagatattgctaaaagtataagaaagatctttttcattatcgcccctttgaagtattgtagaaattataagcaaagggtgttccatttattttcttgtaacaaaaaataaacaagcctataagaagaatcttaaggcttttaagaaaaatttttattttaatactttttaagttagtgcatattagagtttgaagcctaacaaaatatttttaaagaagattcaatgaaaaaagtgtttttaactgcagtttttgctttaggatttattggtgtagccaatgttaatgaagctgtggaaagaatgcaacaagatagaatcgcacctattgtagcttgggggataaagtaaggtgtaatgtgggggattagatatactattgggtgcttttaatgaaagacatccaattaatagtggagttggaatacacggttggcgttggtaatgttagaaagccttattggtagccttatagaatcctttatgctatgcaaaaataaagattatttgtgtttgtttgtattagtggtgatagcttttatgctctttatagttttttcttatttgtatggggatttttagaatttataagggtttatcataaggcttgttgtaatatgaaaataatattgtgcagggaatctaagcaattgtttgtcatagcgtagaaatagataaaaagtaataggcttgatgctaaatatattctataaattgagcaatgcaattattttaagtagcctaaattcgtcttgtgccttttttaacataggtggaagcccaaaaattaggattagattagtatttaagcggtatgaagtgttagatagcttattgtttatgcattggcttctttataattataagggcttattttttataagcataatacaaaaaggctcccattcctacgataaagacaaaagttagaaaaatcaccaaaacaatatctaagctactcattttgtctataccttgacttctatttgctcttgcactttttctctaagttgcccacaagcagcacttatatctaagcctttggattctctaatggtgcataaaagtcccttttggaggagatattctctaaaggcttctactttttctttgctgggtcttttataggggcttccttgatgaggattgaaataaatgagattgaccttagccttgattttattaagcaaggctacgagctttttcgcactttttaaatcatcattgagactatcaattatgaggtattcaaacattatgcgttttctgctatcaagagggaagtttgagatttcttgaatgatagattggatattataggctttattgataggcataagctctgtgcgtaaatcatcatcaacagcgtgtaaagaaattgcaagttggattcctagattgagagcccctaattttttgatttttggtgcgattccgctagtagagagagtttgacgacgcggtgagatatttaagccatcaagctcggataatattcggatacattttgcagtattttctaaattatctaaaggttcccccatacccatataaacaatattaatagccttgttgggtggaatgttttggtcttttttgatagcaaaaacttgataaaccatttctcctgcttctaggttacggacaaatcctcctttagcagtgagacaaaagctacagcccactttgcaaccaatttgtgaggaaagacaaagcgtaaatttatcctctttcattcttattagcaccgattcatagctatgattatcataggttttaaagaggtatttgatgctcccatctttactttcttccttttttaataaggctgtagatgtgcttgtatagttttgtgctagaaactctcttaagtctttgggtagattaaccatattttcaaagtggctttcataatgcacatagagccagtggtaaatttgtttggctctaaatgcgggaaaatgctctttgagggattttgcaagttcttctaaagtgtagttaaaaatatagagtttatccattttgtctgtctttaacataggattctatttttttcacggctattttatgattagccagaaattcttgatgcgattctttatgaatgtgattagtagagcaaaatattccaagggcgggtaaattaaaatactttgctacctgtaagatgctaaaaaactccatattttcataagcaattccaaattttagtagattttttgttagctgattatctgtgctaatgtagttgctagagttgatgattttatggggggttgattgtgatagtgtttcatgtgaaacactttctagggtaatgcagttgtctaaaggcgtataagattgttgttgcaaaaaggatagttcgatgttactagcacttttagattcaaaaacctctaaaaggcttttagaatcatcataacaaccacaagttccaataaaaataatttcattaggtttatccttataaatagaataagttagctgaatgctactttgtattaatcctatgccaatgggttttgcaaatgagaaagtctctatatctcccgcacaataaaacataatttttccttaatttggtttttgaatctctttataataaagagaagattcttcttttttaatagttttttgggaggggatttgcaacacttcaaaaaatcttgatttttctagataggcaatttcaataatatctccaactttcacattgcgacttgctttaacagggattccagctatttttataactttattgtctatcatatcttgagcaatggtgcgtcgttttgttatatttaccgcattgaggaatttgtcaatccgcatctatctccttgtttttgtataattgtagccaaaagaatattaatttatcgttcgtgatataattatgaaaacttttaaggagtgaaaatgaagcaatcggttaataaagtagttcttgcttatagtggcggacttgatacgagtgtgattttaaaatggcttggggataattatcattgtgaggtggtaacctttactgctgatattggacaaggtgaagaagtagaacccgcaagagcaaaggcagagaagctaggaatcaagagcgaaaatatctttattgaggatttgagagaagagtttattagggattttgtattccctatgtttcgagcaaatactatttatgagggtgaatatctcttagggacaagcattgcgcgtccattgatagctaagagattggtagaaatcgctacaaaagtaggagcggatgctattgcacacggagcgacaggcaagggaaatgatcaagtgcgttttgaggttggggcttatgctttgaagccagatattaagattatcgctccttggagagaatgggatttaaatagtcgtgagaaattacttgcttatgcggaatctgcagggattcctatagaaaagaaacaaaatcaatccccatattcaatggacgcaaatttattgcatattagttatgaggggcaaatcttagaagatcctaatgtcgcacctaatgaagatatgtggcgttggagtgtttcaccaaaagatgcacccgataccccaactattattactattagctttaaaaatggcgatggagtagcaattaacggagaggttttaagtccggcaaacttttgggctaaactcaatgaattgggcgggaataatggtatagggaggttagatttagtcgaaaatcgctatgtaggtatgaagtctagaggttgttatgagacgccgggagggactatttaccttaaagcacatcgtgctatggaatccctttgtcttgatagagaagaagcacatttgaaagatgaaataatgccaaaatatgcaagtttgatttataatggatattggtttagcccagagagagaggctttacaagcattgattgataaaacacaacaaaaggtagagggggaagtgcgattagagctttataaggggaatgtaactattcttggcaggaaatctaagcaatcactttttaatacggcttatagcacttttgaagaggattctgtctataaccaaaaggatgcggcagggtttataaagcttaatgctttgcggtttataatagcgggcaaagcaagggaataaattcacttttattgatttttgtaaggattgttgatatttagggttagagtaggtttaataggaaaatgaagagttattattaatggtatttattgtattattgatgaatttagtttaaaaggaggtttgcaggtgaaaattttaagttttgacataggcattacaagtattggttgggcttatgtagagggagagaagctaaaagattgtggggtgagaatctttaccaaagcggagaatccacaaaatggtgattcgcttgccgcaccacgcagagaagcacgaggggttagacggagattagcacggagaaaagttaggcttaatgcaattaaaagattgctttgtaaagaatttgggctaaatttaagcgattattttgcaaatgatggggaattaccaaaggcatatgagacaaccaaagataccaaaagcccctatgaattacgcactttagccttaagccaaaagctagaggttaaggatttagcaagagtgattttgcatatcgctaaacatcgtggctatgggaataaacacgctaaaagtgatttgacaaaagagaataaaattaaagaagaaataaaagaagaacaagaaaaacaaaaagttgcgctaaaaaccacgcaagacaagaatctgctgcaacaaagggagattctaaaaaaagagcaagagctcgtactaaaggcactttatcgtaatgaagcagcacttgaatcgtgtaaagtttcggataagtattctgtgggtaagtatttctatgaatcatttgaaaaaagggggcaaagaatccgtaatacaaccaacaattatcagcacacaatgcgacaagaatggttaaaagatgagctagagtttatttttaaaaagcaaaaagactttggggcaacttttagcaaaaattttgaatcccaaatcatagaaacagccttttaccaaagagatttaaaaagttttgaagataaagtcggtaaatgtgtattttatgaaaatgaaaatcgcgcacccaaagattccttaagtgctatggagtttgttgctctcacacgcattatcaacaccctaaaaaaccttgagaaaaaaagtaagaatcttggcattggtgaaacctatggaaaagataagattcaagagattctaaaaaatgtgtttgataaaggcgagatgagttataaagaattgcgaaaaatccttaaacttaatgagtcaattttatttgctaaagattctaagcttgattataccaaaggaatgcaagaagctgaaaaggcaaagtttattgagctaaaaaatcttaaagctttcaaaaaagcaatgggtggagactttagcaagtttcctcgtgaggagctagataaaatcgctaccgatattaccctcattaaaagcaaagaaaatttagctaaaaaattgcaaaactattccgcattaagcaaggagcaagtagaagccttaagcaatttgaattttgcaaagcatattgatttaagccttaaagcacttgataagattctacgctttatgcgtgaggggttgagctatgatgaggcggtgaaaaaggcaggattgcaagagcatagaaagcataagcaaaagggcgagtttttaatcccgctaaaagactatgaaccctatttggcaaatccagtcgttgcaagagcattaagcgagtatcgcaaggtgctaaatgcacttttaagaaaatatggaaatgtgcataagattcatttagaatttacgcgtgaggcaaaactaagcgcaaaagagaggcaaaagtatgaaaaagaacaaaaagagcattttgaggcaaatcaaaaagcgaaaaaacaatgtgagattctaggattacccattaatggcgcaaatattcttaagatgaagctttggatagagcaaggggaatgttgcgtttatagtggagagaaaatcacaagggagcatttttttgattctaatgccttgcaagtggatcatatttacccctactcacgcagttttgatgatagctatatgaataaggtgcttgtgtttgctaaagaaaatcaaaataagcttaataaaacgccttttgaagcctttggaaataataaagagaagtgggataggattcttagccttagtgcaaaccttcctaaacaaaagcaacgtagaatcagcaataaggactttaaagataaagaacttggctttattgcacgcaacatcaatgatacaggctatattgcaaggttagcaagtcaatggacgaataattgcctaaagtttgaaaatctaagtgaaaatgaagtaacgattgcaggagaaaagggcagcagtgtacatatagaggtggtaagcggacagcttacatcaatgcttaggcattattggggcttgggcgataaagacagaaataatcacctccaccacgcagtcgatgcaatcatcttagcttacacgaatgcaaagaccaaaaatgcgtttgcaaattttaagaaaacgcaagaacaaaataagaaaaaattctatgctaagcaaatttcagaatctgaatacaaagttaaaaaagcattctttgagccttgcaaggattttagaagcaaggtgctagaaaaaatagattctatttttgtctccaagcctcctagaaaaagggctagaggggcgttgcacgaggagacattctattcttttgaggacgaaaaactcttaaaaagctatggtgggaaacagggtatagaaaaggcgattagtctaggaaaaatccgccaagtaggcacaaagattgtgaataatggtgcaatggtgcgcgtagatatttttatggataaaaaaggtaaattctatgctgtgccaatttatacaatggattttgcacttggaatcctgccaaataaagcggtagtgcaaggcaaaagcaaagaagatggggtgattaaagattggatagaaatggattctaactatacattctgcttctcactttttaaagatgatttaatcttggtgcagaaaaaagaaatggaaaaggcggagttgtgctattttgtaagttttggctctgccaatgcacaaattaatgtagaaaaacataacaataaatttgagggtttgagcgagaatgaaaagattctctattctaatgctacacaaaagaaggtagagggcaaaagtataggaatccaaaatcttaaaacctttgaaaaataccaagtctcacctttgggtgaagtccaaaaagcagagtttgaatcccgccaaaatattacactcaaaagcaatcctaaaagaaaaaattaagcgataagaatctaaaggagggcaaggagtgtttgatgccgcatttcgcaccttatttttaagcacacccgcgagattaaacttagaagataagcatctttgtatagcacaaaaagacaaagaaagtgtaaagattccacttgtagatattttgtgcgtgatgctagaatctcatcaaatcatgcttacaaatgcactcttaaatgcgtttgctctgcataaaattgttgtttttacctgcgatgaatcccacctaccaagtgggctatttatgccatttttagggcattttagaagttttagcgtgttgcaatgccaaattaacttaagcaaacaaagaaaggcgattctgtggcagcaaatcatcaaggcaaaaattcacaaccaagcccttttactaaaaatgctgcataaaaaagaaagtgaggaattagaaactttagctaaaagtgtgaatttaggagattcaagcaataacgaagctaaagccgcagcaatttatttcaaagctctttttggtaaaaacttctcccgcaaagtgcaaatttttgaagagagtaaaatgggaacgataaatgctgcactcaattatgcttatgcaattatacgaggagtgattacaagaagcctttgtgtgagcggactaaatcctgcacttgggataaatcataaaaatcagtttaatgcttttaatctagcagatgatttgatggaaccttatagaatctttgcagattctgttgtcgtgcagatggttgaagttggggaattagaggagagcttaagtttgcaaaatcgtgtgaagctggtaagtattttgcagagtgcggttatcgtagaaaataagctttatccacttactcgtgcaggcgttgtgagtgcgcaaagtgtagtgaaatgccttgagagagaaaatcttaagcttaaactgccgctattttgcgaggaaaagagtaatggaagagaaatttatgagagtgttagtgatgtttgatatgccaacttgcagtaaaaaagagcgtaaagattatgcgagatttcgtaagaatcttatcaaagatggctttatgatgctgcaatatagcgtgtatatgagaatctgcaaaggtgtggcaagtgctaataattatttggataaggtgggtttgattgtgcctcccaaagggcatattagggcattaatccttactgaaaagcaatttgataatatgcgattattgctaggcagtagaagtgagaatgaaaaagctaatgcgccaagacagcttacgcttttttagtctattgtcaagttataaggacaaagtttctaaagatttaatggctaaaatgtttgaaaatacttattggtaaaaagatttaaagtagattcggttttaagggattgtaaccctgcggagaccgaaaactccttattttagccgcttgttaaattctttagtgggattatatcttagattttcttaaaaatcactcatttaggatattttacacccttaaagcctttcaaataccgcaaaatacgataattgagaaagtgtattttaccataaaagaatttaataagcggctaaaaccttttaaggcataatagcattgtatgaaatattttaccataaaagaatttaataagcggctaaaacataaaatcctccacaaagtctatgcaaaaaattttaccataaaagaatttaataagcggctaaaacatgcctaataagattatcagaaacccaagaattttaccataaaagaatttaataagcggctaaaacaacgaaagagcgaccaatgccctgagaagtattttaccataaaagaatttaataagcggctaaaacaagacaccaaataccaaaaggactcccaagattttaccataaaagaatttaataagcggctaaaactagaaaaatacgagtttgctataccttgtcattttaccataaaagaatttaataagcggctaaaactcaacaataccaggtttcattaatttattaattttaccataaaagaatttaataagcggctaaaacccaatggtggaagtggtggaagtggtggaaattttaccataaaagaatttaataagcggctaaaacatccctctttaatatctctttgtcataattattttaccataaaagaatttaataagcggctaaaacacaatttagaattttcaatgatgccaggtgattttaccataaaagaatttaataagcggctaaaactgtatatttcctctttcaaaatcgtaagttattttaccataaaagaatttaataagcggctaaaacattatgccaacaattaatcaacaactaacaattttaccataaaagaatttaataagcggctaaaacatatcgtgttgtagtattttttccactgtgggttaaagagctagaaagagtatttgattgcagagagaacagggaaagcgttgaaagtactatatattttaaaaaattaaaaattaaaaaatttattttcttctgacaactcaagaattatgtgtcctctatctttataatcagaataaaatgtttctattttatcataaatgattggaacaataaattgcccattgattttatttgaaatatcaaataatagctttaacttatccacatcaattaactctactttgtcatgagccacgaagtgcggaaaattaagattgattttatcaataaaatctaaatatgccaaatcaaaagcagatatggttgcttgttttttaccgctcccctcattaccttttatgtttttaatagaaaatttgattggattctcttctggattgtatgaaacaaaaaatctatcatcatataatagttttgaatattcactaaatgattcattgaataaacctaatgtattattaaaattatgtaaattttcatttatttcatttgtaagttctaacattttattattcatagtatttatttcttcttctattttcctcagctcgtctaacaatttttcatctcgtcctctttcttctaccattttttctatttgttcgtttaatttagtatattctgccaaagaacctgtttttgaaagcctttccataagtgcagaatattgcatggacagctcatttctttgtggaatcagttccgatataactttatcaagataaactattttattttctatataatccatttcattttgaatcatttgattgtgaaaacccactacttctttaaagcttttatttattgtatcagaataaaattttgcttcttcataaagtaattttaatgcttgagtatcatcgttaaaagttcttttctccaactcttgcaaattattcatattaatatttttcttaaactttaaatcagagatttctttttctattttcataagctccaattgaatatctgttagttgtttttcttctatttcatatttttcatcaatcttaaactcttctctctgtcgatataaattttctaattctttatttgcgatttccagtatttgctttaaatctattacattgaatcttgagcccaaagcttgtttaactttttctttttgttttaactctagctctatattacttttagaatgtagaagcattgcattagggaagccaaaaagaaataagtgtattttttcatatgtaatgtctgaggttgtcggatgtaaaaactttaatacattattgagctgataatcatcctttcggataaattttggtattaattgcctaaaagatggtttttctacatcactattaaaaaatatttctttcagttttaaatgaaagtctttgctttcaaccaacttgttgtcatcaataaaaattgcatcttctgtttttaatttaccatcattaattatttttctgacgattttatattctttttctgaatgttgttttttaagacaaatttggaatgtgggttgttgttgttctaaaaaattcaaaattcctttgttagaagttttaaattccttgtctttatataactgttcaattttaccacccaaacaaaaatctatacatctaattaatgttgttttacctatattgtttgttgtaccatttttgctttttataccaacaataagatttagccctctagcattaaatcttacttctcgtattatatcattcgaattatttttaatggttagactatctaagaacatttctagatatatatcctttctctgttatatcaatagcattgattaaatacagccaatctaaaaccaatataaattttttaaattcaatgttttggtattttttaaatatttcatataattcaaataacgtatattctatattttctttttttaaaaattcaagtaattttccacccaaaaaatataaacttgttttaggatttctttctgtaataatcattaattatcgctttttggaggtttgtcaaatattttacattcagcaaaggcataaaaaacaacaaaatgaaccgcactaatgtcatctaacgttaatgaagaatatttttttaattcttgctctatctccttaattaataagtccaaaatggaatccccattcttttgtttggcataatgtttgatgtatttgcttttgatatatgctattagacgtttttcgaagattatatctccttcctcaactattagttttattttgcgtcttacattatcatagttttccatataatcgtcaaaaaaatatttatatttagatagtttgttatattctattttattttctatcttatatgctgctgtatcgggtttttcatactcaatgtcaatagggatattgtaaattccttttaagactttttcgattgacgaatcacatttttttgctgtaagtattgtagtgttagagtaatcatacaagtctctgccactcgttttattgtttgcaccttttatatttatggcaatatcttgactattgtttagtgataacattatttccaccagaggtaatattattattgccatctacagcaatattttgattgttaatactaagtttcttgtaaattttgataactttagttgcaactaaaatagctgttaaagctccacctatactgcataaaccagttattagtaaaaagtaatcattggtaactattgtatgtattaaatccaagtattttctccaataatatatatgtttaattttactgcaaaatataatattaatcaatattgttagaacatagagactttatctaaatttatacttaatttttccattttaaatcaaaccacttcgattttaaatggaaaaactttgatttaaaatggcgttttatataatttatagggagggagaattttgtatattacgagtatgagccgcgattaaatgaagaggagtttagtcgtgcaatcacatttgtaagcacactttcttccaccgcctattcctttccagttatttgtaggcgtctagctattttactctatccaccgagtgaatatgaaaaggagcttttgtgcacccaacaaacacaaccttaagatgttctaatgtagctatatagaaagatttgaatacaaaacttagttgctaaggctagaaagaatctacaaaagctatcaagcagtgaaatgccactagaatatgcgtaatttaggcaattaatgctataatacactttttgaagggataaaaaaatgagaaatatcatcgtgaaaagtttatcactttcttcgttgcaagaaaagggattgccccattttcatatatttgatattcgctcaactcaagcctttttgagtgctcatttacaaggttcattccacgcaaaagatgaaaagatattgatagaatatttgagaagcaaaaatgtctctaagcctctcctcatcgcctgctttagctctaaaaaatctaaaaccctagcccaaaatatcattcaaaatccaaattttatctcactttatcccttaaatacaatttactatttagattgtgggataatggaagcctttgaaaatggctttgagcctatctcaagcccacaaagtcctaaaaataaattttcactcattcaatctaccctagaggagctaaaaactaaatttctctcctcaaagcgcacttgggtcgttgcctttagcggtggtaaggattctacttgtgcgctgcagcttgtctatgaaatgctcgtctctttgcaaccacatcaaaggaggcagacttatgccattgcttcaaatactcttgtagaagccccacatattgatagatttttaaaagaagtaatccattctatcaattcccacgcaaagaaaaacaatatcccctttgaaatcttgcaagttagcccaagcttgaaagatgatttttgggtcaatctcattggtaaaggctatcctagcccgacaaggacttttaggtggtgcactgatagacttaaaatcactccagctaaagcagaagttgctaaaatcacacaaaaatatggctcggctcttttgatactaggttcaagaaaggcagaatcaagcaatcgcaaaaaatccatagaaaaacgcatcttaaacgaagagggttattcccaacatcacgacttccctgatacacttactttttcgcccattgtagagtggagcaccgatgaagtatgggcttatcttagcacacataagcctttgtgggataaagaccatagcgaattattttcactctatgccaaagcaagtggtgaggagtgtcagtttatcacagatttaagtcaaagcagttgtggtggctcaagatttggttgctgggtatgcacggtggtaaatgaggataaatcaatgcagggttttatagaatcggggcaagagaatctaaaacccctcaatgaatttagaaattacattaaagatttaagggaggattgcaatgcaagggcagattacaaacgcgatggcagagcagtgtataaggttggaggacttggaccctttttaagccatattcgtgtggagattctaaaaaggcttttacaaacagagcaagaatttatgcgaaatggtggcagtgagctaatcacagattcgcagattgatgcgatacaagagcagtggagcaaagaatttgattttgaaaacaaagcaatacaactagcacaggaggtaggacgaatgaaagatgaaaaattaaaacaaagcagagttttacataaggagcttttggcagaagtagcggacagggtggattctaaagagctagagaatctcattagcacttgcatagacatttataataccacaggtttaaggggcaaaaataatgcttcaagcaagataaaagaagagataaaaaagcttgtagaggataaaacgagcaaacaaaagcaggaggcataaatgtttatatcaaaaatcacaatttgcaatctttttgcctactatggaaaagtagaggtggaatttaaaaagtgtgaggaaaaaaacctttattgcatttatggcaataatggctttggtaagacgagctttatccgctgtgcaaagcttttgtttttaggggctggagtaatgaataatgaaatctctcctgttatttcaagatttgctccaaaaggcttaagctcctcacaatttattaggggaataggggagaaatggcttggcattctgaataaacctgcattgcagtctttacaagaagaattttatatcatttttgaaggcacttttgagggtaagagattccatattaagcgtagttttgaaaatatttatgaaagcattgaggaacatttaagctttagtcttgataatgaaagctttacgagcgaggaagctcaagagagaatcaacaagataatgcctccaaatctgattgaatttttcttttttgatggcgaggaattagaaaaaataagtgaaaatctacgcaagggatttagagaaaaaatagaggatattttgcaaatcaaaccacttgatatagcaataaaccaaattcaaaaatataaaactgaattaagagataatgaaaataaaaacaaagacaatgcctctttgcttgcacaaaagagaaaggacaaagaaagtaaggaaataggtatctcacatttaaaagataaaattaaagattgtgaaaaagagatagaggaaaagtctgatttgctttcgcaaaaaataagacaaattgataagcttggcagtgatttcagcagagaaaaagctgaactagtaagtgaaaaggatatgcttgatagtgagcttattaatcataaagaaaatttcaaagaaagcgttaaaggtgttatttttgctgctaatgaaaagctgattaaagatttaaatgaggaaattgcacgattggaaacgagcaaatccaaacaagatatagaaagttataagaagcttttgccagaattaaaagaactaaccaaagaggagttaaagcacttggaaatgcctgaatattttgatgtgtttgatgaaattttagaaaatttgccacaaaagttagagcaaaaaagcttctcacattcctttattacttctgctatgctttcacccttaaaagagaatcttgcaagaattgaacatattgatttggcaaaagatattgacgcaattaaacatatcaaaaataagctttataaaaataaaaccttacaagatgagcttattagtgatgaggacataagaggaaggcaagagttgctagaaaaagaaaggcaaaccttacagagtgaaaaacaacaaaaagagaaagaaaaagaaagcctaaaagatgagctaagaaatttggaatccaaaaaggagcagattgatagagagatttattttttagaacaaaatattaatacagagcgcattgataacaaactaaaaattttagaatctttgcaaaaaagtatagaaaaatataaagaaaagcttacccataaattaagaggagagcttcacttgcttattttgaaaaattatcagagcttattatcaaatgataatgtgcgagaacttaagattgatgaggattttgagatagagctaaaagacgaaaatgatgagcaaatcattgtagaaaaccaaagcagcggacaaaagcagattctagcgattgcaattttttgggctttaagcaaattatcaaaatctaatctacccattatcattgacacgcctttagggcgaattgatagtgagaatagaaaaaacattatacaaaattattatgcaaacaatgtgcaggtgattcttttacctcttgattctgaaataggcttaaaagaatatgaatatgcaaaacctcatctagctgggctttacaagatagaaaatccagcagacagacaccacgcttttattaaaaaagcggacattaaagagattttataaggggatacaatggcagattttaatacaaataaaagagaagagcttgtgatagaaaaggttaagaaaggcttgggatttgaagaaaatgaatttgctaaatacaatgtgcttagaatcgcacttgcactcgctttaaattctccaaaattttcattagattcctcattttgggcacaaaaaagattaaatggtgaaaaagataaagaatatcatttggagcaaattacaggcaagggcaaggacaaaaaagaggattttgatttgcttattcgctcaatgctgtatatcaagcacaaagaggagttggatagggacaaaaaagatattttcagcaatgaaaaagaatatttaaagattttaagccgctatatccaaaggggactttatgagcttaataatacctataaatcaagtgattgcttttatcaatggtgtttggataatttgcatttatcatcaaagcaagaggagcagacaaaagaaaatcccaaaaataatgatgtgggttactttcctaaactgcaagagtatttcaaaaaacaaggaattggcattaggctagtgaatgaagaggattcctatcggcatcatatttgcaaaattgagcttttggattctgctaagattcaagcctttaaaacaaaaagtc

SEQ ID NO: 3824 - DNA, 19280 bp, synthetic construct
  source 1..19280: mol_type = other DNA
  misc_feature 1..19280: note = Synthetic
aaacgctttattgaaacttttcatattattaaatccttaacaactccttgttttcatgtatattcccaataacttccatatttttttctgatttaaatgattttaaaaaagatatatcaggttcagctttccttttataaattttattattaaagtttttactaaaaatttctattttaaacattttataagtatcgtctcttgtaatatgataaatttcttcaagcggttcatttttgataatatcattttcatagattttatttccatttttatcaaaataaccagtccatagctcgatttctaaatcattgccatttcctataaacatatctgcgatatcagcagtatttgcgtaaaatcttgaaattcgcccagcaatcactctttcgttatctaatttaattaaagtcggctctttctttaaaaactcttctttagttttattccaaattctaaaatcaaaatcttgtagtttcatttgttacctccatttatactttttatagttttttgccattcctcatcgcttttaaactcattattaagttcttttaaaagtttaagtgcttcatcattagacaaattagaaagaatagctcttattctttctaatggcttgatatccttatggataattccaaagaattcctcttgctcttttgtgcttaaatcttcaaaaagttcagccaaatcatgagcatctatatcttctaaatcactcgcatctatgcttacattgacatacattttttatccttttgttttaaattaagttttaaaaacttaatcaaatccgccttagcggacttgttaaatttttttaagtctaattttttgctttgaagtcattttcttttttcttttaaagctttgcttttttagcttaggcttatttttaaaatcaagttctaaaaagccattaaaatgagctgtttttgttttaaaaacactatttaaaagtttaaaagtcgctaaggaaagctctctcatttttcaatctccaagctttcaatctttggctctattctaaaattatcttttacaactcttttaagtcctagctttactaaggtgctatcttcaagctctgcaatagcatctttattaagttcttctttataagtaatgcaatcattaagtccatagctttttaaagctttgattaagttttctagtttttctttcacacgtggtaaagatacacttttacttaagcgatagccaatcttgccaaaggtaaattctttgcttcttttttctgcaaactcgtgtttattattttcacaaaaggttgtaatacattgctctacatacttaagctcatcacttaaaactttaatctctcctgcacgcctttctttaatttcattacaagctaaagttacttctccattaatcttttctatttttacactaagctctactacttttttaagtgcaagattcacatcttctaaattatttatttgcatctattctccttttaaattaaattttttaatttgataatcccaaagaaccacaccatatcttaaaagcattgcgtgttttgctctttttctaactatccttaagccttttttttcacgcagtatcgtggagtcttcaggtggatcaagggagcaaggctccttgtcgaaaaaggtggctttgtcacattgcgaagtcaaagaggcaactccaaaattagctctttgataccaagctttttagcaagtgctaattcttcttgcataccttgtgaatattttgcatctttgtgagtgcttatataaatataatcacaagcctttaaaagctctaatcccatttttaaagcttcttctcggtgctttccttcatctaaatagctaaattgcaaaatgggcgaaatgggtgtaaaaccttcacattcacgcaaaacttttaaacattcttgctgggctatgctaatagcctgagcttttctttggctttctcttacagctaaagctttataaggagaagcgatataaactaatgccattattcttttccttctttaattctctttgcagtgcaaatcttgtgctttatactctctgcgaaaaattgcacctaaagaaccaaacattaaagacacacacatctaaaaatccttgcagatttccagtcaaattgccttaatttttggctcacctcttattatcaacccttaagttaaaaaacttaattaaagtgccttaattcaagcacttttgttaagctttttctttaaatgaaaattaagaattttttgtactatataatcaggataaactcctttcagaacatctacaaaagcattattttctttataataaatacttacacctttgattttaaagaggcttctgctataatcagctttctcgcctttaatcatttttgtcattttttctctccttgtattaaattttctctttttgctttttcttttttaattaaattaatcgtttcaaagatagctatccatttgtctttgtttttaggactctttagctttctaatagcttcagtatagatttgatgaacgcgtgtcacgctaagattaagttctttagctatctcttcaaaactcattttttaacccaacattaaaaatgatgcggctgcttctatgtgtttgagctcaaccgcttttccatctgcaaattcacaagctctttttaaaagcttttcactttttctaaaattgccacgagcaagattaaaaaccaaatcaattgcctttttatcctctacatcaaaatgcttacaaagtgtttttaagtcttcatcttttaaaccttctttattttgatagcaaagtccttttaattcccactttgcaccaattctagagcttagctgtccatactcgttataatcatttctgccaatgcctgtaaggttatttttgagttttctagtacctactaagattaaagcggtgtttgaaaaatcataaatgcgtcttaagcactctaatgctctaaatggtaaatgttcgctttcatcaatgattaaaacctttgaagttcttgctaactcactagcaatgcctctaatcttatcatcaagcgagcctttaaagcatatatttaacttattctcaagtcccactaaaagcattcttttgcttgtttcagtcgtagcttcaaaaagcaccactcttgtgccatttttagtggcatattctttaatggctctgctttttccagtccctgcttcgccaatgattactcccatttctctattactcatggcactctcaatggttacattaatcgcttttgcatctttagtagcgataaaaggggtttgaagctcttttacgcttttttcttctacgaagcttttaatatatttttcaagtaaaggttctacttttgaagcgtatttatagccactaccttctttcatatagcccaccatatagcttttattaatccctaaacgatcggagagattgttttgagagatgttttgggtgcttaaaaactttttagtaagttctactaattgcattttttatcctttctcttaacttcacagcggaagtaaattccgctttgtgagcaggagctttgctccttgcatccacctaaagcccccgtcccactgaagtgggggcatctttgttttagagctttataaaaactctttaaaacttgaattaatcaagctttaaacaatttttaaccagcaaaatatttcttttcgacaaaagcttccatatcaaactcactttcatcatttgtgatttcttttttagcgtttaaaataagctcatctgcattagcattgtttttaatctcttctaattctctttgagtttttaagacttcttttgcaagggatttttgatgtacttctttgacttttacgagtgagttttcaaaagtattttgtaaatcttgtaagtcttgcttgatattaagcttagtaaaggcggcaatctcatcttttttaagcacttctttaatggctttaacttcactttcatagccttttttaagcattttaaagctttctttgctaagtttagcaatactttcatcaagtgctaagcaaagaaaagtaccatttaaatcatagatgaaaagctctttgatattatcaatattttgcacacatttaacccttgtgcctacgcttggcattaaagcacttttataaactctactttcaaagttaatgccttttttgcccacgaccctaagttctttatttccagcgttaaacaaaaattcttcataagatatttttacaatagctctatcgcatgagttccaaagttcaagtggagttttaacgccttttttgcggcgaactttgctcatgttccacttgatcacttcagcttccaaaagctcacaagcttcgctgaaggtgtgaaggagtttttgattagtttttttagcaaagccgtattcatctttagcttttctttctttcttaggagttttttgctctatcatttctcttttagctaaactatttccaatgtgaccgtgcatttgagataatctagctctttgaagtgttccaaaacgcctttcaactaaagctttttgctctcctgcgtaagcaatagctgcatcatagcttatattaagactatcaagtaagctttgaaaatcttttgaaagataatctttaccattatcgccttttatcatatcaggcttaccaaacttatctatggctttccataaaagtctagttaggcttaaagagtttgattttcctactaaggtagctactcccataccgctaaagacatcaacgacacttaagatatgagggcggaaaggctctaaggtttcatcatctcttactataacatcagctggggaactatcgatttgccaacacatgtttttcatgtcatatagctctctttgatttccttgtgcagggagaaacttagattttgcacgatctaagccttgagtgataatacaatgttctaatggtttatctttatagtagtttttaatgaaattttgtaaggtttttacactaaaaagcggttttacctctcctaaatcaaaacctatgaaatcatagctttccttttgtgccgcctctttgtgaatttgccaccaaagctcagtgaaattaaatccacctgctccaaaggtgcgatactctcttaaggcatattcttgcatccaagcactaagtttagttttatctttgcggtgaagtcctcttgtgtcaactaaacctagaatgccatactttttatagtttgaacgccagttagaatagtttctccattctacattacacaaaaataatgctcttttgagtgtaagaccgccttcaatatatttttcaatttgttttatgagttttaatttctctttagcttcttgtttaatttcatcatttaaattttcgaattttaaatttaaaacagccaaatcattgtttatttttgactctgttaaatctaaatctttctcttttataatgcaaattgtattactattgctaatgtcatttaaatctactttttgcattttttcattaaaaattaaagtatttttactgattaattcttgattaattgcagttaaaatctgttctttacttattttaaatagtagttttttaccacctctaccaccattggcattatctacttttaaccactcatatttatttgattttctagttactgcaagtcttaaagctccctcacttacattataaacttgtgcagcttctttggtttccaaaaaatacattttattttaaaccttgtggaagctcattaataatgccaagttctaagagtttttcaaacacggctttagtagcacctttagtatttctttcgcctgtaatttcacctttgataattctatgtaaaatatcgtagctaatgttgtgagttctggcaaaagcttttacattgatagcattgctttcaaaatatgctttaatcatattttctcctttaatacttcaattttaattgaagtttgtctttaattgtgataatatttcaattttaattgaagtattatactattaaaagttagtataagtcaagtaaaaactaattttttatagtattttttattaaggttacgattatatggaagtcttggatatattgcaaaaaatgtttgaagctgtaggggtaaaaaataaaaatcagttggcaaaatacctaaaaatagagaatagtcttatagctggttgggagaaaagaggaaaaattcccgaaaagtatgtgtataaaatttctcaagatagtaatttgccatatgaatattttatcaataatactaataaaaatgagtataatattaataataacaagcaagatgctaatttttattctataccaaaactcaatatttcagcttctgctggcggtggtaatgaattaataggacttgaagagtatgaaagtggagaaatgcttgagcttagcaaagcattctttaaaacaattccaaaaaatgtaaaagctattaaagttgatggttattctatgattcctatgcttttgcctgatagctgggttatatttgaagaagtgcatgaatatcaaggagatgggttatatattttaaactttgataatcagctcatggttaaacttttacaattagatccaataagtaaaattttagacattatcagtgtaaataaggattataaaagctatagtatagacttaaaagattcacaaatcgaattgatcatacaaggtaaggttttgcgttctattatatagaaaaacaaagttagagaaatataatagttatattttaagtttaagctttatagaaaaataaaatttccacttttatggaagttttatttttccaaatggaaattttatttttccgccgacaaatttacaaatgttagaaataaaaaagaaagttatgaacgctgcatagcgcaaagttttttaaaagatgaattaaagcttatttttaaaaaacaaagagaatttggcttttctttttcaaaaaaatttgaagaagaggtgcttagtgtagcattttataaaagggctttaaaagatttttctcatttggtgggaaattgtagtttttttaccgatgaaaaaagagcgccaaaaaattcgcccttagcttttatgtttgtagcacttacaagaattatcaatcttttaaacaatcttaaaaatactgaaggaattttatatacaaaagatgatttaaacgcccttttgaatgaagttttaaaaaacggcactctaacttataaacaaacaaaaaagcttttgggcttaagcgatgattatgaatttaaaggggaaaaaggaacttattttattgagtttaaaaaatataaagaatttataaaagccttaggtgatcatagtttaagccaagatgatttaaatgaaatagcaaaagatattacccttataaaagatgagattaagcttaaaaaggctttagcaaaatatgatttaaatcaaaatcaaattgatagtttaagcaaattggaatttaaagaccatttaaatataagttttaaagccttaaaacttatcactcctttaatgcttgaaggtaaaaaatacgatgaagcttgtaatgagcttaatttaaaagtagcaatcaatgaagataaaaaagattttttacccgcatttaatgaaacttattataaagatgaggtaactaatcctgtggttttaagagcgattaaagaatacagaaaggtcttaaatgctttacttaaaaaatacggcaaagtgcataaaataaacattgaattagcaagagaagtaggtaaaaattacagccaaagagctaaaatagaaaaagagcaaaatgaaaactacaaggccaaaaaagacgccgaacttgaatgtgaaaaactaggcttaaaaataaatagcaaaaatattttaaaattaagattatttaaagaacaaaaagaattttgtgcttatagtggagaaaagattaaaattagtgatttgcaagatgaaaaaatgcttgaaattgatcacatttacccttattctagaagttttgatgattcttatatgaataaagttttagtttttaccaagcaaaatcaagaaaaacttaatcaaaccccctttgaagcctttggcaatgatagtgcaaaatggcagaaaattgaagttttagcaaaaaatttacctactaaaaagcaaaaaagaattttagataaaaattacaaagacaaagagcaaaaagactttaaagatagaaatctaaacgatactcgctacatcgcaaggcttgttttaaactacactaaagattatttagattttttacctttaagcgatgatgaaaatacaaagttaaacgacacacaaaaaggctcaaaagtgcatgtagaagcaaaaagcggtatgcttacatcggctttaagacacacttggggctttagcgctaaggatagaaataaccatcttcatcacgccatcgatgcagtaattattgcttatgcaaacaactctatcgtaaaggctttttcagattttaaaaaagagcaagaaagcaacagtgcagaactttatgcaaaaaaaattagtgaattagattataaaaacaaaaggaagttttttgagccttttagtggttttaggcaaaaggttttagataaaattgatgaaatttttgtctcaaaacctgagagaaaaaagccaagcggagctttacatgaagaaacatttagaaaagaagaagaattctatcaatcatacggcggaaaagaaggagttttaaaagccctagagcttggtaaaatccgcaaagtaaatggtaaaatagttaaaaatggcgatatgtttagagtggatatttttaaacacaaaaagacaaataaattttatgctgtgccaatttatactatggattttgctttaaaagtattaccaaataaagctgtagcacgaagtaaaaaaggtgagataaaagactggattttaatggatgaaaattatgagttttgcttttctttatacaaagatagtttgattttaattcaaactaaagatatgcaagagccagaatttgtttattataatgcttttacaagctctactgttagtttgattgtttcaaaacacgataataaatttgaaacgctaagcaaaaatcaaaaaatattgtttaaaaatgcaaatgaaaaagaagtaatcgcaaaaagcataggaattcaaaatctaaaagtatttgaaaaatacatagtttcagcacttggggaagttacaaaggctgagtttagacaaagagaagattttaaaaaatgagttacgatgaagcttttaaaacactgcttattagctctaatgccaagctaaatttagagctaaatcatcttgtgattaagcaagatgaaaatatagccaaattgtttttaaaagatataaatatcatcgttttagaaagcttacaagtaagcattagttccgcactttttaacgcttttgcaaggcataaaatcatcttgctaacctgcgatgaaactcatagtataaatggtgtttttactccttttttagggcattttcaaagtgcaaaaatcgcaaaagagcaaatgaatgtaagtgctcaaaaaaaggctattttatggcaaaaaatcattaaaaataaaatcctaaatcaagcctttatcttaaaaaaatacaataaaatagagcaaagcaatgagcttataaatttggctaaaaaagtaagcttaaatgatagtaaaaatattgaagctgttgcggcggcgctttattttaaaactttgtttgggacttctttttcaagagatgagctttgctttgaaaattctgctttaaattatggctatgcaatcattagggcttgtattattagagcagtttgtataagtgggcttttgccttggcttggcattaagcacgataatatttataattcttttgcgctttgtgatgatttgatagaagtgtttagggctagtgttgatgattgtgttttaaagcttaagggtgaaagtgagtttttaagcaaagatgacaaaagagcgttgattggcaatttacaaagcaaaatcaattttgatgggcaaaattatcctttaaacagagcgataaatcattatgtggcaaattttaaaaatgctttattgtatgaagatgaactaaagatagtgaaatttgatgattgaagataaatttatgcgcgtgcttttgatgtttgatgtacctactaaaagtaaaaaagagcaaaaactagcaagtaaatttagaaacaatcttataaaattaggttattttatgctgcaatttagcgtttatatgcgtatttgcaagggtttaagttctgcaaaaagttctattgaaaatgtaaaaaagattttgccaccttatggaaatgtaagggctttaatcatcactgaaaagcaatttgataaaatggagcttttgcttggtggcatagtttttaatgaaaaagttaataacgaaaccaatttaacactttttgatatagatagtcatggagaatttaaatacaaaaattcaaataatgaagaaattcaaataaacaaaaaacaagaaaaatatcatcagcaaaatttatttgaattttaaaagcggttttaggggattgtaaccccgcagagtcccgcaaactctttattttagtccctttttaaatttcttatgagattatagcataatttttgctatttttcatgaaaaaaccccgaaattttcattatctggtaaatatctattttaccataaagaaatttaaaaagggactaaaattaccatatcgcaccctgtggctctactgttattttaccataaagaaatttaaaaagggactaaaataagtttataacttatatatataattataatattttaccataaagaaatttaaaaagggactaaaataataatggctaaatatttcatgagaatggaattttaccataaagaaatttaaaaagggactaaaataaaccctagtggattgaaactccgctagggctaattactccactaaaaggaggttgcgaatttgaaacttattgaaatttagggttgattaaaatcgaaataaaattatttaaataattttaaggcataaagataatatccactaaactttcattttctaaaatttcacattcttttggcgccaccataagggcagctttattgttaagattgtttataatcgcactagagccttcttttttgccttcaagattggctaaaatgcgtccattttcaaactttatgttacaagcgacaaattccaaataaggtgtttttttcttgtagcttccttgtaaaaaggctttgcaaatatagtctttaggctgaagtaaccaagagcttaaaatctctcttgcgtaaagattaaacattaccatagccgagtaaggaaaacctggtaaggcgatgatgaatttttcattagccttagctattttgatatgtctgcctggttttatgtcggctttatcgatgatgatttcatattctttgacggctttttttaaaaagtcaaaatcccccatagaaaccccgcccgttgtaatcaaaatatcacaactttgcaaagcactttcaagtgtagaaaaagtggctttttcatcatcttttaaaagaggaaaaacccttgtatcgcaatttaaatttttagctaaattagctatggcgatatgatttgaagagcggatttgagcaggattttccaaggcttctcctagatctttgatctcacttccactacttaaaacccctacaataggctttataaatacactaatgtgaaaaaatccaagttcagctaaaagagctatctcgctataatttaaccttgtgccttttttgagtaaaatttcatcttttttatagttttctcctaccgcacgcacggcaaaagcttggggaacttttttttctataaaaagagtatcattttctatgcgtatattttcaacagggactaaagtatcgcttccttcgctcatgagtgagcctgtaaaggtttttacacaagtgccattttgtacgctaaattgtggcatagtgcccgcaggtgtgaggcctaaaatttttaaaggcttgtcttgatcttcaaatttgatcgcataaccatccatagccgaggttggaaattcaggctgatttttactcgcttttatatcttgagctaaaatgcgtcctaaacactctgtaagagctattttttcaatcttttcataggttttgatatgagagtgtaaaatttttaaactttcttcataagacattagcatctttattccttcatactgatataaatttgagtcttgtttgttgtataaaattcaaaatctgtgtcaaattttctttggagacttgaatttttaaaaaattcattgatattttgccaaagttttggggcaatgatttcaggttttccagagtcttcaaaaagcatgtatttgccaccttttatacaaattttttcgcctttttcgtgaggatttttcatacccacacaaattttatactctaacttgtgagtgtttttataatcataatacacgctataaatttcatcgggcgcaccaaagatgctatgaaattttttccacaaaggaaaaattaaagagctgtttaaatcgctctcaagttcctcatcagttttaacgcttactccataaatactaaattcttctatttcttgtatcattttaaaagtcctgcaccgcaaagtttggttgatctttctttggcataaattctttctttgtttatcacatcatacttccaaatgggtgcacttgctttaaaatcttcaacaaattcattaagaagtttaagtcctaattttctttgtttgcttaaaattcctgcaaaataagagctttcatgaaccgccacatcgcctatagagtgagcaaaaagcaagctaataccatcaaaatctactcttttttgccactcatcaaaccatttttttaaaagcggttcataaatatcaaaactaagtgcctcaatacctccttcttcacgcacaataccacaaaaagtcagtaaagcaccgcagtttttatccttggaaaattcataccattggctataaattttaggaatatctaaagaaccttgataaagtgtaaaatgtttcatttagcctccacaaactggcggtaaaagtgctattttatcaccatcttttaacttggtgttttcatcaaaaatgatttcatcatttaaagatacagcacaaagttctagccattcttttaaactctcatctttttgcaaaatttcttttaattcttttaaattttttacttcaagttctaaattttctttatttatagggcctaaaaattccacttttaccattttattcctttacttctaaatttcccatcattcctaaatcttcatgttctaaaatatggcaatgatacattctaagtcctttaaaatcttgtttcattctaagtcttaactcttcattaggacgcacatttatagtatctctgaaggctctaaattcggctttttgaactttgccattgagttttgatgagatgagttcaaattgcgtgccgtgtatgtggaaaggatgatccatgtgagatttatttatcactatccagtcttcaactactccaagcttggagcttaaatcaatgcgttttaaatcatagcttttgccattgattaaaaacatagacgcaagagcgatttttaattcattttcactttttcccatcattccatgcatttgcatatgatcttcactcatgattatttctttaaattccttaggttcttctaaaggtttgaaaatttttaaattttttggaagttctaatttttctttttttaggctaatactagctaaaaatagggtattaggttcttcttctaccatcattttatccctatcataataagcactttctagtctaaattccccatcttttggagcgtcgattaaaacttctacacgagaagcaggacttaagaaaagttcttctttataaatagctttttctataagtccaccatcagtaccaacaagtataaacttagctccttgtatgcgtaaatttaaatatcttgctgcagtagcattataaatgcgtatgcgttcgtttgtggcgagtttgattttaggtttgaattgtccattgatgagtacaaattctccttctctaccattaagccaatcatttaggttgttgtttggaatttgagcgttttcatcaagacgcaaatcgctaatcatcaaatctttttcttttaaatgacttaaagcatctttttttgctttgatcacaaaagcccctgctaaacccataaaaacttgtttagaagccgtataatgaggatgtggatgataccagtaagttcctgcgctatcttgaggaatttcaaaacgatatattctttcttctcctgctaagataggatcatgtgggcttccatcttgatcaggtggcacaggaacgccatgccaatgtatagttgtagcttctttgagtttgtttttgactaaaatttcaagtttatctccttcaaaaacttctatttttggagcaggcacgaggccattgtaagtataaaataaggtttttttacctttgataagctctatatgattttctttgatttctagggtagcacgaaaaatatttttttctttactttcatttttgagtaaaggcaaggcttttaaaatttctccttgggggaattgttttggatctaaaagctttaaattttttggagcaaagtttataaaagaagtatctaagtcatgatttatagaatgatttttatgcatggagtgcatatcgtgcataggatttgcataggctacacccatacttgctagagtaagtgcattaaattttaaaaaatttcttctattcattagtttttccttttgcttgattttttgtattatagtcattatttttttagttttagtaaatatttatgaaaatttggtttaattttgttatgattttagcaatttaatcaaggaaaaataatgttttatgaaaaaattcaaaccccagcttatattttagaagaagataaattaagaaaaaattgtgagcttttagcaagtgttggcgaaaaaagtggtgctaaagtgcttttagctttaaaaggttttgctttttcaggagcgatgaaaattgttggagaatacttaaaaggttgtacttgtagcggactttgggaagcaaaatttgctaaagaatacatggataaagaaattcatacttattcgcctgcttttaaagaagatgaaataggtgaaatagccagcttatctcatcatatagtgtttaactctttagctcaatttcataaatttcaagctaaaacacaaaaaaattccttaggtcttcgttgtaatgttgaattttctctagccccaaaagaactttacaatccttgtggaagatactcaagacttggaattcgtgctaaagattttgaaaatgtggatttaagtaccatagaaggacttcattttcacgcactttgcgaagaaagtgctggtgctttagaagctgttttaaaggtttttgaagagaaatttggcaaatggatagggcaaatgaaatgggtgaattttggaggaggacatcacatcactaaaaaaggctatgatgttgaaaagcttattgctttgtgtaaaaatttcagtgataaatacggtgtgcaagtttatcttgaaccaggcgaagcggtgggttggcaaacaggaaatttggtggctagtgtagtagatatcatagaaaatgaaaaacaaattgctattttagatacttcaagcgaagcgcatatgccagatactatcatcatgccttatacaagtgaagttttaaatgctagaattttagccacaagagaaaatgaaaaaatttcagacttaaaagaaagcgaattttcctatttgcttactggaaatacttgtttagcgggtgatgtaatgggagaatacgcctttgataaaaagcttaaaatcggcgataaaattgtttttttagatcaaattcattacaccattgtgaaaaacacaacttttaatggtataagacttccaaatctcatgcttttaaatgcaaaaaatgaacttcaaatgataagagaattttcttacaaggattacgctctaagaaattaaaattttttggaagaataattttattatttctttttagcataaaatattttttaaatgacaaaatgaaagttttgttttttaggtttaaatattttatgcaactttttttaaaaaacctcattaaaatactattttataggcttttaaagctaaattctattttttcagattaggcagatttttaagaaaatttcagtttattttaaaacaaatcatattaagataaatcagtcaaaaataaggattaagaaggaaaattaggtgtaatttgcataatattattttgcaaattatttaacggcaaatcttcaaaaatttgaatgagttaaaaatggatttagaaaaactaagattagctagaagtctttattatcagtgcttaggagaacttttcgttttttcattttctgaaaatagattgtgtaacttaaaagcttatttagaagctatgcaagagggtttatttgatgaaagtttaagaacaagctttgaaattttacttcgtaatttacaagatgtacaagatcttcaagcattttataaagaatacgatgagctttttttagcacttaaaaacactattcctatgactttttcttacatagaagaaggctttgaaaattcaaaagcattgcttaatgtaaggcagattttagctaaaagcacaatccgccgcaatgaaaaaatttttaaagaagctgaagatagtgtaggattttgttttgttttaatgagtgaatttctaaaaaataaggaagatgaacttgctaaggcattgtttgaaaaagtcatcaatcaaagcattgatgaatttttaatgcttattttttcaaattcaaaagcgaagctttataaagaaatagcaaatattgctgcgcagtttatagaatttgaaagatattgttttgaactcgaaaaacctactataaaaccttctaagaaagttcaaaatgatttatctcgttctgaatttttaagaagagaagcaaataaacaaaggagatctcgtgaaaaatcgcagggaatttcttaaaaaatctgctattgctttgggtactgcaagtcttttaggcggtgcaagtgtagcttttgggcaagatgaagaaagaaaggatcttgttagaggcaaaagcaaaaagaaggaagtgctttatcaaagaagtgctaattgggaaaaatattatatgagggctgaataatgtcaagtatgaatgaaactatcaagcttaatcgccgttcttttcttaaaatggccgcgctttcaagtttggcaagtccgttgctagctagaagcgaaactttaagagaagcaaatgcggatgaattaaaagaagcttatgaaggaagtcaaaagattaagagtgtatgtaccgcatgttctgtaggctgcggaattattgcagaagttcaaaacggagtgtggttgcgccaagaaatcgcacaagatcaccctgttagctcgggaggccattgctgtaagggctctgatatgatcgatatggtgcgttctcatgtgcgtttaaaataccctatgaaaaaagaaaatggagaatggaaacgcatttcttatgaacaagctttaagtgaaatcggagaaaaattagcagcttatcgtaaagaaaatccagaaagcgttatgtttttaggttctgcaaaactaaacaatgaacaagcttattatataagaaaattcgcagcattttttggaaccaataatgtagatcatcaagctagaatttgacacagcgcaacagtcgccggtgtggcgaatacatttggttatggcgctatgacaaaccatcttggagatattcaaagaagtaaatgtattattattattggagcaaatccagcagtaaatcaccctgtaggttttagacacttcttaaaagcaaaagaaaaaggtgctaagcttatcgttgtagatcctagatttacaaagagtgcagcaaaagcagatatttatgcaagaattcgtccaggtactgatattgctttcatgtatggaatgttaaaaatcatttttgatgaaggtttagaagatacaaaataccttgatgaaagagtttttggtatcgataaaattcgtgaagaagcagcaaaatggactgctgaagaagtagaaaatgtaacaggaatttctaaagaactcctcattcaaatcactcatgaagtagctaaaaataaaccaactacattgatttgggctatgggcttaacacagcacaccgtaggaacttcaaatacgcgtttagcacctatagtacaaatggttttaggaaatataggtaaattcggcggcggggtaaatattttacgcggacacgataatgtgcaaggtgcttcagatatggcgtgtttgagtgaaaatttaccaggctattatcctttaaatgaagcgacttggagatattatgctaagatttggggcgttgattatgagtggcttttaggaaattttgtaagcaaagattggatgcataaaactggactttcacttgctagatggtgggctgcagccttaaatggcaaagatggaaatgataaagtggataatgcaggaacgtctttgaaagctttggtggtaatgggaaatggtatcacttcgactgcacagcaagctaaagttaaagaaggtttggaagctttagaacttttggttttagctgatccttttgtcaatgaagcaggaattattgcagaaagaaaagatggaatttatcttttacctgctgcaacgcagtttgaaacaagtggaagcgtaacagctacaaatcgtagcggacaatggagatttaaggttatagatccactttatgaaagcaaagaagatcaagaaattttatttgagcttgccaaaaaattaggtttttatgaagactttactaaaaccttacgcgatgaaaatggcaagattgtttggcctgaaaatgctactagagaaattgcaagtgcagttagaagcataggacttaatggttggagccctgaaagacttaaaaaacatactttaaattgggataaatttgatgaggtgactttagaaggcaaagacgaattagcgggtgaatactatgggcttccttggccttgctggagtgataaaca

SEQ ID NO: 3825 - DNA, 18867 bp, synthetic construct
  source 1..18867: mol_type = other DNA
  misc_feature 1..18867: note = Synthetic
tattagcattaacgcttctgtgtcttaaccatgctctagcaggtgctaaaagctcatcaaataaaatagtgattttcttttcatcttttgcaagattttcaaattttcttgcataataatctagtatattgccttgttttttctctaaagagtgtaaatgaaaagcctttatacgatcataaggttttaaagttttaccttttgaatttgcactatcaaaaaacaaaaacgcatcatcttcgcttggagctaaaacacagataaattctatattgtctaaaagatatgttaaaaacttatatttttcattatagctttcaaaataagtttttatatgctcgtaattttctttgatatgatattttgactcatgatgagagtatttactctcgcctaaaaaattacctattttgcattcattgcatttttcttgattgttttcgcataaaacttttaaaatcaaagccaaagtggtaaggcgttgttgaccatctactatgttaaatttattttcattatttttatgtaatatcaaacttcctaaaagatacttttgattgtttttatttgcttgctcgcttacatcttttaaaagagttttaacatgttttttctcccaagtataagggcgttgataatcaggtatgtttaatgaaaacctatcttttgaaaatatctctaatttttgatcattttgatcagatattttaccgtacaccaactctttcaagcctaccacgcatgattttactttactacttttttcgttcatttgtaacctttttaaatttaagtttattatatcaagctatctatcatttccaaagcttctaaagctttcattttaagtcctataccatttttaaaaaactttggaaaatcacactcatttggattgatccttaaaagtgttctagttttactttttttacaaaaatcctcgccaaacatacgcatactaggtatagctttgccagcgccaagctctataagtaagatatttttatcttctagaggcttaagccaatttttataattttgtttttgtaaaaaataacgactatcattaaatgtgccatcagcaaacattaagatatttggtcttgctaagccttgacatctaggacattttggcaaagataaagctttaaattcccccatatctatgggtaattcttcttgtatttgccagattaaatcactgcacgcataattaaaacattgtagataatatttatacttccatgaaattcataaattttattttcatcgaaaccagcttttttaaaatgcccgtccacattagtcgtaacaacataataatcttgcttgctttttgcaagttttaaaagtatttcatagcccttgtgtggtttagtatctttataaagcttaaacctatgtccataaaaagcccaagcaagttgtgggtttgcataaaaattttttaggattggccatgcgttcaaaatctatacctagtttttgcaaatatggataggctctccaaaagccatcttttcctctaaaatcaggcaaaccgctatctattcccatgccagctccagctgtaataatgatcacttctgctttatctagagcttcttttatatgagtttttatttgtattttcaacctttaaagattatcataatcatatttcctcgcctcgtgtagatcttgagctacttcaaaactcatttcccaaaaacagcatttatggattttggcatacagttttcatcttcgtatttttcacttatagccctataaacttcatctccttcttcgcaatcaacagcaatgctcctcaaataaggatatagtaaataccccaccggagctgtatcaaacaccttaataagttttgtttttggaaaattttctttcataaaagttaaaattcatctctagctttatagtctgttttcttttcatcaaaaatgttttcatatcttgttttattgatatgaaaatcattatttggagcgttaaaacacatccaaaaagactttgcatcttttttgatagtgtattcttgtatggtatcaactactaaagccatttcaaccctttcttggtatttgtgaaattatacaatataaaaatggacttttaatgtctataaaaatttattcctatgtttaaagatagtgatatatttgtgaaaattggcaaatagtcagtgattaaatgagcttttaaatatgttataattttcctttttaaaaggataagatttgaagatattaaattttttttacgaaaatcatcccaaatttgaaataagctatgaaagaaaggtacaaattcctctttgtaatatcatcatcaaaggaccaaaatttagcggtaaaaaaaccttgatttttaactatttatcccaatttaagcccaatgaaattttatttttaaatttgcacgatactcgttttgaaaaccaaagcttagagcatctttcaaattttttagaaaaaaatgcccagataaaatttctttgtatttataatgttgaatttgccttaaatttgcaagatattaaaattcctatcatcataagtacagataaaaaagatttgcatatcgaaggatttcaagagcttgagcttgattattttgactttgaagaatttgtaagtatcagtagaaaaaatttaccgataaacaatctagtgggactttttttgcaaagtgggcgtagtaaattaggtgaaaaaaatatacttttaagacaaaattttaacactctagaacttgaaattttaaaatacttagctttaaatttaggacagcagatcagtatttccaagctttttttagagcttaaaaaaaggctaaaaacatctaaagatagcgtttatcacaccataaaagagcttgaaaatacctatatcatccatcctataagccatgatgaaaaaaagcttcaaaaaatttattttagggattttggcttaagaaacaatctatgcatacaaaaagattttacccatttgtttgaaaatcttattttaaatgagctttttaaatttaaacaagaatttttttacaataaattttttacattttatagtaaggtttcaaaaatcgcatatatttctagtccgacattggatatagacttgatcaaattgcgcgctaagaaaattctttctaagagtttagagcttggaatttttcatgtagttttcatcactctttcgagtgaagatagcttttttgagcaaggggtgaaatttgaagttttgccttttgataaattttcactcggcttttagctaagactagaaagaatttggagtattgtatcgctcaagatcgtatcgctggatgattttagtaacgatattgatataataacccttgcgctcggagtaagaatctaaagttttaatagcctctagtcctgttatttctttgccttcgctttcaaatttagctctttcgttgcgaaattcctcataagcaaagtgccgatttaaattcagtacataagaatccacactatcttgcaagctatcaaaaattctaattttatgttttttatcaggatgtcttagatcagggattaagcccttttctccccaggtccattctccaaaaagattatttgcctctcttgcaaaacggcttgttcctgtagcactttcgaccaaagcttgggctatacccatggattttggaattttttgaatgcgttttttgtattctgtaaaatcataaagattttcaacgcggtatttgtttttaagattgattaatttttctagattgttttggtttgaatttctaagtccatttttatacgcatcataaaaaaaagcttctacaaaagccctttctttggctatttcttcaaagctttcatcaaacattgcattcattttgacaaaaaatatttgtcttttttgttctacatcgagtttataatactcctctccaaagccatttttaagctcgctatcgccaaaaagagggagtaaataaaaactaagaaaaattataattcgcttcaaagcaatatctcacttttcccttaaaaaataattcttcattttcgaatttaaaacttagctcttcaccgctttttggaatcactctagcttgattgtgaatttttttatttaagaatgcaagataaaaacaagctcccatgcccgtgccacatgcttgtgtttcatcttctacgcctctttcaaaagtgcgaactcttaaagtattgtcattttcaacttttacaaaatttacattggcattatatttttctctcatttgtttgcaaagctcaagatcaaactcatccaaattttcacaaaaatgcaccaaatgtggaactcccgtatcacaaagttgccagtttttttcacactcactaaaggcttcttgtatgttttttatcttccctaaagaaacttctacgctattattatcaacatttgcttttataactcctgctccggtaagaaaagccatatgaggtttgataccatttatatgatgtgcaaaatgtgccgcagcccttgagccattgccacacatagcagcccttgagccatcgttattataaaattcccattcaaagtcgtatttttcatgaggcaatatcacgataaagccatccgcacctatgcctttataacgattgcaaagttctttagctaaagcacttctatcttcttttctatcagcatttattatgacaaaatcatttccacttgcacaatatttataaaatttcacatttttcctttagaaatttcttgtattactttaacacattcttgcctaaaatcggcataagaattagtatttttaatgataaaatccgcttttttaagtttttcttcaatattcatttgagaatcaagccttgcttttgcagtttctaagcttaaattatctctttgtatgattctttttaggctgagttctttaggagcatagattaagatcacttttcccaaaccatcataagcaccgctttcaaaaaaaagaggaatttctacaaaaaaagctttattttcttgttctagaatttgcatttgttctaaaatttgagcacgaattttaggatgggtgaaattttctaatatggttttggcttctttgttattaaaaacaatttctccaaggatttttctatctatcttaccctctgctttcaataaattttttttatgaaatttagagaaaatttgagccagttccaaagcatatttatctaaaatttcgtgagcgatactgtctgcgctaatgcttttaaagcctaaagaattcgctatttctataaaagtgcttttaccacaagcaattgaagcggttacaaaaaaagcatttttcatcttatgccttattaaaacttttttcgttaaaatacctttttagttcttaaaggaaaataaatgaaaatttcatatgaagatgcaggcgtaagtatagataatggaaatgcctttgtagaggctataaaacctttggttaaagaaacttttaatgataatgttgtaggtggaattggttcttttgctggtgcttttagaatgccaagtggttttaaaaagcctgtgattttaggtgcaacagatggggttggtaccaagcttcgcttggcaattgatgctaaaaaatatgatactataggacaagatttagtagcaatgtgcgtgaatgatttgatttgtaattttgctacgcctttgtttttcttagattattatgctacagctaaacttgaagtagaagtagcaaaggctgttgtatcaggcattgccaagggatgtaagatggcaaattgtgcattaatcggcggagaaactgctgaaatgcctggaatgtatgcaaaagatgattttgatcttgcgggttttgcagtgggtatggctgaagaagatgagatcgatagaagtaaatttgttaaaaatggtgatattttattggcacttcctagttcaggacttcattcaaatggttattctttagctagaaaagtactttttgaaagtttaaaattaaaatttgatgacaagataggggataaaaatttaattgatattttattagagcctacaaggatttatgtgcgtgattttcttacattaaagccttatattagtgctctagctcatattacagggggtggtttagtagaaaatttaccacgcgttttacctcgtggtatgggtgcaactatacgcaaacatcatcttaaaactcctgaaattttttatactataggacaggctgtagaagaaagcgaaatgtatagaagctttaacatgggagcgggtttagtaatggttgtagatccttctaatgtaagtaaggttttagaaaattcagatgcctttattatcggcgaaatttgcattaatgaaggtattgttttagagtgaaaagaatttatttttttaagatattttaagagtaaattaaaaaaataataaggaaaagtgatgaaaaatattgtctttcattcggatggttttggagatttattagtttgttttaaagctttgtatgctataaagcaactctatccagagtataaattatttttattaacaaatggattaatggaaagtgattttttagaaaaaattccatttattgatgaagttttgatttataaggatgattttttagaaaaaattcaaagcaaaaatccagtaatttttattaccacacgaagacaaggtttatattttaaaaaattaaaatttttaaatgttcaaaaatgtatagtattccctcatcttattagtataatttctaaaaatttaaccacacctttaccattttttagagctaaaaaacatatgagtgaaattgttttaaaattggttaggatgattaatactaggcattttgataaaaattttaatcaaattgatttttctaaaattaaaaatttattaccttatgatgcaagattaagtgataatttttttaaacaaattgatacaaaatatgaaaaaattataggtattaatgctttttcaaataatagcgaatatagaggatttaatttttttataaaagattggatagggcttgcaaggcaactttctttaaaatatcctaaatttttatttatacttttaaattttagtacgaattctattcaatataatattgatcagaatgcaaatttgaaagttttctgtaataataaaaatattgcttctttggtaagtatttctcaaaagctagattttttaattactgttgatactggaaatttacatctttgtgatattttacaaattcctactttggctttcacaagtagtcttgcagcttatagatttggaggtggaagttatggaggtagatttgataaattgatagtaaaaccagcttggcaaaaagaatatagaaaaatttatgaaatttttactaaaaaagcagaaaataatttagaaaatttatagtttttataaaataataaatatttattatttaaagatactgctatttttgtagtgttttgttcttttggcacaggattggtttgtgctagataaaaggctacaagcacgtttgcaagcatagcgataagtaaaagaggagtggttcgttttataatatccattggagctacttttgcaaatccagctaaagctatgatcccacctgctatgggtgaagctgcgcgacctaaacaagatgcaatttctacaggtaaaactagagtaataggtgcaatgcctaatttcgtagctatatcaggagctagttttccaaaagcattaaaagcggcaattccacttcccataatcactgtggcaaaataaactaaaaagcttaaaatagctatactcaaaagaattccaaaccatgcaaaatttcctgttccaagatttgaaaccgcgttagcaaggatattaactccaccaagtgctttaatgtctttagcgcatactccagcggcgatgattatgcttacgactgagaaaaaatttcagccatagccttttaaaatcaccatcatatcttcgcctaattttctagcatttctgtgtcttgcaaattcaacaagaaaaactaaagaaattcttacaaaatttgctatcacaacatcgagcttgatagtaaaaaaatacgctataaataaaaatataacaggtaaccaaggaaagagtatgtaaaaagtagggcatttaggatcaatgatttgcggaatttcaacttcatcatttaaaacacctttttctttatctcttttatcaatccaagcaaaataaaaaggaatcaagatggcaataattacaacataggtaatcacactataaatttggtaatttaaaaaaagccctacgacattatcactttgtcctaccatatctgccatattgattgaatttccatcttttggatcataatcaagtgcaattaaagaaagcgcatatacagttgtaataggacggattttaagtgagattaaaacaggataaatacatgctaacaaaagcaaaagcaattcagcatagctagaaatgacgatttttaaagccattccaacaacaaaagttccacttaaaattaagtatttattttttgatttttcctgagggtttatttgctaaaaaagcaagttttgccgaagcattgatatgtttcatgtaagcagtaaagcctgccacactcatgataataagccctgctccagaaagctgacttttaaaagttgctgtgataaaggcgtagctatcaagtaaaacatctaaaaaacttgagtgttctctgcttggggctttgggtataggtgctcctgtgatataaaaagcaaaaataagcaagataatatttgaaagaaaaaatacaaaaataggattgtattttttgagtatatcataaaaattagcatagggtctcttgaatttacaataaattggattttatctaaatttttaaataaaaaatattttttatttaaaaattacttgttttttgtattataaaattaacatatatagtttggttactgaaaagtttatgtttgtttaaaaaaatgatttttgtattataattatacacaaatcataaatattaaaaaggatctagtgtggcaagaattttggcatttgatataggaataagctctattggctgggcatttagtgaaaatgatgagttaaaagattgtggagttaggatttttacaaaggctgaaaatcccaaaacaggagaatccttagccttgccaagacgccttgcaagaagtgctagaaaacgccttgctagacgcaaagcaaggctaaatcacttaaaacatttaatcgcaaatgaatttaagttaaattacgaagattatcaaagctttgatgaaagtttagccaaggcttataaaggatctttaattagcccttatgagttaagatttagagctttaaacgagcttttaagtaagcaagattttgcaagagtgattttacatattgcaaaaaggcgtggctatgatgatattaaaaatagtgatgataaagaaaaaggtgcgattttaaaagctatcaagcaaaatgaagaaaaactagcaaattatcaaagtgtgggcgagtatctttataaagagtattttcaaaaattcaaagaaaattccaaagaatttacaaatgttagaaataaaaaagaaagttatgaacgctgcatagcgcaaagttttttaaaagatgaattaaagcttatttttaaaaaacaaagagaatttggcttttctttttcaaaaaaatttgaagaagaggtgcttagtgtagcattttataaaagggctttaaaagatttttctcatttggtgggaaattgtagtttttttaccgatgaaaaaagagcgccaaaaaattcgcccttagcttttatgtttgtagcacttacaagaattatcaatcttttaaacaatcttaaaaatactgaaggaattttatatacaaaagatgatttaaacacgcttttgaatgaagttttaaaaaacggcactctaacttataaataaacaaaaaagcttttgggcttaagcgatgattatgaatttaaaagggaaaaaggaacttattttattgagtttaaaaaatacaaagaatttataaaagccctaggtgagcataatttaagccaagatgatttaaatgaaatagcaaaagatattacccttataaaagatgagattaaacttaaaaaggctttagcaaaatatgatttaaatcaaaatcaaattgatagtttaagcaaattggaatttaaagaccatttaaatataagttttaaagccttaaaacttattactcctttaatgcttgaaggtaaaaaatacgatgaagcttgtaatgagcttaatttaaaagtagcaatcaatgaagataaaaaagattttttacccgcatttaatgaaacttattataaagatgaggtaactaatcctgtggttttaagggcgattaaagaatatagaaaggtcttaaatgccttacttaaaaaatacggtaaagtgcataaaataaacattgaattagcaagagaagtaggtaaaaatcacagccaaagagctaaaatagaaaaagagcaaaacgaaaactacaaggccaaaaaagacgccgaacttgaatgtgaaaaactaggcttaaaaataaatagcaaaaatattttaaaattaagattatttaaagaacaaaaagaattttgtgcttatagtggagaaaagattaaaattagtgatttgcaagatgaaaaaatgcttgaaattgatcacatttacccttattctagaagttttgatgattcttatatgaataaagttttagtttttaccaagcaaaatcaagaaaaacttaataaaaccccctttgaagcctttggcaatgatagtgcaaaatggcagaaaattgaagttttagcaaaaaatttacctactaaaaagcaaaaaagaattttagataaaaattacaaagacaaagagcaaaaagactttaaagatagaaatctaaacgatactcgctacatcgcaaggcttgttttaaactacactaaagattatttagattttttacctttaagcgatgatgaaaatacaaagttaaacgacacacaaaaaggctcaaaagtgcatgtagaagcaaaaagcggtatgcttacatcggctttaagacacacttggggctttagcactaaggatagaaataaccatcttcatcacgccatcgatgcagtaattattgcttatgcaaacaactctatcgtaaaggctttttctgattttaaaaaagagcaagaaagcaacagtgcagaactttatgcaaaaaaaattagtgaattagattataaaaacaaaaggaagttttttgagccttttagtggttttaggcaaaaggttttagataaaattgatgaaatttttgtctcaaaacctgagagaaaaaagccaagcggagccttacacgaagaaacatttagaaaagaagaagaattctatcaatcatacggcggaaaagaaggagttttaaaagccctagagcttggtaaaatccgcaaagtaaatggtaaaattgttaaaaatggcgatatgtttagagtggatatttttaaacacaaaaagacaaataaattttatgctgtgccaatttatactatggattttgctttaaaagtattaccaaataaagctgtagcacgaagtaaaaaaggtgagataaaagactggattttaatggatgaaaattatgagttttgcttttctttatacaaagatagtttgattttaattcaaactaaagatatgcaagagccagaacttgtttattttaatgcttttacaagctctactgttagtttgattgtttcaaaacacgataataaatttgaaacgctaagcaaaaatcaaaaaatattgtttaaaaatgcaaatgaaaaagaagtaatcgcaaaaagcataggaattcaaaatctaaaagtatttgaaaaatacatagtttcagcacttggggaagttacaaaggctgagtttagacaaagagaagattttaaaaaatgagttacgatgaagcttttaaaacactgcttattagctctaatgccaagctaaatttagagctaaatcatcttgtgattaagcaagatgaaaatatagccaaattgtttttaaaagatataaatatcatcgttttagaaagcttacaaataagcattagttccgcactttttaatgcctttgcaaagtataaaattatcttgctaacctgcgatgaaactcatagtataaatggtgtttttactccttttttagggcattttcaaagtgcaaaaatcgcaaaagagcaaatgaatgtaagtgctcaaaaaaaggctattttatggcaaaaaatcattaaaaataaaatcctaaatcaagcctttatcttaaaaaaacacaataaaatagagcaaagcaatgagcttataaatttggctaaaaaagtaagcttaaatgatagtaaaaatattgaagctgttgcggcggcgctttattttaaaactttgtttggtacttctttttcaagagatgagctttgctttgaaaattctgctttaaattatggctatgcaatcattagggcttgtattattagagcagtttgcataagtgggcttttgccttggcttggcataaagcacgataatatttataattcttttgcgctttgcgatgatttgatagaagtgtttagggctagtgttgatgattgtgttttaaagcttaagggtgaaagtgagtttttaagcaaagatgacaaaagagcgttgattggcaatttacaaagcaaaatcaattttgatgggcaaaattatcctttaaacagagcgataaatcattatgtggcgaattttaaaaatgctttattgtatgaagatgaactaaagatagtgaaatttgatgattgaagataaatttatgcgcgtgcttttgatgtttgatgtacctactaaaagtaaaaaagagcaaaaactagcaagtaaatttagaaacaatcttataaaattaggttattttatgctgcaatttagcgtttatatgcgtatttgcaagggtttaagttctgcaaaaagttctattgaaaatgtaaaaaagattttgccaccttatggaaatgtaagggctttaatcatcactgaaaagcaatttgataaaatggagcttttgcttggtggcatagtttttaatgaaaaagttaataacgaaaccaatttaacactttttgatatagatagtcatggagaatttaaatacaaaaattcaaataatgaagaaatacaactaaacaaaaaacaagaaaaatatcatcagcaaaatttatttgaattttaaaagcggttttaggggattgtaaccccgcagagtcccgcaaactctttattttagtccctttttaaatttcttatgagattatagcataatttttgctatttttcatcaaaaaaccccgaaattttcattatctggtaaatatctattttaccataaagaaatttaaaaagggactaaaaccaacttctttttctcccctagttgttttttattttaccataaagaaatttaaaaagggactaaaacgcgtcatctaaacctaattgactagcaattattttaccataaagaaatttaaaaagggactaaaacttcttgaccagtagctgctcttatagcagtattttaccataaagaaatttaaaaagggactaaaataaaccctagtggattgaaactccgctagggctaattactccactaaaaggaggttgcgaatttgaaacttattgaaatttagggttgattaaaatcgaaataaaattatttaaataattttaaggcataaagataatatccactaagctttcattttctaaaatttcacattcttttggcgctatcatcagtgcggctttgttgttaagattattaatgatcgcacttgagccttcttttttgccttctaaatttgccaaaatgcgtccatttttaaattccacattacaagcgacaaattccaaataaggtgtttttttcttgtaacttccttgtaaaaaggctttgcaaatatagtctttaggctgaagtaaccaagagtttaaaatctctcttgcgtaaagattaaacattaccatagccgagtaaggaaaacctggtaaggcgatgatgaatttttcattagccttagctattttgatatgtctacctggttttatgtcggctttatcgatgatgatttcgtattctttgatggctttttttaaaaagtcaaaatctcccatagaaaccccgcccgttgtaaccaaaatatcacaactttgcaaagcactttcaagggtggaaaaagtggctttctcatcatcttttaaaagaggaaaaacccttgtatcgcaatttaaatttttagctaaattagctatggcgatatgatttgaagagcggatttgagcaggattttccaaggcttctcctagatctttgatctcacttccactacttaaaacccctacaataggctttataaacacactaatgtgaaaaaatccaagttcagctaaaagagctatctcgctataatttaactttgtgccttttttgagtaaaatttcatcttttttatagttttctcctaccgcacgcacggcaaaagcttggggaacttttttttctataaaaagagtatcattttctatgcgtatattttcaacagggactaaagtatcgcttccttcgctcatgagtgagcctgtaaaggtttttacacaagtgccattttgtacgctaaattgtggcatagtgcccgcaggtgtgaggcctaaaatttttaaaggcttgttttgatcttcaaatttgatcgcataaccatccatagccgaggttggaaattcaggctgatttttaggggcttttatgtcttgagctaaaatgcgtcctaaacactctgtaagagctattttttcaatcttttcataagttttgatatgagaatgtaaaatttttaaactttcttcataagacattagcattttttatccttttaaaagtcctgcaccgcaaagcttggttgatctttctttggcataaattctttctttgtttatcacatcatacttccaaatgggcgcacttgctttaaaatcttcaacaaattcattaagaagtttaagtcctaattttctttgtttgcttaaaattcctgcaaaatacgagctttcatgaaccgccacatcgcctatagagtgagcaaaaagcaagctaataccatcaaaatctactcttttttgccactcatcaaaccatttttttaaaagcggttcataaatatcaaaactaagtgcctcaatacctccttcttcacgcacaataccacaaaaagtcagtaaagcaccgcagtttttatccttggaaaattcataccattggctataaattttaggaatatctaaagagccttgataaagtgtaaaatgtttcatttagcctccacaaactggcggtaaaagtgctattttatcaccatcttttaacttggtgttttcatcaaaaatgatttcatcatttaaagatacagcacaaagttctagccattcttttaaactctcatctttttgcaaaatttcttttaattcttttaaattttttacttcaagttctaaattttctttatttatagggcctaaaaattccacttttaccattttattcctttacttctaaatttcccatcattcctaaatcttcatgttctaaaatatggcaatgatacattctaagtcctttaaaatcttgtttcattctaagtcttaactcttcattaggacgcacatttatagtatctctgaaggctctaaattcggctttttgaactttgccattgagttttgatgagatgagttcaaattgcgtgccgtgtatgtggaaaggatgatccatgtgagatttatttatcactatccagtcttcaactactccaagcttggagcttaaatcaatgcgttttaaatcatagcttttgccattgattaaaaacatagacgcaagagcgatttttaattcattttcactttttcccatcattccatgcatttgcatatgatcttcactcatgattatttctttaaattccttaggttcttctaaaggtttgaaaatttttaaattttttggaagttctaatttttctttttttaggttaatattggctagaaatagggtattagattcttcttttaccatcattttatccctatcataataagcactttctagcttaaaattcccatcttttggagcgtcgattaaaacttctacacgagaagcaggacttaagaaaagttcttctttataaatagctttttctataagtccaccatcagtaccaacaagtataaacttagctccttgtatgcgtaaatttaaatatcttgctgcagtagcattataaatgcgtatgcgttcgtttgtggcgagtttgatttgaggtttaaattgtccattgatgagtacaaattctccttctctaccatttagccaatcatttaggttgttgtttggaatttgagcgttttcatcaagacgcaaatcgctaatcatcaaatctttttcttttaaatgacttaaagcatctttttttgctttgatcacaaaagcccctgctaaacccataaaaacttgtttagaagccgtataatgaggatgtggatgataccagtaagttcctgcgctatcttgaggaatttcaaaacgatatattctttcttctcctgctaagataggatcatgtgggcttccatcttgatcaggtggcacaggaacgccatgccaatgtatagttgtagtttctttgagtttatttttgactaaaatttcaagtttatctccttcaaaaacttctatttttggagcaggtactaggccgttgtaagtataaaataaggtttttttacctttgataagttctatatgattttctttgatttctatggtagcacgaaaaatatttttttctttactttcatttttgagcaaaggtaaggcttttaaaatttctccttgggggaattgttttggatctaaaagttttaaattttttggagcaaagtttataaaagaagtatctaagtcatgatttatagaatgatttttatgcatagagtgcatatcgtgcataggatttgcataggctacacccatacttgctagagtgagtgcattaaattttaaaaaatttcttctattcattagtttttccttttgtttgattttttgtattatagccattatttttttagttttagtaaatatttattttgaaaatttggtttaattttgttatgattttagcaatttaatcaaggaaaaataatgttttatgaaaatattcaaaccccagcttatattttggaggaagataaattaagaagaaattgtgaaattttagcaaatgttggtgaaaaaagcggagctaaagtgcttttagctctaaaaggttttgctttttcaggggcgatgaagattgtaggtgagtatcttaaaggctgtacttgtagcgggctttgggaagcaaaatttgctaaacaatatatggataaagaaattcatacttattcgcctgcttttaaagaagatgaaatgagtgagattgctcatttgtctcatcatattgtttttaattctttgtatcaatttgataaatttaaatccttgtgtactaataactccttaggacttcgttgcaatttggaattttcttttgctcctaaagagctttataatccttgcgggaaatactctagactagggattttgagcaaggatttagaaaattttgatttaagcggagtagaaggacttcattttcacgcactttgtgaagaaagtgctgatgctttagaagctgttttaaaggcttttgaagagaaatttggcaaatggatagggcaaatgaaatgggtgaattttggaggagggcatcacatcaccaaaaaaggctatgatgttgaaaaacttattgctttgtgtaaaaatttcagtgataaatatagcgtgcaagtttatcttgaaccaggtgaagcggtaggttggcaaacaggaaatttagtggctagtgtagtagatatcatagaaaatgaaaagcaaattgctattttagacacttcaagcgaagcgcatatgccagatactatcatcatgccttatacaagtgaagttttaaatgctagaattttagccacaagagaaaatgaaaaaatttcagacttaaaagaaaacgaatttgcctatttgcttactggaaatacttgtttagcgggtgatgtaatgggagaatatgcctttgataaaaagcttaaaatcggcgataaaattgtttttttagatcaaattcattacactattgtgaaaaacacaacttttaatggcataagacttccaaatcttatgcttttagatcacaaaaatgaacttcaaatgataagagaattttcttataaggattattctttaagaaattaaaaattttttggaagaataattttattatttctttttagcataaaatattttttaaacaacaaaatgaaagttttgttttttaggcttaaatattttatgcaacttttttataaaaaccttatcaagatactattttataggcttttaaggatagattctattttttcatatcaggcagatttttaagagaaattcagttccttttaaaacaaatcatattaagataaatcagtcaaaaataaggattaagaaggaaaattaggtgtaatttgcataatattatctgtctcttatacacatctccgagcccacgagactcctgagcatctcgtatgccgtcttctgcttgaaaaaaaaaaaac

SEQ ID NO: 3826 - DNA, 16876 bp, synthetic construct
  misc_feature 1..16876: note = Synthetic
  source 1..16876: mol_type = other DNA
gtttaaatgatgcaggtactttgaattttgattcttctaaatttgaacaaaaagttaaagaagatccagactctactgaaagttttttttcaaatattactaagtatgaggacattaattatacaggagaggtaattaagcaaggaagtttgagtcaatatcttgatcctaatggcactggcaacaagggtttggattttcaaccaggagattttactatagtttttaataatcaaacatatgatttatctaaaaattctgatggtactaattttaaattaacaggaaaaacagaggaagaattgcttcaaaatttagctaatcatataaacagtaaaggcattgaaggcctaaaagttaaggttgaatcctatgatcaaaacggtgttaaagggtttaagttgaaatttagtggagatggtagttcggatttttcaatcaaaggaagtgatacaattctcaaagaattgggattatttaatgtaagtataacatctaaacctattgaaggcaagggtattttttcaaaattaaaagccacattacaagagatgaccggaaaagatggttcaattacaaaatatgatgagggtttaacaaacgatattaaatcactaaatgcatctaaaacttctgttcaagctatgattgatacaaggtatgaaactatggcaaatcaatggttgcagtatgaaagtattctaaataagcttaatcagcagctcactactgttacaaatatgattaatgcagcaaataattcaaataactaaggatagataatgcaaaataatttagcctataatgcttattctcaaaatcaagtggggatagaatctccacaaaaacttatcgaaatgctttatgaaggaattttacgtttttgctcaagagccaaagtagcgataagaaatgaggatatagagcaaagagtgtattttgtaaaaagaaccacagcgatttttattgagcttattaataccttagattatgaaaaaggtggcgaagtggctcattatcttagtggtctttacacaagagaaattcaacttttatctttggcaaatttggaaaataatgaagcaaggattgatgaggttattaatgtaaccaaaggcttattggaagcttggagagaagtgcataacaatgaagcaatggcttagtgattttaaacttgcactcatacaagaggatgttaataagcttgaaagtttgctaaatgcgcttgatttaaaaaaaatgcttgaagatcttgcaagagattttcaaaatgatgaattaaaagataaattaaatgataatttaggacaaattaaagcgcttttacaagaagcagttgttttaataagtgcaaaaaagaattctaaggcttgtgaaattcaaaaaattcaaaaagctttaaaatattttaaagcatagcgataagccgagttctgtctagaatgctcatttatctagttttgttttcgcaaacaaaatcaagcgaagggttaaaacaaagaccttaaccatcccttcttgctgcacattgggtttacatagccgaaattgttgccaaaatcgctggtaagcttttacctcaccgtttcaccttttccacttttgtggtagttttctttctgttgcactgtcccttaggtcgccctagccatccgttagatggaatgtttgtcttttgcagctcggactttcctcttctttttttaaagaagcgagcatttactatgctttaaagctaaattctaacaaaaaaatgcttattttattatcaattatattgtgatatcaaataatttttgttagaattataatttatttttaatataaaaggaaaattatggcatcttattcaatgggtgatttaaaaaaagggcttaaaatcgaaatcgatggaattccttttaaaatagttgaatatcaacatgtaaaaccaggaaaaggtcctgcttttgtgcgtataaaaatcaaatcttttattgatggtaaggttttagaaaaaacttttcacgcaggagataaatgcgaagctccaaatttggaagaaaaaactatgcagtatctttatgatgatggagaaaattgtcaatttatggatacagaatcttatgagcaagttgcaatcagtgatgaagatgtaggcgaagcaaaaaaatggatgcttgatggtatgatggtggatgtactttttcacaacggcaaggctattggcgtggaagttccacaagtggtagaacttaagattgtagaaacagctccaaattttaaaggtgatactcaaggttcaaacaaaaagcctgcaacgcttgaaacaggtgcagttgtgcaaattcctttccatgttttagagggtgaagttatacgcgttgatacggtgcgtggagaatatatcgaaagagctaataaataaaatttttacgcgtacagatttttttaagcgcgtttgattttatcgcaaaaaataaatatcaaattcagcaagtttgtataaattaagatatttatgtaagattttaaaatatattatttcagcttttaatgcatgcaagcttaaaagctgaatttaaagaattatttacttgtcaattttactctaaaaatatattttgcaatgtattcaaaatattttcttaaataagccctatgaataacaaaacctcctaaaagtcctaaaagactacctatgataatatcttgtaagcgagcgtgtattagcatatcaacatttaaatttccaaaagaagccgcctcggccaaataggtcacataaggtgtaagaaaaatgacagctaaggcatagtttctaactactaaaaattcaattataaaggctaaaaacatcattaaaaagataaattctaaaggagtgaatttaattcttaaaagccaccatgcaaataaaattccaactgttgttccaagaatgcgttgaagttgttttatccaaactgaatttaaattagtcccttgtaagataaccgttgtgctaactgcaacccaataacttcgatcaagttctaaaaatgttcctaaaaacacagcaaagccaacaaaaaaagcaataattatagaatccacaaagataacatcaaaacctaaatttccattttttaaaacgggtttgggtggagaatttttaaaaatataaatgacagatacagagtataaaaaagcagttatattagcaatgataccgcctatacagattagtcccactagaaaaatataatcttttggcggaaaaggaaaaaacgaagctagtaaacaggaaaaaacgaagaaaaaatatcctggcgcgcctatattataatagcgtatcaaaatagagctagccatagctactaagccaactacaagcggagagaatgcaggaaaaaaatgcgtgtaaagtcctattaaaaaagacaaacataaaccaaaagagcagcacattgtaacagccattctatgatacataggtgtattggttgtataaacaaaagccatgattcctatcatagcaattaatcctaagtccatacgatcataatatgcagcaatactaagcgcaaatccaactgctaaggcaaagaaaaaaggcatttgccaaactctttcggttggattaagttgtatgatttctttacattgttgttttaaaatttttcttttactcattttcttatctgtccttctccactgattaagtatttataggtgcaaatatcttcaactcccataggacctcttgcatgaagtttgcttgtggaaattcctacctctccaccaaagccaaattcacccccatcgctaaaacgagtcgaggcattgacataaatgcaagatgagcgtagaaggcgttgaaatttgcttatgtttaaagcattgtttgagattatggtttcagagtgtaaagagctgtgttggttgatatgctctatagcctcatcacaatcttttaccgattttatactgatagcataatcaagccattctgtatcaaaagtgctttcatcagcctttgaaatttctaattttgagtttttaaaatgttctaagatattttcatgtgcgtgaatttttaccttaaatttttcaaattcagggattaaaagctttataaaatctttagcaattttttcatggattaaaagggtttctagagcattacaaacgcttactctttggcattttgcattaaggatgatttctaaagccatatttaaatttgcactctcatccacaaaagcatgacataagcctttatcttgtttgatgagtggaatttttgtattattggcaatttcttgtatcatgtttgaacttccacgagggatgattacatcgattaaatcatcaaaagctaaaatttgcatgatttcatttctttcataaaacatagcaaagcaatcttgcaaattaaactcttctaacactttataaacaagatcaaatatggccgaatttgtaaattttgcctcactacctcctttgagtacgcaagcattggagctttttatcatcaaagcgatgatttcagcacttaagcttggtcttgcttcataaatcacactgattaatcctataggaatgctgattttttctatctttaagcccgcataattaacccagcctttagaaattttacctataggatcttctaaataagcaatcttttccaaagcatcacaaagagaaaaaatgcgtttttcatctagcaaaagtctatctcgcattgctccgcttttggtaaaatttgtcatgtctttttcattggcttctaatatgattttaaaattctctcttaaagcacaagctaatttcaatataatattttctttatccttgggagttaaattgagcagtttttgagaatttttcttaatattttcaagtaaatttcgcatttttaatcctttatttacaaaaaacttgataaattatacaaaaaaatttagaattgaaaggtaaatttgaatgaaaaaagtagatttaattgtagtaggtgcagggccgacaggaattggttgtgcggttgaagctaagcttaaaaataaagaagttttggtactagaaaaatcaaacaatatttgtcaaactttgatgcagttttataaagatggcaaaagggttgatatggcttataagggttgtgaaggcacaaatcacggacatgttccttttcaagatggaaccaaagaaagcactatagagacttttcaaaatgctttaaatgagcataaaatagaagttgagtttggctctgaggtagagagtgtgaaaaatgaaaatggagtatttttagtaagtacaggcaagggtgtttatgagtgtaaaaatatcatcgtagctataggtagaatgggtaagcctaataagcctgattataaacttcctataactttaataaagattattaatttcaatgccaactctgttttaggtgatgaaaaaatcctcgttgtaggaggtggaaattcagctgcagagtatgcagtagatttagctaattctaataaagtaagcctttgttatcgcaagaaagaatttacaagattaaacgatatcaatcttaaagatattcacgaagctggaaattcaggcaaagtagaattaaaactcggtatagatatagaagagcttgaggatgataatggcaaagctaaggtgaaatttaacgatggcagcagcgagacttatgatagaatcatttatgctatcggcggttctactcctcttgattttttacaaaaatgcggaatcaatgtcgatgataaaggagttcctttaatggatgaaaataaacaaagcaatgtaaaaggcattttcgtagcaggagatatcgcaactaaaaatggcgcaagtatagtaacaggtttaaatgacgctgtaaagatacttgccgtaatttaatcaaatttagcccttgggctgaatttgacttattaaactttcaatattataatttcttcattatattttaatttttaaatattatcatgcaaacacaagataaaaacaataaaaaaatcatatcgatagaaacctatcgcttagctttctacatactaggacttcaaacactctattagctccttttaagatatttgtattgttaaatattttaaaggattttttatgtcaaatatttttagcaccttaagtccttttaggctttttgttaaatgtgctgtgcctaatgtaataagcatggcatttatttctttttattatattgttgatggaatttttgttggaaaatatctaggaaatgaagctttagcggctttggccttgattatcccttttattatgatatcttttgctttggctgatatgatagccattggttcagctgtgcaaatttctatgcatttaggacttgggaagaaacatttagctagaaaaatctttagttctagtatgttaattatcttccttatttcatgcttggtaggtattttagaatatcttttaagtcctgttttgatcgattttttagatgtaaatgaagatatcaaatcaatggcgaaagagtgtatgcttgtatttgctttgttcgccccctttactatgtgttcttttgctttggataattatcttagaatttgcggaaaaacaacttatagtatgacaatgaatgtgattatagcattgagcaatatagtgcttgattacattttcattgttgtgttgggttggggattgttttcagcagctcttgcgacttgtttgggacttatgttaggtggtatttttggaattttcccttttttatttcaaaatttagagcttaaattctcaagtttgtatatgaatatgaagattttcaaaaatatagtttataatggaagcagtgaattttttggcaatatctcgggttctttatatggtatatttgctaatttagttttgttaaaaatttcaggcactcaagcggttgctgctttttctatcgtttcatatattgataattttatcattatgcttattattgctatgggtgatgcgatgcagcctgcgttaagttataattatgctaaaaaggatttttcaaggattaaagatattttaaaggtaatgttttttgcgggtgcgattttgtctttgctgtctatcgtgatgatatttgttttgggtaaggatttggtgggattgtttactcaagaaggtgatcaagaatttatcgtttttgcttatatggctttgatattgttttcttttaattatctttttgcatggtttaatgttttaagcggttcttttttaacagcgagcaataaagcgagtttttctttgattttaagcttgagccaaaatctttttattcctttatgttttcttttgattttatcttctatcatgggcttaaaaggagtgtggcttagtccattttttgctgaattttgtgttttggttttagcttgtatttttgttagaaaagtctttaagaaactatcgtttttataaggatagtttctttggattgattttagaatttatatcctacgcctgtaagtaagatgtgatatgtttcatcgtaaaaatctatatcgctatttcttttttctaagccataatttgcaaaaccataaagtgagttatagcctaagaattgattttttacgagcttgagattgaattttgtaatgctaccatcttgtttttggttaaaaataggatcggtgccatctgctttgtattgatttaagcttaggcttggagttaggatatagttttttgcaaaaactagatgtgtgcctattttaaagccatatcttgagtagctttgagcctttccatcagcatcattataatcatagtttaagcctaaatttaataaagaataattatagcttaattctaactcatgataatttccctctcgtttaagagaagcaaattctatactttctttatttaatttattttttgcaaaaacataagaagcgttgaattttccaaaatcactttcataaagttgtgaaattctaaagccgtatttacttacatcggtttcttcacgattgcctataaaataaggattagcataagctttttctcttaaagatgaaatgaaagaaaaagaagtgctaaagcgttctaaataagctctttcatatcctaaggaaataccgcttaaatcccttccgttgtagtttttaagaaatattctatcattattgattaaattaccataataaagctcaagacctataaaagggatagcagctgtatcggaattatcggcattgtatccgcttagatagtcactatttgctagaggtgagatattactcttaacatctcttacacctactcctaggcttaaatttccactaagaccgctttgaaattcaatagatgaagcttgacttacaaataaagaggccaaagcaaaagaaaataaggtttttttcaagataaactccttgatagtttttgattaaaattataactttattgtaactaatattactttaattttttataaaaagcttatgtgaatttttagattcttttagataaaatctttcaataaattttactcaaaaaaggaaaataggtgcagcaagagcattttgatttggatttagaacgcgcaattttaagtagttgtatcatgagtgaggatgcttattctagtatagcaggagatatagaacctaaggattttagtcttaaagctcatcaggatgtttttaaagctattattgcttgcgtgaatgctggagagcctatatcgattagctttttaaaaaagcataaaaaaatagacgagcaaattttaaccgagattatcgcaactccttcgataatagatcttcccgcttatgtcaatgaacttcgcgaaaagtcgattaaaagacagcttttaagctttgcccatcttttgccaacaaggatcaatgataatcgcgcagtcagtgaaatttctgatgaaattggcaaggaaatttttaacatcaccaatcgtgtaaacaccaacgatatcaaagatatagaaatagtcttaagcgagcttttggaagaatttaaaaaacaaaaaagccttgaaaacaaatccgtgataggacttgatacaggatttgaagatctaaatactatgactaagggttttaaaggtggggagcttatcatcatcgcagcgcgcccaggtatgggaaaaacaactttgtgcttaaattttatagaaaaggttttaagacaggataaaggagtggtgatgttttcgcttgaaatgcctgctgctcaaatcatgcaaagaatgctttcggcaaaaacttccattcctttgcaaaaaatcttgactgcggatttaaatgataacgaatgggaacgcataggcgatgcttgcaattattattctaaaaagaaattatttatctatgatagtggttatgcgactatcacagatgtaagagcgattttaaggcgtttaaaggctcaagaagaaagtatagggctttgcgtgatcgactatatagggcttatgatgagtaattctaattttaatgataggcatttgcaagtcagcgaaatttcaagagggcttaagcttttagcaagggagcttgatatgcctatcatcgcgctttcacagcttaatcgttctttagaacagcgtgcaaacaagcgtcctatgatgagtgatttgcgtgaaagtggggctatcgagcaggatgcggatacgattttgtttgtatatcgtgatgaggtttatagggagcaagatgaaaaagagcgtgaaaataaagcgaaagccgaaggcaagccttatcaaagaaattttatccctaatcctatgcaagaaaatgctgaaattttagtcggcaaaaacagaaatggccctgtaggggttgtcgaggttttatttttaaaagaaaaatcttgctttgtggataagccacgatttgagagtgttgaatttcaggagtaggtttaaattgttagaggtgctttgatatgaaagcaatgttatttaaaatcaatcataaaaattatataaaagcgagaacgaatgaaaattttaggttttgatatagggattaactctataggttgggcttttgttgaagacaatcaattgcaagattgtggtgtgagattatttactaaggctgaagatcctaaaacaaaagaatccttagctttacctagacgcaatgcaaggagcaatagaagacgactaggaagaagaagatcaagactgattgctttaaagcatattatttcaaaagaattgaaattaaattatcaagattatatggcaaacgatagagagttgcctaaggcctatgaaggaagacttataagtccttatgagctaaggtataaagcacttaatgaaaaaatagaacccaaagatttagcaagggtgattttgcatatagcaaaacatcgtggctatatgaataaaaatgaaaaaaaatcaaatgataatgaaaagggtaaaattttaagtgctttaaaaacaaatgctttaaaattagaaaaatatcaaagcgtaggagagtatttttataaagaatttttccaaaaacataaagaaaatacaaaagattttataaatatacgcaataaaaaaggcagttatgacaattgtgttttggcaagtgatttggaaaaagaattaaagttaattttagaaaaacaaaaagaatggggatattcttatgatgataattttataaaggaaattctaaaagttgcattttttcaaagacctttgaaagatttttcatatttagtgggagtttgcaccttttttgaagatgaaaaaagggcttgtaaaaattcatatagtgcttgggaatttgtagcattaactaagattattaatgagttaaagagtttggaaaaagagagcggagagcttgtatcgagtcagattatcaatgaaattttaaatcatgttttagataaaggaagtatcacttataaaaaatttagagaatacattaaacttcatgaaagtatgaaatttaaaagcctaaagtatgataaagacaatgcagaaagtacaaagctgatcgaatttagaaaattagtcgaatttaaaaaagccttaggagagcattctttaactagggaagaattagatcaaatagcgacttatatcactctaattaaagataatgagaaattaaaaattactttagaaaagtatagtttaaataacgagcaaatcaagaatttgatagaaattgatttcaatgatcatataaatcttagttttaaggcgcttaatctaatcttgcctttgatgaaagaaggaaaaagatacgatgagggttgcaagcttttaaatttaaaaacaaaatcaaacaatcaaaaattcgatttcttacccgccttttgcgatagtatttttgcacaagaactcaccaatcctattgtaaatcgcgctataagtgagtatagaaaagttttaaatgctttgcttaaaaaatatggaaaaatgcataaaattcatatagaattagcaagagatataggactgagtaaaaagcttaggactaaaatcgaaaaagagcaaaaagaaaactatgagaataatatttgggctttaaatgaatgtgaaaattttggacttaaggcaaatactaaaaatattttaaaattaaaactttggaaagaacaaaaagaattttgtatttatagcggtaaaaaaatatccatagaacacttaagagatgaaaaaactttagaggttgatcatatatatccttattcacgaagttttgatgattcttttttaaataaggttttggtttttaccaaagaaaatcaagaaaaactcaataaaacaccttttgaagcttttggagcaaatgaagaaagatggagtaaaattcaagctttggctcaaaatcttccctacaaaaagaaaaataaaattttagatgaagcttttaaaggcaagcaacagcaagattttatcagcaggaatttaaatgatacaagatatatttcaactcttattgttaaatacacaaaagaatatttagattttttacctttagatgaaaaagaagacataagtttaaaaagtggagaaaaaggaagtaaaatacatgtgcaaacaattaatggaatgcttacatcagttttaaggcatacttggggatttgctcaaaaagatagaaataaccatctccatcacgcacttgatgccacaatagtcgcttatagcacaaatgccattataaaagctttttcggattttaaaaaagaacaagagcttttaaaagcaaaactttatgctaaagaacttacaagtgatagttataaacatcaagctaagttctttgagccttttgagggatttagagagcaaattttaaatcaaataaacaaactttttgtttcaaaacctcctagaaaaagagcaagaggagctttgcataaggaaacattttactctaaagatgaaatgattaaaaaatacaactcgcaagaaggtgtagaaatagcactaaattgtggaaaaataagaaaaataggtacaaaatatgtagaaaatgataccatggtaaggattgtgtcggcggaaaaataaaatttccatttggaaaaataaaacttccataaaagtggaaattttatttttctacaaaccttaaacttaaaatataactttattaaaataaaactaacaaaaaattcgtttatgatgttcatcttctttaacaatggttttcatatccaaataatgctttactatatattttggaatattaaagtcgtaatcagagtgtggctttaaatcaaaacgattaaaaggtttgtaatttttataatattccctactgttaaaaaatctaggttctactatgtcaaaacttgatgtgtctccataaaaatttggtggataatacatatctatactttcatcatcttttaaaaaataagtattatataaagcttcgctcaactcatcacccctatgcattatttgcataggaaaatagcttccttctggtatttcatttaaaaagaagttgatatagtagcgataagcctttaagcttaatttgctttttatttgaacgggatttgaaaattcgtgtaaatatctttttctagatcgtatatcttttttaagatattcaggaagctcactttgccattttaaatatttgaacatttgctcataaacctcttttaacaatccaatatcattacaatctttaactgtatatgccaatattttttcatacttgttaagctttaaaaaatcgttccaagttactggaaaacatttgtataaaaattctttcctaacaaactctccataatcaatttggctagtttgaattaatccagccgtgcaagctaattcaacctcaacatcttcattctctggagtttttatggtaaaaatttcatgtgaagttgtttgaaatttgttaaatttcaagtccttttttcgctctttttctttttcaaaattttcatttattttttgcattctttgtttatgtacttcatcaattttttgaattctttgcttgtgtgcttcatcaattttttgcatttcctgcttatattcattccaaatttcttttaccggcttatttggtattccttttatttttctatataaataattacataagagaaaaataaaaataactgctaatatcgataatactatattcactttatttcctttaaattatataatagaacgcaaaaccttaccctgtataatgatttcaacttgtgagtcttttaagtccaaactatagcttttataatccttatttacactaataatatctaaaactttacttattggatctaattgcaaaagtttaaccataagttgattatcaaagtttaaaatgtatagtccatctccttgatactcgtgtatttcttcaaatataacccaactatcaggtaaaagcattggaatcatagagtatccatcaactttgatagcttttacattttttggagttgttttaaaaaaggctttactaagttcaagcatttcacctgtttcgtattcctctaatcctatcaactcattacctccaccagcagaggctgaaatattaagttttggtatagaataaaaattaatttcttgtttatttctatctttatttagtgcattttcctctttatcaatgtaaaattttttacttaacttgcttatattatcaaaatattttttgctaataggtgttttgcctttttctatattaataatttgctgtcttgttaaattaagcttattacctaattgttcctgtgtaagtcctaatttttctcttatttgtttaaaatcatttgcggtcatatattacctttataaaaagtaaaatatttaacatattttattgactaatgtaaaattttttactataatacttcaattaaaattgaaattttatcacaattaaaaataaacttcaattaaaattgaagtattgaaggagaaaaaatgattaaagcatattttgaaaacaatgctattaatgtaaaagcttttgctagaactcacaacattagctacgatattttacacagaattatcaaaggcgaaattacaggtgaaagaaatactaagggtagtacaaaagcggtatttaaaaagctcttagagctcggcatcattaatgagcttccgcaaggattaaaatagtgtatttcttagaaaccaaagaagctgcacaagcttttaatgtaagcacaggtgctttgagacttgcagcaagtagaaactcaaataaatacgagtggttaaaagtagataatgaaaaaggcggcaggggtggcaaaaaactactatttaaaataagcaaagataagcttttaaccgcctttaaccaagaattaatcactaaaaatactttaatttatgatgaaaaaatgcaaaaagttaaattgagtgaaattattactaccgataatttaaaaactataaataatagtttaaaaactagtaatttaaatttaacagagtcaaaaataaatgatgatttggctgttttaaatttaaaatttgaaaatttaagcgatgaacttaaagaagatgcgaaaagtaaagtaaaattacttaaacaagtagaaaaatatattgaaggtggtcttacactcaaaagagcattgtttttatgtaatgtagaatggagaaattattctaactggcgttcagactataaaaagtatggcattctaggcttagtcgacactcgcggacttcaccgcaaagataaaactaaacttagtgcttggatgcaagaatatgccttaagagagtatcgcacctttggagcaggtggatttaatttcactgagctttggtggcaaattcataaagaagcagctactaaagaaaattatgactttataggttttgacttaggggaagtaaagccactctttagtgtaaaaaccttacaaaatttcattaaaaactactacaaagataaaccattagaacattgtattatcactcaaggcttagatcgtgcaaaatctaagtttctccctgcacaaggaaatcaaagagagctatatgatatgaaaaacatgtgttggcaaatcgatagttccccagctgatattatagtaagagatgatgaaaccttagagcctttccgccctcatatcttaagtgtcgttgatgtctttagcggtatgggtgtggctactttagtaagtaaatcaaattctttaagtttgacgcgtcttttatggaaagctatagataagtttggtaagcctgatatgattaaaggggataatggaaaagattatctttctaaagattttcaaagcttgcttgatgggcttaatattacctatgatgcagctattgcttatgcaggagaacaaaaagctttagttgaaagacgctttgggacacttcaacatgcaggaatttctaaaatgcatggacatattggcaataatcttgccaaaagagaaatgatagagcaaaaaactcctaagaaagaaagaaaagctaaagatgaatacggctttgctaaaaaaactaatcaaaaactccttcacaccttcagcgaagcttgtgagcttttggaagctgaagtgatcaagtggaacatgagcaaagttcgccgcaaaaaaggcgttaaaactccacttgaactttggaactcgtgcgatagagctattgtaaaaatatcttatgaagaatttttgtttaatgctgggaataaagaacttagggtcgtgggcaaaaaaggcattaactttgaaagtagagtttataaaagtgctttaatgccaagtgttggcacaagggttaaatgtgtgcaaaatatcgataatattaaagaacttttcatttatgatttaagcggaaactttctttgtctagcacttgatgaaagtatcgctaaacttagtaaagaaagctataaaatgcttaaaaaaggttatgaaagtgaagttaaagcgattaaagaagtgcttaaaaaagatgagattgccgcctttactaaacttaatattaaacaagacttacaagatttacaaagtgcttttgaaaactcactcgtagaagctaaagaggtgcatcaaaaatcccttgcaaaagaaactttaaaaactcaaagagaattagaagagattaaaaacaatgctaatgcagatgagcttattttaaatgctaaaaaagaaataaataacgatgaaagcgagtttgacatggaagcttttgtcgaaaagaaatattttgctggttaaaaattgtttaaagcttgattaattcaagttttaaagagtttttataaagctctaaaacaaagatgcccccacttcagtgggacgggggctttaggtggatgcaaggagcaaagctcctgctcacaaagcggaatttacttccgctgtgaagttaagagaaaggata

SEQ ID NO: 3827 - DNA, 16325 bp, synthetic construct
  source 1..16325: mol_type = other DNA
  misc_feature 1..16325: note = Synthetic
accattagatttgcacgagcagttttatatctgcgagggctttgcaactgctaagagtatagaaattctgcttgataagccaagcataatggcggtagattctggaaatttaataaatgtatgcgaggcactacttgaaaaatacccccataaacaaattactatctgcgcggataatgatttaaaaaatgaagtcaatacaggacttaatgccgcattaaagtgtaaagaaaagtatcctcaaatcaatgttattaagccaagtatggcggataaaaatattagtgattttaacgacttaatgcgtcttaagggtgtagcagtggcaagagcagatgttaaatcacaactagcagtaacgcaaatgcaatacaaatctcaagataaggaggtgggaaatgaagctgtaagattctaatttaaagcagtaatgcagaatgcgataagaaaaaatcacaatcaaggagaattaagatgaatttaacacaagaacaaaagcaggaggcaaaagagcttctatcaaagcttgaaaatctttataatcacagagctggacttgatatactcaaaataaatagagaagatacattgagagaggaaatagctagtatatgtgatataagaaataaacaaggagaaatccagccaaacaaggtaaaaatgcctttgctgttggcattaatagatgaaatattctttgataaaaccaacaagaaagaggaggaatacgccttaatggactcatacagacaagctttatcaggcaaagatgtcaataaagatacgattaatgcctatgtagcgttacaagaggagattaaggaaaacaatcagaatctaaaagaagtattcaaagaaaccagcactctagataaagaaatccttgacgctattaatctaatcgcaaaagaaagatacaaagagattcttaatagcaaaaagcttaaggttggaatggaagtaaaagagccgaaagatatgtctgcaattctaacacttatcaaggagcttgaaagtattttgaagtaaaataagcatagattaaggggtatcccccttaattcttactcttgtgaaaggattttgcggtctatctatactatataatagctagataaaattaaaaattgtgtataatttgatttctattagagttatgaaattagggattaaaagttatgaaagcaaatgtcattgatttattttgcggtgttggtggtttaagttttggacttaaaaaagctggctttaatatacttgctggatatgatgtagattcttcttgtaaatatgcttatgaaaccaatattcaagcagattttattaataaaaacataaaaaatacttttgctagtgaaatcacaaactactttaatacttcaaagtcatctattaggatacttgtaggatgtgctccctgccaaacattttcgcaatatacacaacaatctaaacgaaaaataaataataaagatgatgaaaaatggacattgttgaacgaatttttaagaattgcaatggaggttcaaccagaaatcattagtgtggaaaatgtgcccaatctgatgaaatacccaatctttgataattttatagaggagctaaagaaaaacaattactacattagttatagcatagtgttttgtcctgattatgggattcctcaaaatagaaagcgattggtattgcttgcatcaaagttaaaagaaattaagattattgataaaacccataataaggataactatgcaagcgttagggacaccataggaaatctaccaaaaattaaatctggagagcaatccaaacttgataaattgcatatttcgcgcgcactaacatctataaacattcaaagaattaaagcaacaccaaagaatggtgggagctggaaagattgggacgaatctttagttttaaagtgtcataaaaagccaatagggaaaagctatggcagtgtatatggtagaatgaaatgggatgaacctgctcctacaatgacaactttttgcacagggattggtaatggaagattcggacaccccgaacaagacagagctattagcttaagagaggctagcttgctacaaacttttccgatagactatgatttcattgaaaacaagaacgagcctccgaaaatgggaacaatatcaaggcacattggaaatgctgttccaccaaaacttggagaagtgatagggttgagtattaaagagcatctaaaggattacaaatgagtgataatataattgaattttcaatagccaatcaagcggcaacacatctaggcagaaaattatacaatagcaatccccctgcacttgcagaattagtagccaattcttatgatgcatatgcaacaaaagtcaatattatgataaataatagttttatttgcgtgattgataatggtagagggcttaatatagatgaattgcgtaataaatatgcgaaaataggtaaaaggaaaattcaagaattccccattaatgacttaagtgagagaaagcctatggggcaaaaaggaattggtaagcttgctgcttttagtttgggggacgaatattctgtatataccaagaattcattgcagaataaatggattactttcaagttattatattcggcttttatgaatgatgaaataacatatcctgtagaatggagtgaagttgataatcttcctgattatttaatgcaatataacaattatgattcaggtttcattgtggtaatagagagaccaattagaacgccaacacaatctaccatagccaatttaaaagttcatttatcaagaagattttatattgcttctagtgaaaccaattttactctctatattaataatgaaatagtggatttatatactcatgaatattataaaaatatagattttcttgtgtattttggctatacgaacgatgaaataaattcaatctttccaaacatagataatgataaaaaaatcaaatatactaaaaacaaagaagtggttgattatattgatgaacatgtagaagcaggattcaaaggatggtttggaagcgcattaaaaccgaaacaattgcaaacaaaagattatgattttaacaatgtcattgtttatatacacaaaaaaattgctgatgagaatatttttaaggatagcggtaatgctcgtatggcaagccaatatttagttggagaaatacaagctgattttttgcattcagacgattctcctattacttcaagcagacaaggattagatacttctgatgaatatgtaaaagaatttattgagaatcttgattttataagaaaattttttatagagaaatgggatgaatttagaagcaaagagaccatagaatatttgccagaatcaattaggaacaatgatagttataataaatggttagaaactctagagccaaatgaaaaaaaattgcatgataaacttttaaatatgatgatgaagcgtattgatacagcagaagatgagacaatgcaggatagggaaataaaacaaatgatacaatctattgtaaatacgataaacaatgttcaaatagtggaaatagagaaaaaattaaacatacaagaaattgatgataagtatattgattttttaaatatcttaatgaataaaatagaaaaatctgaagcaactaaggcttttgaattggctaagcagagaatttcggcaataaaagaacttgaaaaaatgttggaagaaaaagaattaaaagaaaaattttttgaagagcatttatataaacatccttggttgattaatccatattggaatcaaaaaactagcaatcaagattcatttaatacaataaggcaaaaatattataaaagtattgataaggagggagatcaacatagaaatttcattgatattttaattgaaacagcggaagaacaatatcctatcatagttgaattaaagaaaaatacgccaacaggacatgcaaacatagaatatgaggatataacaaaacaaattaaacaatatagacaagcagtgatgcaaaatttgccaaataatatacagaaacccataaaaccgacagaaattaaagcatattacattatttctgaagatgctggattgaaagatactggaaataccatttcattttcagaagatgaaatgaggtatcttaaagattctaatattgaattgttgaaatataatcaaattattagtaacgcatattcatcttatgatgagttcataaaaatcataaagcaagaaaaaaagattcctaattttgattaatttattaaatctcctgttatcgcattaaagtaaatcttctgccttgtaagatagaacttcttataaagaattatggataaagaccaagagaatgggagaattttaaaaatacttaaagaaattgataaaatggataaacaatgatttgtgcatttactttgtaagaccagctctctgccatatttgataaaagctacgcagagcttcgcttttctaaaaatggtgatgaaacaccaaaaaagaatttagtattgataatcgccctgtttttttgccttaatagctttttattttggagtttttcctctgcttttagaaatgcgaggcatttatcaaagcaatatttatttgtgtggttctgccacacaaaatatgttggtaattttgactttacgcaaaattacttgaccgattaggatttttaagataaaatctaaaattagattttatcttaaattatatatttaatgtaattttaagcttttatcttgctgaattaaaaacttttgtcatttgggaacttttaagggaacttcttacaattaaagtcttataaaacactataaataggcttatttgataattttattagaatcccttcctctctgccatagattttacattttttgataagtaactttatgaaatatatgccatttttttatcaagataacgcacaagcacagaaagactaaaacaaatcacaaaatacactcctgcaatcaatccaatcatagcaagtatttcttgaaaactcgctagttgggctaatataatcttagattgataagtaagctctgctatttgcaatcctgccaaaaatgaagtatctttaaaagtcgtaataatctgcgaaagcatagaaggaataacttttctaaaggtttgaggcaaaataatataaaaaagtgtaaaaaattggctaaaaccctgtgaatatgctgcttcaaattgtcctttaggcacagagttaagcccgccgcgaataatctctgccataaccgagcttgtataaagcgaaaaaccaatagttccccatattgcaggttcagctcgtccaaaaaaactcggcaaaacaaaaacagcagtaagcatccataaaagcaaaggtgtatttctaaatacttcaatataaatagctgcaagagaacttataatcctgccaccataattgcgtgtaattgctaaaaatgtgccaaaaatgatagaaatcacacaagttgctaatgccacaacaagcgttagataaagcccatcaagtaaaaaatgaagatttgattgattaaatacatttcccataatatcttccttatcgctttaagtgagcagttttaagtctatcttcataaaacttcgcaaaatatgctaagggatagcacacgataaaatataaaaatgccgcaaaaagatatgccggtgcataattgcttgtatctccagcataactatcagctacatacataatttctccacctgcaataatcaaaagcacagaagtatttttgataagattcactacttgattagtgattggaggcaagatgattttaatagtttgaggcaaaataatataacgcatttgctgtgtataagtaaagccctgtgaagcagaggcttcaaattgtcctttaggcacagcaagtatcccgctacggacaacttcactcacataagcaccgtgatatgcacccactcctaatacacccacactaaaaacatcaagatggattccaagcggaggcaaggcaaagtagagaaaaaatatctgtatcactaaaggtgtattttgaaaaatctcaacatacattcgtgtgtaagcacgaagaattgtaatcttgcttgtcgccataacaccaccaatcgtgccaaatataagtgctataagcaaagctaaaatgctcacactcaaagtataaccaaagccagaaagaaactcgttactttgagcaagagtgtcaataaacttccacatcgcaaatgggctggaactttcctcatcatataagcctatatactccaaaaatgtgcgtagattctctacccaacttacactatccacgatattacaagccccacttttttgctaattcatcaatttgtgctttattcttttttacaaatgtatcaataaaagccgcgaattctttatctttttttggacttacaataccatactcttgaggctcaaaactatcagagagaatctcgctttttttatcaacataacctaaaagaattgacttatcaacactaaaggcatcaatacgttttgcatcaagtgcagcttttatgcttggataatctggaaattcattaaatttcacatttatgcctagtttttttgctgcagaggcaatggctcttttagaggttgcggcttgagctaccccaatagttgcatctttcatatctgcaagtgatttataacccttttctttaagcacgagcaaacccacagaatccttataatagggttcagaaaagttataagtgcgtttgcgttcaggcgtaattgtaaaggtcgcaatcacaacatctatgctcccattatcaagcaatggtcctcgtgtcttggcattaactgcaacaagtttgagtttattttcattgcctaaaatatgctttgctagaagttttgctacatcaatttcaaaacccttaatctcttttgttttttggtcaagcaaagcaaaatgtggaatatcatttttgacacctaccacaagctcatcttttttcttaatatcttccaacatacctgcatttgcttgcaaagcaaacatacttaaaaacaaaaataatcctgccactttgagcaatcttttcacatttacacaacttctcataacatctccttacattggtttaatgacttaaaatttttcccaagaatgctttagctcgttccgtttttggagacgcaaaaaattctttaggcacactttcttccacaatagcaccatcttccataaagataattctatcgctcacttcccttgcaaaacccatctcgtgcgttacaacaaccatagttgtattgctttgatgtgaaatttctcgcataacatctaaaacctcttgtatagtttcagggtcaagagcagaggtaggctcatcaaaaagaatatagggcttttgggtgcaaagacttctcgcaatcgctacacgttgctgctgtcctccgcttagtgtcgctggataaacctttgccttatctacaagccctacaacttcaaggtatttataagctaattcttgagcctcttttttacttttacctcgtagtttaataggtgcaagcgtgagattctcaagcacattcaaatgtggatagagattaaaatgctgaaacaccattgcacaatattctcgacaaatctttgtttttgttttatgattaagcgtaatgccctctacaactacctcgccagaactcacctcttcaagcccattcatacatcgaatagtcgtgctcttgccgctcccacttggtccaatgataacaagcttctcgccatctttaattgtcaaattaatatcttttaatacgtgatgacgaccataaaatttattcacattttttaattcaatcacattcaacccttatgtaaaatatacaacaaacgactttaacataaaaaatgtaaataatgccaaacaaataaaaagtagcagattctataataaaattgttaaattaaattgcccacattttttccacaaaccatttatcaatgggcatttttctaagaatccaatgcttcctctgccttttttacgccatttttccatagtgtatgcctgtgtaaaatgtagtctgcactcacttttccactaaacattccactaagcaaaggacgatttgctttaaagataaaagcagctaaatgcccaataattgctaaaatcatcaaaaacattcccaaattatgcagctgcgtaacccaaaacattgtcccctcacttagattaaatcccgctaggtttttataagttttaatcattccagtaacaaccaaaagcaaaatcaccatcgcaattcccacataagcaagtctttgctcgggcaaatatttctcacttggtggctcctctcccttaaacaacatcgccttaatcacagcaatgcttttaccaaaatcgccctttttagggagtatatcaaactcctttcgcccaaaatgaaacatcaaatggaatcccacaaagaataataaagcaatcgcaaacacataatgcacaactaaagagatagaataatccccgctccaagccattaaaggcaattcattgagcatataacgcttactgattggcatttgcaagattccgctaaaaataagcccaaaaatacttattgcaacaccccaatgcacgattctattttgcgcactttgtctttgtatttttgcctctttcattttctctcctttttatcggttctatttgccattgccacagcaatacctcctgctattacccccgcaacaggagctaaaagcacacttttaatcaaagcagaatcttcactcacaaagtttttaattgcaagattcatatgcggaatccccattttttgtggttgttcttgtgtgaaattgtgtttttggtttaaagattcttggatttgctcaaacgacactggcgagacataaaatgtagaagtgccaccattttgcgtatccccatagatataagtcccctctttgtctcccttatacgctttttccaatgccttagctttggtaagtatttcctctctatctccaaagattatggcttttttagggcattgcacctcacaagctggtttttggttcttggcgagtaaatccgcgcaactatcgcatttatacattgctcctccccctgcaagtttaggtgcgattttcaaatagattccaactcctgcttgtctttgtggaatcccccaagggcatacatctctacattttgcaccgccaaagcaatattcatcatcaatttttaccgcgccattagaatccttagagataacaccaaaggggcagagcttctggcaagtcggatcatcgcagtgcatacaacgtctaggcacatatatatctctatcctcaacctttagagattccacataagtccaattataaggggttaaacgcttagtatttgctctatctttggaataatcctcatagacttttcgcggaaaataatacgggatctccgctattggctcgggaaaatttgtcgtattttttgctttacacgcatcaacacaagcgggaatctccctatctctgcacccatcgcacaatcccaaatctataatggaagccattttatattgtggttgcttagaatctgtagattgtgccgcattaacgcttacagcactcacacttgccacgcctagaaattttaaaaaatttctacgcgatgtatttgtctgattgttttgattggtttcttccataattttaaccttgatttagccttaaaaatatggaagtatataaaattgcaaagaaaataaaagtgatattatcacatttgcactaagccctacccaaacattccattaaagtcattttcaatttgagtatatctagtgcagcggcaatttgtctacgatgatgcgtagcgtggtaaaataacgaaatagaataaagcaatataaatctaagctattataaacaatatttaatgtatcgttaatgagttttaatagatggaggtttgtaggtgaaaattttaagttttgacataggtattacaagtattggttgggcttttgtagagggagaagaattaaaagattgtggggtgagaatcttcaccaaagcggagaatccaaaaaatggtgattcacttgctgctccgcgtagagaagcaagaggggttagacggagattagcacggagaaaagctaggcttaatgtgattaaaagattgctttgtaaagagtttgggctaaatttaagcgattattttgcaaatgatggggaattaccaaaggcatatgagacaaccaaagataccaaaagcccctatgagctacgcactttagccctaagtcaaaagctagattctaaagacttagcacgggtgattttacatatcgctaaacatcgcggctatgggaacaaacacgcaaaaacaggaagcgataaagattctggaaaggtgctaagtgcgattaaagtaaatgaaacagctatgaaagataagtatcaaagcgtaggtgaatacctctataaagaattttatcaaaaagaaagattagaaagtgagaaaaaaagtaacaataccacaaaagaatttaaaaatgtgcgcaataagggcgaaaattacgagcattgcgtggcacaagagcaagtaagggcagagttagagctcatctttacaaagcaaaaagaatttggattcccctttagcgccaagacttacaaaatttcttatgaaaatggtgaggcaaaagagctagattttacctctgcgattatagaaaccgccttttaccaaagagatttaaagagttttgaagataaagtcggcaaatgtgtattttacgaaaatgaaaatcgcgcacccaaagattccttaagtgctatggagtttgtcgcactcacgcgtattatcaatactctaaaaaatcttgaggagaaaagtaagaatcttggtattggtgaaacctatggcaaagataagattcaagagattctaaaaaatgtgtttgataaaggcgagatgagttataaagaattgcgaaaaatccttaaacttaatgagtcaattttatttgctaaagattctaagcttgattataccaaaggaatgcaagaagctgaaaaggcaaagtttattgagctaaaaaatcttaaagctttcaaaaaagcaatgggtggagactttagcaagtttcctcgtgaggagctagataaaatcgctaccgatattgccctcattaaaagcaaagaaaatttagctaaaaaattgcagaactattccgcattaagcaaggagcaagtagaagccctaagcaatttgagttttgcaaagcatattgatttaagccttaaagcacttcataagattctgcccttgatgtgtgaggggttgtgctatgatgaggcggtgaaaaaggcaggattgcaagagcatagaaagcataagcaaaagggcgagtttttaatcccgctaaaagactatgaaccctatttagcaaatccaattgtggcaagggcattaagtgagtatcgtaaggtgctaaatacacttttaagaaaatatggaaaagtgcataagattcatttagaatttacgcgtgaggcaaaactaagcgcaaaagagaggcaaaagtatgaaaaagaacaaaaagagcattttgaggtgaatcaaaaagcaatacagcaatgcgagattctagaattacccattaatggcacaaatattcttaagatgaagctttggttggagcaaggggaatgttgtatttatagtgggcaaaaaattacaagagaacatttgctagcttctaatgccttgcaaattgatcatatttacccttattcgcgcagttttgatgatagctatatgaataaggtgcttgtgtttaataaagaaaatcaaaacaagcttgataaaacaccctttgaagcctttgggagtgataaggagaagtgggataggattcttagctttagcgcaaatcttcctaaacaaaagcaacgtagaatcagcaataaggactttaaagataaagagcgtggctttattgcaagaaatcttaatgatacaggctatatcgctagacttgctagtcaatggagcaaagattgtttggagtttttgccactaagcgaaaatgaatgcacaatcagtggagagaaaaatagcaaagtacatatagaagtagtaagcgggcagcttaccgcaactttgcggcattattggggcttgggtgataaagatagaaataatcacctccaccacgcagtcgatgcaatcatcttagcttacacgaatgcaaagaccaaaaatgtgtttgcaaattttaagaaaacgcaagaacaaaataaggcaaaattctatgctaagcaaatttcagagcaagaatataaaaagcaaaaagcattttttgagccttgtgcgaattttaggcaaagagttgaagaaaaaattaatgaaatatttgtctctaagcctcctagaaaaagagcgagaggagctttgcacgaggagacattctattcttttgaggacgaaaaactcttaaaaagctatggtgggaaacagggtatagaaaaggcgattagtctaggaaaaatccgccaagtaggcacaaagattgtgagtaatggtgcaatggtgcgcgtagatatttttaaggacaaaaaaggtaaattctatgctgtgccaatctatacaatggactttgcacttggaatcctgccaaataaagcggtagtgcaaggcaaaagcaaagaagatggggtgattaaagattggatagaaatggattctaactatacattctgcttctcactttttaaagatgatttaatcttggtgcagaaaaaagaaatggaaaaggcggagttgtgctattttgtaggttttggtgtttcaactgcaagtattcaagtagaaaaacataataataaatttgagggcttaagcgagaatgaaaagattctttattctaatgctacacaaaaggaggtagtgggcaaaagcataggaatccaaaatcttaaaacctttgaaaaacaccaagtctcacctttgggtaaagtgcaaaaggtagagtttgaatcccgccaagagattaagctcaaaagtagctctaaaagaaaaggctaagattctataaggagggcaaggaatgtttgattcagcctttcgcaccttatttttaagcacacctgcctacttaagcctagaggataaacatctttgcatagcccaaaaggacaaagagagcgtcaagattccacttgtggatattttgtgcgtgatgttagaatctcatcaaatcacattgacaaatgcactgcttaatgcatttgctctgcataaaattgttgtttttacctgcgatgaatgccacctaccaagtgggctatttatgccatttttagggcattttagaagttttagcgtgttgcaatcccaaattaacttaagcaaacaaagaagggcgattctgtggcagcaaatcatcaaggcaaaaattcacaaccaagcccttttactaaaaatgcaaaacaaaaaagaatatgaggagttagaatctttagcaaaaagcgtgaatttaggagattcaagcaataacgaagctaaagccgcagtaatttatttcaaagctctttttggtaaaaacttctcccgcaaagtgcaaatttttgaagagagtaaaatgggaacgataaatgctgcactcaattatgcttatgcaattatacgaggagtgattacaagaagcctttgtgtgagcggactaaatcctgcacttgggataaatcataaaaatcagtttaatgcctttaatttggcagatgatttgatggaaccttatagaatctttgcagattctgttgtcgtgcagatggttgaagttggggaattagaggagagcttaagtttgcaaaatcgtgtgaagctggtaagtattttgcagagtgcggttatcgtagaaaataagctttatccacttactcgtgcaggcgttgtgagtgcgcaaagtgtagtgaaatgccttgagagagaaaatcttaagcttaaactgccgctattttgcgaggaaaagagtaatggaagagaaatttatgagagtgttagtgatgtttgatatgccaacttgcagtaaaaaagagcgtaaagattatgcgagatttcgtaagaatcttattaaagatggctttatgatgctgcaatatagcgtgtatatgagaatctgcaaaggtgtagcaagtgccaataattatttggataaggtgggtttgattgtgcctcccaaagggcatattagggcattaatccttactgaaaagcaatttgataatatgcgattattgctaggcagtagaagcgagaatgaaaaagcaaatgcaccaagacagcttacgcttttttaggttaaaggatagagatctaaatacttagattcttaaaaagatttgttaaaaggtaatgtatcaataagataactcggttttaaagggattgtaaccctgcggagaccgaaaactccttattttagccgcttattaaattctatgttaggattatatcttagattttcttaaaaatcactcatctaagatatttaaagtctttcaaataccgaaaaatacgataattgagaaagtgtattttaccataaaagaatttaataagcggctaaaaccatttaggacaacggcatttcccgctaaatattttaccataaaagaatttaataagcggctaaaaccttgtggtgagtatggttccagaacttttcattttaccataaaagaatttaataagcggctaaaacttaaatttcgttcaattgcggaagcacataattttaccataaaagaatttaataagcggctaaaacaatctttagttccctctcatcttagttcttattttaccataaaagaatttaataagcggctaaaaccggctggttatattgccgcaaataaaccttattttaccataaaagaatttaataagcggctaaaacgctagtaaagtgaggtgttaaatgttaaagattttaccataaaagaatttaataagcggctaaaaccaatagtcgaatgccttttatgatcataagattttaccataaaagaatttaataagcggctaaaacgcagtgtgaatgttagtggtcaatctcattattttaccataaaagaatttaataagcggctaaaactaagatcagcataatcccaacaactataaaattttaccataaaagaatttaataagcggctaaaactcaggcaatgctgattacaatcagtctgagattttaccataaaagaatttaataagcggctaaaacgaaaagttaggaatgttagatgtacaatcaattttaccataaaagaatttaataagcggctaaaacctcataaatctttgtaagattcttatccttattttaccataaaagaatttaataagcggctaaaactaggagattggcgtttacccgttttgcaaagattttaccataaaagaatttaataagcggctaaaactaatactttgatatgttgagcattaacaaggtttgccatatcattattatgatttcatacatttgataccaaaataaaggacaaaaagtgttaaaacaaaatattaaagatgagattatggagtacggaatctacaccatacaaaatgaaagtgagataccacagaatctaaaagaaagtaaatatactttttatgtcaagataaatggtaaggatataaaagattattgtattgattatatggatattatgcaaaatgcttttttatttcacacaaaagattgtataaataatcctatggctttttacgattggatgtcagattttatcttggctttattacaataaagaaaaaatacaggttataataatattattttggtctttgagtattggaatgaagtaggcaaaggtttcttcaactcgggagaaaaactgagagagaatattggagagtttcatagaaacaaaaaatgagaatccaaaaaataatgaaggaattttaaagttattagattttgatattttcaacatctatttaatctcataaatattagattatgaaagtgaaaggagatacccgcataatagaaaataagaaaattacttattagggaggttatcgggaagtagaaaaatgctttgaattttatttatatgatttttatctctttactgcttttgccctttgcactccatagacttggacttcctgaatccttaagccttgcggtgtgggttgtaggagcagttttaatgtttatctttagtgtgcatatcgtgcaattttggatttgcaa

SEQ ID NO: 3828 - DNA, 15551 bp, synthetic construct
  misc_feature 1..15551: note = Synthetic
  source 1..15551: mol_type = other DNA
cgctgtgctgtggcttcgccatagctttgcgcgcgctttttctggggattctttgtaactagctatctgtcattgcgagcattcgttagaatgcgcggcaatcaaccgtgcgtgaatctagaatcatgaggattctgtgccattacattgcaacgcttacgctcgcaatgacacaagattaccgcttcgcattatttttgcgtcattgcgagcaaccaacgaacaacaaatcccccgccctcctgtcgtcttgccaataataataagaaagcattcaaaatatagcttttttctattgattaatgagaatgaaactaggaatttatgattttaacatgtgccataaaatgggcactacaaagcgctatccaactttgtgtgcacaatttcaaaaaaacttcacactaacttcacatttaagcgctagtatttctcatttatttttaggaggataccatgaaaaaaatcatctggattgcctgcgtctgttcattgagcgccgcaacgctcaaccaaagcatgcaaagctacatcgagagcctcaaactcgaggcaaagggcgaggattccgcgtttgtggattttagcgcgagcgaggggcaaaaaatcttcacgacacaaaacatcggcagagacaaccaaaagctttcgtgcgagagctgccacgggagcaacctgcaacaaagcgggcgcaatgtcttcacaaacaaggttttgccgccgcttgcgccaagcgcgaacgccgagagcctgaccgaccccaaacaggtgcaaaaatggctcaagcgcaacttcaaagacgtctatctgcgcgagggcagcgcgaaagaaaagggcgatgtcctttattatatcctcacaaaataggagctgaccatgaaacgattccttttgcttcttgccattggcttggcggcggctgcgcccgagtttgtcgaggtggcgcaagacgattcgcgatttgcgatgtttgggaaaaggggcggcgggcgcgagattgcgcctgtcgataatgcgctatacaaaaaggaatgcgcgagctgccattttggctatcagcccggtctgttgcccgcgcaatcgtggagctacattatgcagaatctcgagaagcattatggtgtcgatgcgagcattgacgagcaagaccgcgttgctatcacgaactatgtcctcgccaactcgagcgagaaggcggcggcaacgtatcgccgcagcgcgaagttgacagcttcgatgcagcccggcgtcatctatttgtcgattaccgagattccgtatcatatcaaaaaacatcgcaagattgataaacatttgattacccaaaaagaggtgggcagcctcgcgcgatgtgcggcatgccacacaagcgccgatgagggcgtgtacaagaaacgtgatgtgaagattccaaactatggggcatggcgtgattgagagctatatctggagctttttcaatcgcttcgtccatgtcgtgatgattgtcagctttgcgcttgcctattgcgtgcaagatttcctaccaatccacatctttttcggcactctctttggcgcagcggttgtgttgcgtatcgtctggggctttgtgggcacaaagcattcccgcttcgccgatttcccctatcgcggcgttttgggctatctcgcctctgtctttggggcaaaaaggcgcttcgtggggcacaaccccgcgagcagctgggcgattttgctcatgctctttcttggaatctgcacggctctaagcggcatgctcgaggcaggaatttctaagaatcagggaatcttcgcgtttttgcacgaccaatacagccgcgtgcgattcctcgatgatgtacatgaaatgttcgccaacgccctcctgctcgttgtttgcgtgcatatcttgggcgcgctcatcgattggctcgtgcacaaaaacgactcggtggcttcgatgatttcgggattcaagaaaacagagggcaacgaaagcattgcgccaaacatcgggcaaagaatcttcggctttgtcggaatcgcgctgctcgcggctatcgccgttttcatgctcggcgacaacccgctaaccaagagccatgcgcagccaatcgactatgcggcgctgcacaaagattttgcgaacgagtgcggcagctgccatgccatctatccgccgtttttgctgcccaaacacagctgggcgctgatgatggacgatttggagaatcattttggcgatgatgcgagcatcgattccgaactcaacgccgagattctggcatttttggagaaatattctgccgaatcgtttgacacgaaggttgcgcgcaacatcatcgaaaggcagacagattccgcgaacatcgcgattacgaagaatccctattggatagagcggcatgcgcacatcgccgaagacgtcttcgcgcagccgagcgtcaagacaaaggcgaattgcttcgcatgccacaaagatttggagcatggaatcctcacgctcgcgcgatgagcgctcatatcattaaagatttatcttttttcgttagaatcgcgtctatgaacaacaaacattttgtgcgcgtggcgcattctcccgatgctgatgatatttttatgtactacgcgctcgcgtttggctgggtcgactgccccgatgtgtgcttcgagaatctcgcactcgacatcgagacgctgaacgagaacgcgctgcgctcgagctatgaaatcagcgcgatttcgtttgcgctctatccgctgattgcccaaaactacgcgcttttgcgcacgggcgtgagctttgggcagggctatggaccaaagctcatcaagcgcaagggcacgcaacttaagaaaaacttcaaggtggcgctaagcggtgcgcacacgacaaacgcgctattgtttcaaatcgcctaccctgacgcgcgcgttgtgtataaaaattttctcgacatcgagagcgccgttgttggcggcgaagtcgatgcgggcgtgctgattcatgaatcgattctcaattttgacgcgagcctttgcgtggagcgcgagatatgggagatttgggagaatctaagcggtggcgcgctgcccctgccgcttggcggaatggcgattttgcgctcgattccgctgcacctcgcgttgcaaatcgaggagctgctgaccaaaggcgtggcgatggcgcaccatcacccacagattctaagcaacatgctccatgagcgcaagcttttgcgcattagcggcgcagagctcgagacctatctccgattctatgccaacgagcattctatctctctcgatgacacgcagctagacgcgctcgataggctctttgcgctcgggcatgcgcatggattctatccgcaaaagattgccgcgagagatttcttgctgccctctgaatacatggcgttgcggcattcttagcctgcacaacacaaaatgagacgcaacgtcaaaatgagaaatccccttgcaacacaaagccacaagtccttaattttcgttttactaaacttgcattatcatgccgagaatcttttatcaatgtgaggtagtgtagagctttatgggctggttgattggttattttctgtttgcggttgtcatctcgtttgtttgctctgtgttggaggctgtgctgctgtctatcacgccgccattcatggaaagctatgccaaaaaccacccgaagagtggcaagattctgcggcacttgaaggcaaacatcgataacgcgattggcgcgattttggttgtcaacaccttcgccaacaccgtgggcgcgtcaggcgttggcgcgcaagccatcgaaatctttggcgaggcgtggcagggcttcgtggcgctctttatgacgcttagcattctctatatctccgagattctgcccaaaaccatcggcgcgacatattggaagagcctcgttttgcccgcgagctatctcatctatgtgctgtatttcatcacctttccgttcgtgtatgtctcgcgcatcatcacgcacatgttccgcaagggcaattccgacaacatgagtcgcgatgagattctcgccgttgtcgagctcggcgaaaaaagcggctcgattaacgagctcgaatccgacatcttggagcacatcatcgcgcagcagtcgctatcgattgccgacatcatgacgccaaaagagcagatgttctcgctgaatgacacgatgacaatccacgaagcgctgctcgtctctgacacgcacaaatactcgcgcattccgctgctcgatagcgagggcaacgcgccaaatctcgtctatcggcagcatttgctgcaagccaacctcgagaaacgtgggcaggagagcatcaagagcattgccacagacttcgagcaggtcgacgaaaacatgcacctgctcgacttgctcgaaaattttatcgtccaaaaagagcatttgttttgcgttgtgaatagcaaaaagaagctgattgggattgtcgcactcgaagatgtcatgaacgccgtgattggcgttggaaatctccaacgacactagaaaggacgggatatgctgctagcactctattgttttatcgccattgttttcacctttttgtgttctatcatggaatccgtgtttctgtctatcacgcattcctttgtcgaaagctacgaaaagaaaaatccaaaaatcggcggctatctcaaacatctcaaggcaaatgtcgatgacgccgagggcgcgattctcgttctgaacaccttcgccacaacagccgccgcaacaggcgttggaatcgaggtcgcgcatatctatggcatcgagtggcaggcgtttggcgcgtctttgctgaccgttgtgttgatttatttctcggagattctgcccaaaaccatcggcgcgacatattggaaaagcctcgcgcccgccgtaacgctctgcattcattatctgctcaaaatcaccttcccgctcgtgcttgtcgcgcggctgctcacgcattttgtcaagtcgagccaaagcagcattagccgcgatgagattctcgccgcgagccagattggcacaaagggcggctcgattgccacgcgcgaagaggcgattattgaaaatgtgctgatgctcaaaaattatcaaaccatcgacattctcacgccgcgaagcatcgttttttctttgcccgccgattgcaccgttggcgaggcactcacacacaaggggctgtattcgcattcacgcattccgatttatggcgatagcagcaacaccgacacgattgtcggctttgtccgcgcgcgggacattctcaacgagggcgtcaagaatgggctcgacaagaagctctttgacctctcgcagtcggtgtatgtcgtgcatgtcaatctctctgtgctcaatctgctgaatctatttattactaaagatgaacgtttgtttgtcgtgcaagaccgatatgcgcaattcgccgggattgttacgctcgaagacgcgattgagacattgctcggcgaggagattgtcgatgagtttgatgaagcaacagacatgcaaaaagcggcgcaagagaggaacaagacaatccgaatgaaatatctcgatagaatcaaggatattcaagagaagtcatagggggagcgatgggcggcgctatgttattcccttttccaatgtcgttgcgagcgagtggcgcgagtgcggcaatcaacgagcaagaaagccaacacgttcgattgccacgaggctaacgcttctcgcaatgacattggaaacataatgaaaaatcccgccatctgtcattgcgagcagagcgaagcaatcaaccgtgttggttagcccgcattgttgattgccacgctcgcgcctcgcttgcaatgatgattggagtcccaattaagaatcccggctattcgtcattgcgaggcaatagccgaagtaatcaacaggcaaagaatccccatattatcatgttgagcgcagtgaaacatttcatgattctcgcagtttgagattcttcacgcttcgtgttcagaataacaatcttgcgtcattgcgagcatgcgtgagcatgcgcggcaatcgacaggctcagaatctcgacacaatgaagcaacttgacaaggattacttgtcgataccaaaccaattatcagaatctttgcgcttttgcccgcaacaattctcgccgcacgcgttttagccactctttaagctcttccatgctagaatgcactttgaaaaactaaaaaaagcccgcgcgttttagccactctttaagctcttccatgctagaattttcgcgcccgattttttgcgagtttaaaagttttagccactctttaagcctttccatgctataatagcagcggcgagggcgcgtgtcttgtcttgttttagccactctttaagcctttccatgctataatcttataagaaattaaatgcaataattctgcgttttagccactctttaagcctttccatgctataataggtaatccataatggttagtaacactactgttttagccactctttaagcctttccatgctataatgaagatttaacatttttaatggaaaaattagttttagccactctttaagcctttccatgctataataacgtgaacactttgttggtcggcgtcagtgttttagccactctttaagcctttccatgctataatcaagtcttcgccaccagtaataaactcttcgttttagccactctttaagcctttccatgctataatacaccctttgaaaggggcgcgttttgcgggctttgagcggttttgtagttctcaaatacccttgaaaaggtctttttagggaacattgggatacaatggcatcggaaggtttaaagagtggctaaaataagggagttttcggtctcccgcgggattccaattccctacaaaaccgagctttattgttcgtttattttttggcatgctgtgtccaatgctcacatgggaactattccccaaaaattttgtggcgcattgcagcgaacccaaaactaatttttttctaaaaaagcatgagctgtttgggtgtattcgctttctcatttttgtgtctcacaccaaagaagcgagcgcatgttgtcaggctgctttattgcgcgttttgcttccccgtctcttgttattcgtcccacacccacaaaaacttgcatacagcttactccatgttgctatatttatttttaagcttttttgttttatcatgaaatttataaaaaggcataggagaaacgatgaaaatttttagttttgacatcggcattgcaagcattggctgggcttatattgaagatgatgtgctcaaggattgcggggtgcgcatctttacgaaggcagagaatccaaaaaatggcgattcgctcgctgccccacgtagggaggcgcggagtgcgaggaggaggctggcgcgcagaaaaggaagactgaatgcgctcaaaaagctgatttgcaaagagtttggcttgaaactcggcgactatctcgcgcctgatggcaagctgccaaaggcttatgagacgagcaaagagaccaaaagcccctatgagctccgcgctctggcgcttgagcagaaactcgattccaaagatttggcgagggtgattttgcatattgccaaacatcgggggtatgggaataaacatgctaaagatgcagacgatgatgaaagtggcaaagtcaaaaaggcgattaaagagaatgaaaaaatactgcttgaaaaaggctatcaaagtgcaggacaatatctttataatgagttttttgaaaagccacgtgattttgatgtggagcaaaaatcttcaaacaacacacggggtacgcaagaatttagaaatgttaggaacaaagcagaatcttatgcgcgttgtttaaatcaaagtgaattacaaaaagagttaggctttatttttgccaaacaacgtgagtttggctttaattttagtgataaaaaatataaaattatcgatgaaaatggtaaattaaaagagctaggctttgaatctgccattatggagatagcatttttgcaacgtccgcttaaaagctttgaggataaagttggtaaatgcacattttatgctgatgagcctcgtgccccaaaagattcgcttagcgcaatggagtttgttgcgctgacaagaattatcaatattctagcaaatattaccaagcgtagcggtgaagtgtatagtgtggataaagtgcatgaaattcttgatatggtattggaaaaaggcgaaatgagctacaaaaaattacgcaaagttattaaccttgatgagagaatccaatttccaaaagattccaagcttgactatgccaaaaaagacgccgaaaacgcaaaagttattgaatttaaaaaactgaaaagttttaacaaggcttttggcgataaatgttttgggggacttgctagaaatgagcttgacaagattgcaaatgacattgcgctaattaaaagcaaagcagaattaaaagacaagttgaagcattatccaagcttaaatgaagaacaaatagagaatctaagtgaattgaattttgataaatttattgatttgagcttcagggcattagagcagattctgccctttatgcgcggagataaaacgggtgagtgtttgcgctatgatgaagcaattaagaaagcaggattgcaagaacataaaaagcatcaacaaaaggacaactttcttctgccgcttaaagagtatgaaccctatcttgcaaatcctgttgtagcaagagctcttagtgaatatcgcaaggtatgcaacgcattgcttagaaaatatggacaggtgcacaaaattcatttagagtttacgcgtgaagcgggcaaaagttatgatgagcgcaagaaaattgaaaaagaacaaagggaacattttgaggcaaatcaaagcgcgcagaaacaatgtgaaattttagaattacctcttaatggagcaaatattcttaaaatgaagctttggatagaacaaggtgagcgttgtgcttatagtggagaaaaaatcacactagaacatttaaaagactctacaatgctacaaattgaccatatctatccctattcacgcagctttgatgatagtcaaaacaacaaagtgcttgtttttacgaaagaaaatcaaaacaagttgaataaaacgcctttcgaggcttttggcacatacaaggaaaaatgggacaggattcttagccttgcaagcaagcttcctaagcccaaatatcgcagaatctccaacacacaatttaaagacaaagaagcgggatttctcgcacgaaatattgttgatacaggttatatcgcaaggttagctagtcaatggacgaaggattgcttgaggtttttacccttaagtgaaaatgaagtaacgattgcgggagagaaaggaagcaaggtgcatgtagaggtaatgaatggaagtttgacggcgatgctgcggcattattgggggcttgggggcaaaaatcgcgataatcacctgcaccacgcagtcgatgcggtgattattggtttcacaaacgcaagcgtcatcaaggcattttcagattttagaaagattcaagaacaaaataaagcgaaattctatgctaaacaaattgcagaatcggactataaggataaaagagcattctttgagccttgcaaaaactttaggcaaatggtgcaagaaaaaatggattctatctttgtctccaagcccccacgcaaaagggcaagaggagcattgcatgaaaaaacatttggttctatttgtttagaaaatggagaatggatagcaaagataaaaaatcttacagaaaatgatgagaataatgtagctaaagaaaaatataagattttatataggggcgagaaaaatgttaaaaatgcttttaaatgggggaaaatccgcagaattcacaataaaaataatagtgaagttcaaataggcgatatgtttgcaaaaaatgatagaattgttcgtacagatatttttaagcgcacaataaaaggcaagaaagaagataaagttgagtattatgctgtgcctatttatacaatggattatgcacttggtattttgcctaatagggcttgccctacaagtgttacaaataagcaagacaaaagtcttacagaatggattcctgtagattctaactatattttttgtttttcactttttacaaatgatttggtgtatgtaaagaaaaaaggaatgaaaaatcctgtgtttggctattatgaaggagtaaacccatctaattcatctattacaatagcaaaacacgataattatgcagaaaaagaagatttaagcgacttaaatgccgatgagcgtgagatatttaaatgtaagattgacaaaaaaacaggaaagacaaagataatcggtgaaggtgtcgggattagaaatttggaggtttttgaaaaataccaagtctcgccactcggtgaaatccaaaaggcagaatttacaccgcgccaacccatttctttaaaatctagccccaaaaacaagaagaaataatgtttgattctgcctttcgcacactattcttgagcacgcccgcaaaactcaagctcgcagacaaacatctgtgcattacccaagaagatgaggagaccgtaaagattccgctctctgatattttatgcgtgattgcggaatctcatcaaatcacgcttacaaatgcgctacttgatgccttcgcatcaagcaagattgtcctttacacatgtgatagttcccatttgcctagcggcatattcatgccctttttgggacattataggacattgagtgtcttacaatcccaaatctccctcaacaagcaaagaaaatcgattctttggcagcaaattatcaaagcaaagattcataatcaagcccgactattacaaatgcaaaataaagaggaatattttaagttggaatctttggagaaaggtgttcatttaggagattcgagcaacaacgaagcaaaggcagcggcgatatatttcagggctctttttggcaattcctttagtcgaaaaattgagagctttgcagatggtatatttgggacaatcaatggagcactcaattatggctatgccattgtgcgtggaatgattgtgcgcagtctttgcattggcggtctccaccctgcgcttggactctttcattgtaatcaatttaatcctttcaatcttgcagatgatttgatagagccctatcggatttttgttgattctcttgtggtgcagatgttgaaagatgaggagttgggagaaagtctcgagcttcaaaatcgtgtcaaattggcaaatattttaaatacaagcattttgattgatggcaagatatatcccctaagtcgtgcaatcgtagtcagcgtacaaagtttggtgcatgcaatggggcaggaatctcgattaaaactaccgctttttgaggagggtcaatcaaatggaagagaagtttatgagagtgctcgtgatgtttgatttgcccacaggcacgaaaaaagacagaaaaaatagtgcaaaatttcgcaaacagctcatcaaggcaggctttatgatgctgcaatttagcgtctatatgagaatctgcaagggggcaacgagcgccaacaatcatcttgatagactatatttgattctgcctcccaaagggcacattagggcgttgatacttaccgaaaaacaattcgacaacatgcgcctgcttcttggtgtgagaagcaaaaatgagaaagcgaatgcgcccaaacagctcacgcttttttagaaaactaactttgacattaagtgttgtgtatcttgagaattaaatttttatgcaaggaataatccccacataaaaaccgggtgagcttagggattcactaggctagcacccttgtgctagcttaaccctacgggaagctcacgtcccttattttagccactctttaaaccttccgatgccattatatcccaatgttccttaaaaagacctttttaagggcatttgagaaccacaaaatcgctcaaatctcgcaaaatatgccctttccaaagagtagattctagcatggaatagcttaatcgaacgataagaatagggcaaaatcgcccgactttgccctgcgctaggcgcttgtgaagattctaaaactcctcaacaagtcgcttgtttgccggttgcagcgggcggttgttcttgccgatgattttggtaaaagcctccatttgctcgcggctcgccgttgtgggctcacgcaaaacaatccattgcacgctttcgctgcaaggaggcgtggtgagcgagcccttgaaggcataatatgtgggcttggcggagaccaacgcgctcaaatcaaccttgctaagctcggcgctatcgcccgcttttgggggcattttgtcccaaatctgcgcgattgtcgggtttggcgctccctcgtcaaaaaacttcgcgataacgagaatctcgcccttgtcggtcgcatgcacgatgtgcgcgaccattgggtaatgcttgccatcgattgtgaactccgaaggcgtgtggaaatgtacttgtatgagcttgtaatctttgcccccaaatgtcagctccccacctttttcaaagtttacttgaatgctatgcccattattaacgacattctttgactcattcgtgtaggcaaacgcgcctagctcgtttttcgcgccttttttcgcgtctttgctcacaatgtcaaaagggctctgctgctgcccgagcttgcaagcctcgaaatctttggacagctcgccccatttgtcgacattttcatagttccacgaagccgccatgagcgagcctgcgagcaatcctgctgtgatgcctgttgtaacgatggtttttgtgaagttcataatgctccctgtttttgttgtattttggttaacccacatatataatagcctatttatacttaaatatggttaatgctgctttaatagcaagaatatatattttaggagcaattttagcttgagcattttaggtgatataaattttaattttaaaaggtcggcacttggagctaaaatactcattaatgtagcattaggttgtctagctaaggtttggcaagaaccacgctaattccatcgccaacgggcacaatcggaatctgcaattctgcggcaaaggcatcgacagcctttttgacgccgtcataggcgctgaaatagtcatcgacaatgaggattccgccggaaacaaggcgtgggtagaaaaacgcaagccccgcgaggattgggtcataaaggtcggtgtcgagccgcacgaagcaaaaacgcgaatcttcgagcccgcacgccgtgtcgggaaaccagcccttgcgcaccacgcattgctctttgtgtggcatttttgagagcacgagcgcaacggaggtgttgcccaaatgccctgcgcccatgccagcgacatgtgcgctctcactgcgcaagtctgccgccgcgaagccctcgaaagtgtcaaaaagatagagttttttggtcgggaaatgcgcgttgatgtgccgcgcaaagtcgccgcgatacacgccgacttcggcgcaatcgccaccaagggcgcgctcttttgcgagcgctgcgaagttttgcaagaagctttggcgcgcggcgaggtagggcgcgacatagccatcatcgattctatgcggcgcgatgcccatttcggcgagctgcgcgcgaatctcgcctgcgcccgagaagctcgcgatgatgattttgtcaaacgcgtgttcgaggattgcgcgcgggggcaggacatcaaagcttaatctgcccccccccccccgcactcaagggcaatggttgtgttttgtttgttggtgtcgttgtcgacgaagaatagaatcgtatcgcccttttgcaggcaatcgcacgcgaattggcgggcatacatcgccgcgccgaagagaatgaggttcatgaggactccttgatttggaattattggggatttggtttagtgttataggaataataacaaaaagtttttaaaaatgcttaaaccattagcgattgtttgattttaactttgcaaagcaaagaatattgtagtaatccacagctttggaatacaagttatatttaatttttttgtaatctcacaatgataaaaaatagaatctgcaattattttttaaaatttacaaaattcctcgatatttttgaaccatgctggtgcatcttttaacgatttccatctatcgttttctgataactcttttgcttcatcaatgattttttgttgaattttttgaaagtttttttcttcatctaatacatctaaatcatctttaaattgtatataaagatgattttgcttaactttttctaattcaatgccagtatcttcatttgcttttttgaaatattgattaatttttgcattgtccataggctctttaaagactacaatatctgaaacaacaaaataaccctcataaatatcatttatgggaatagatggtttttgcttctcacctataatttttgcaaaagcaataacttttggaacagtaggttttcccgcagtaggtttttcctgataaataaaacaaataaaacggggagattgctttattttgtctgttttaaaccaataaaccccattaccaacttcacatttcatatcgctattttctttatatattttttctaataatttaaatcctaagataagtatcttttttttaaaataccattcctgcacttgttgtgtgttggagttgcaaaactcgtcttctctctcaagtcttagcagtactcctttctcccttatatcaattttgcacccatttgacatcatagcctcccctttattaatataaacatacgtcatctgtaagaacaaaaacaatatattctattttttgactacattcagcattgtttccctttttctccccctccccgcaccaacctactttgccactcttgcaaagagcagtatcatcggcgatagagagcttaacttctaggttcggaatggggctaggtgtgtcctctcctctatgggcacgaagaaaagggaagagaagataaggttttgttatcctctattcccttttcttggggggattgacaagaagtatattgtcatagccttgtttgttgtcaaacacaatacgctcattaaggcagtggcgaataaataagccaaacggtctattagtagtagtcagctaaacatattactatgcttacacatctaccctatcaagcagctagtcttgctgcgaccttcagggagagttcatcttggagttggcttcccgcttagatgctttcagcggttatcacatccatgcgtagctacccagcgatgctcttggcagaacaactggtgcaccagtggcatgtccatcccggtcctctcgtactagggacagctctcctcaactctcctacgcccacggcagatagggaccgaactgtctcacgacgttctgaacccagctcgcgtaccgctttaaatggcgaacagccatacccttgggacctgctccagccccaggatgcgatgagccgacatcgaggtgccaaa

SEQ ID NO: 3829 - DNA, 15508 bp, synthetic construct
  misc_feature 1..15508: note = Synthetic
  source 1..15508: mol_type = other DNA
ccacgccgttttttaaaaaaacggctcgcaaggacagtatatcaagcattttacaaggcttgcctgcaatgaaaaacttgtggattgccacgccgatttcatctcgttcgcaataagactttgacacaaattcagcccatatttttaaaagggctattaaaattcaatagcccttttttggcgttttaagcaaaagccctaaaaaagcatttcttcgtcttttggcaaggcgtggatactacgctgtggaaaggggcttgtgggcgtgtaaaattcgctttcgccgttgtagttgcccttgcttacgccacttggcactttaaaataacgcctcgtgtttggaaaggcgcgcacatattgagtgataaactccctaaacacaggcgcactcgtccttgcaccgccctctgtggctttcatcggcttgttgttgtcgttgccaaaccacacgatgccctctatctcaggcgttatgccgacaaaccacgcgtctatgctttcgttgcttgtgcctgttttgcccgctatttctataccccccacgcgtgcgtttgcgcccgtgccacgcgcgatgacattttgcatcatcgaaagggttaagaaaacttgctctggctcggctacctttgtggcgttgctctcaaagtgtaaaatttcgttgccctctttgtccttgacgcttttgattaaaatcggctcgtgaatcgtgccgtagtctccaaacattgtgaaaaatttagcaaattcaagtggagaaatcccaaagctaccaagcacgatagaaaggtcgtttggaatgctcggactaaacccaaagcccatcagcttgttatagacattgtttagccctatgtcgatggctaaatttatggtagcaaggttgcgtgagtgcgtgagcgcgtctttaagcgtaacgatgcccttcattccgcccccaaaattgcgcggtttccaaacctctttttcatcctttttgcccccttgttttggctcttcaaacacgcgtgaaatgtccgctacttcgctcatcggcgagtagcccatatcaatggcgatttgatacaaaaagggcttaaatgagcttcccggttgccttaaactctgcgtggcgcggttgaaattgcttttgttataatccacgccgcccacaagggctagcacttcgccgctttgattatccactacaaccattgccccattaagagtgcttaaattcgcgtccttatcgcgcttgataatctcatcatacccaaagcgcaaggcgttttcagccattttttgcacgcgcaaatcaagggcgagttctatggtataaccagcactctttaagtcgggcagcacaggctctaaacgctttatcacctcatcaactacataaggggcggcattttgcgtgagcgtatcatcatagatagtaggcacaaagctcatcgcttgcttatattcagcctctgaaatccaacctatgctaaacattctttgcaagacattgtttgcccgcgaaagcgataaattcaagtttctcgtggggtcatagctgcttggtgcttttggcaagcccacaagcatagcgatttcttttaaattcagctcgtctaaattcttgcgaaaataccctttcgcagcggttttcacgccataatacccgtgtccgaaaaagatatgatttaagtagcgttctaaaatctgctctttgctgagcttgatttcaagctgataagctaaaagggcttctttgattttgcgtgaaatggtgcgctcgggggttagctcggtgtttttgacaagctgctgagtaagcgttgagccaccctccacagccttacccgctcgcagcattttaagccctgcgcgcaaaatcgcatcggtattgacgccgttatgctcgaaaaatgccgtgtcctcgatggcgattaaggcttcgattaaacgcggtggaatgtccttatactcgacataaaagcggtgttctttgtcgaaaatgttagcgacaaggttgccgtttttgtcataaagctgagtgcttaaaggcggtttaaagtccttaaaggtgtagttttccacgcctgaatttgaaaagagataaaacacataaaccccgcacccgataacaacaatcgccgctagagagataagaaatttcacaatgttactcataatctgcctttatagtttgtctttgatgagctttaaagcaagctcacaagcgttttgaatttgacttatgtccttgccgccagctgtggcaaagtcatctcgcccaccgccactgccgccaagcacggctgctactgcttttacaagctcgccagcctttatgggagcgttttttgcgccagctgcgagcattatcttgccatcttttacctgcacgagcaagatgacagccttttcataggcgtttttaaaatcatcaatcatcatctttatgtcgccctcatcaaccctagccacgcacacacgcgtgctgtttatatctatgcttaccagctcgcttttagcggcgtttttgagcttgtttttaaattcagcgttttgttctttgagctttttaagtgcatttgaaatgtcgtttgttttcagctcaaatttaagctctttgacttcgttgataaaggattttgcgtagtttaaagccgctaaactcgccacagcttcaattcttcgcacgccagagcttacaccactttcttttgtaatgtaaaaagagccgatttcagcggtgttttttatgtgcgtgccaccgcataactctttgcttgctccaagcgtgagaacgcggacaacgccttgatatttttcgttaaaaagcgcgatagctccgctttttttggcttcatctaaattcatcttttctaaaatagcattatcagcccttatcacgcattcattgacgagcttttcgattttgtcaagctcttcgtttgtaagggcatttgggtgagtaaaatcaaagcggagtttgttaaattcgacaagtgagccagcttgtgctatgtgagtgcctaaaatttcacgcaaagcatagtgcaaaagatgagttgcgctgtgatgacgggcgatttgagcgcgtttaatctcatcaatgtgcgcttttaccttgtcatttgcctttaaagtcttgctcgctcgcaccgcgcttaaattcagcccaaagaatttttgagtatcaagcacttcgctattgtccaaaaagcccgtatcgcctacctgtccgccactcatcgcgtaaaatggcgtaaaatccagcatcacccagcctatctcaccactttttagctcatttatgcacttaaaatcctcatcaagcaaggctagaattttgctctcattttccattttttcatagcctatgaattcattttcgccaaatttttcaagcaaaattttaaaatccccatttacagccttgtccccactgcctttccagcttgctttggcgcgttttttttgctcattcattagctcatcaaatttagcctcatcaacgcttaaatttttctcacgcaacatatcagcggtcaaatcaagcggaaagccgtaagtgtcataaagcttaaaggcaacctcgccactaaaaaggcttttagtgcgttttagctcatcgttaaaaatctcaatgccattttctatggtgcttaaaaaacgctcttcttcaagctgaatttgggttttaacaaagtcttttttttcgtttaaatagctataatgcccacccataagcgcacaaaggcaatcaaccaacctaaacataaaaggctcttttaagcccagcaaatatccgtgtcgcaaggctctgcgtaaaattcgccgcaagacatagccacgcccttctttgtcaaagctcaccccttgtgcgagcaaaaacacggctgagcggatatggtctgcgatgacgcggtagcttgctccgctttcataaaggtattttttcttgcaaagtgcttctatttcgttgatgagtggcataaaaagtgagctgtcaaaattgctgaatttcccctctttcaaggctacaacgcgttcaagtcccattcccgtgtcaatgcttggctttggcaatttactcatcttgccatcagcacttcgctcaaactgcataaaaactaaattccaaatttctaaaaagcggtctccgtccccgcccatataatcttcgctcgtgtgaaaatgcgcatcgccttggtcgtaaaaaatctcactacaaggtccgcaaggtcctgtttcgcccatttgccaaaagttgtccttgtcgccaaagcggtaaattcgctctttgcttaaatgcttttgccagagtttaaaggcttcatcatcgttttcgtgcgtggttacatagagcttgtcctttggaaattcaagcacttgcgtgataaattcccacgcataatcaataacctcttctttaaaataatccccaaagctaaaatttcccagcatttcaaaaaaagtatgatgccgtgcggtgtagccgacattgtctaagtcgttgtgcttgcccccagctcttatgcaggtttgacagcttgtgttgcgtggcgggtttgggcgcggaatttcgcccgtgaaaatgcttttgaaaggcaccattccagcatttgtaaaaagcaaactcgcatcatcaggcacaagcggagctgatggcactatggtatgtcctttgcttgcaaaaaaattcaaaaattcagcacgaatgtctatattttggtttgcgttcatcaaaaatcctaaaaaatttttgttatcatagcacaataatttaaatttagctagtttttggctataattttgcgttagtttgcttataggttaaatttctagctttgattaaggataaatttaagcgttttgcctttttggataaatttagctattattgtgaaagattttgtaaagaaaacacaaggaaaacagggtgaaaacatatcttttaaaaaacaaagacgaagcggttttgagctttaatgcagggcgcaaaaagagctgtgatgagcttttcatcagcgacataaaaatcatcaatgaaaaatttttgccctttcaaatcgacacaaacgcccttgaaagctcgcttacaaagtggctcaaaagcagaaggttgccagaacatagagtttatgccgatatgattttaaccacgcttgataaaaagggctttaaagatgattttatggactatatagactatggtttggggcttagcttaaatgatagcctttggatagtgccgcaaagtgaggatttaaaatgggcggattttagcctttacactcatcattttaacgcaaatttgcaaagtgccgcaaggggcgcaaaggctttgcaaatcgctccctttgtcaaatccccagagcttaccacaaacggaatgttgccaaaattttggcttaaaacacaggataaaattctgctttacaagggcgaaagtggcttttgtgagtgtggcgaagcctttggggagtattatatgcaccaagtggctgaaataatgggctttgagtgtgttttttatgatttagctgagtgtgaaaaccgtatttacagcacttgcgagctttttacgagtgaaaatgaaggctacgcacctataaatttttttcttagcaaagagcaaagaaagctcaaaaaaatggactttgcgaagatgattgagccttattttgataagcaaaaatttgaagatttaatgctttttgacgcgctcatttacaacacggataggcatttggggaattttggcttgatttttgacacgcaaacgggcgagattttgcgccctgcgccgatttttgacaatggttgtagcttgttttctttgcttcaaaaagatgatttaaaggacatatttggcacactatgcgtgcataaatcttattttgaccttgcttttatcgaccaaatagtgctttttgtgcgaaaaagacatatcaaaaatttgcaaaaattgctgaattttagctttaaacggcacgaaaaattcaaccttaatgatgaatggctcgtggctgcggagcagtttataagaaacaatgccaaatacgccttgcattttgcagactatgacagaagcgagcttgtaaaagtcgatgaatgcagcttgcacccgcttattttgaaagatattgccgcacttacaaaggcgcacgagctaaaaaatgagtgcgatatagaaaaatggcagtatgctctgcaaagcacgctgaatgagtttcagtatagcaagcgcatttcaggcgaagtggcggattttttgcgagcaaagtatcttgggctttactacaacggcattgaggcgcaaaacattgcatacgcctttgaaaaccttgacaaaaatagctaaatttcgcttaaatttaaacgagatttgctaaaattagctataatgcgcttttattttatgagaaaggtttgggtgatgaatttcccttttatcgacttaaaagctcagtataacgcctacaaagatgagatagataccgccatagctggcgttttgcaaagcacttctttcatcggcggggcggcgcttgatgaatttgaagcaaatttagccaaatatgtaggcgtgaaaaacgccataggctgttcgagtgggacttcggctcttgttttagcgcttttagccctaaatatcaagcaaggcgatgaaattatcgtgccaagctttaccttcatcgctacggctgaaatggtgagtttgctgggcgcaacgcctgtttttgcggacattagtttagatgattataatgtgagcgttgagagtatcaagcaccttgtgagtgaaaaaacaaaggcggttatcgctgtgagtatctttgggcaaatgcccgatttgcttgctttgaatgaattttgcaagagtaaaaatatcgttttgatagaagatggcgcgcaaagttttggcgcgacacaagacataggggggggggagttgaaaaagtcctgttccatagccccactttcttgcacgagcttttttccgtcaaaacctttgggcgcgtatggagacgctggggctgtttttaccaacgatgacgcgcttgctaaaaaaattcgcaccattttaaatcacggacaaaaagagcgttacaagcacgaaatcatcggcattaacgggcgacttgatagcattcaagcggcgattttaaatgtgaaattaagacatttagatgatgagcttaaaaaaagagagcaaatcgctcaaatttatcaaaaaaggctgcaaaatgccattttaccaaacattaaaaagggctttacaagcgtgtatgcgcagtattctgtgcgggtgcaagagcgtttaaaatgtatagaaaagctcaccgcaaagggcattccaacggcgattcactaccccttagggctacatttgcaagaagcctttaaatcgcttggctataaaaaaggctcactgccaaacactgagctggtaagcgagcagattttatcgctgccgatgagcgcctttttagatgaggctcatcaaaatgaggtgattaaggcttttgaatgaaaataggcattgctgggcttggcaaaatggggacaaaccatttaaacgagctgagaaaagatgatgaattcaaagtcgccgccctttatgatttgcgccaaaatgctgaatttaaagagccattttacacgaatttagatgaatttttaaaggcaaatttagacattgtcatcatcgcaacgcctactagcacgcatttagagctggcaaaagccattttagcaaaggtaaaatgtgtgcttatcgaaaagcccttagcgatgaatttaaaagagatgaatgaaataaaagagctggctaaaaagcacgaaagtagcgtagctgtgggatttagcgagaggtttaatcctgcgattttagccctaaaaaaagagcttgcaaatgaaaaaatcatcagcataaacataaaacggtattcaccctttcctgcgcgcataagcgatgtggggattttgcaggatttaagcatacacgatattgatttagtaggctttttaagcggagaaagctttgcaaagcaaggacttttgagcctaaaaaaagatgacagagagatagaggcgattatcacgcttcaaagtgggttaaattcaaagcaaaatatcatcgccgctgttcatcaaagctggaactgcgccttaaaaattcgccttgtgagcgtgataacggaaaatgctttttttgaggcggatttaaacaatttttccttacaaaaaaacggcttgccacttgccttacaaggcgtaagtcctttatttagcgagcataaagagcttttgggcttagctaaaagcggcaaaatggggcgtttggcaagtatcaaagatgcgcttaacgcgcaagcgtgcttggagtgagcttgaagctggttttgtttttgaatatgggaggtgttagcaagcgcgaggattgcgagctttttttgaaaaatatgtttaatgataaatatattttgacgataaaaagcgacattttgcgctctttcgtggcgtttttcatcacaaaatttcgcgctaaaaaaatgtggcaaaattatcttaaaatcgggggcaaatcgcccttaaacgacataagcgcaaggctttgtgagaagctaaatgctgaatttttaaatcaaaatttaaaagataatgctaaaaaaatgagtcaaaattcagccctaaattcaaaaactcagcacagcaaaaagggcgaaaatttagagcttgcgcccaaagaaagcaaaaatttaaagctcaaatcacagcttaaatttgattttatcaacacctatgtgccgccctttgcaagcgaagttttaagcaaatatgagcttacaaaagatgatgaaatcgtgctttttccactctatccgcaccactcgcaaaccaccgtgctttcatcacttgaatgcgttaaaggcgagattttaaaagcacaaattcaagcaaaagtgagtgaaattcctgttttttttgagagcgaaatttacaacgaaatgctgataaagcacattttaaaggcaaatgagacttacaaaaaagcgcacaaaaaaacgctcattttttcagcgcactccatacctgtatcgactataaaggctggggatatttaccaaacgcacattgaaaggcattttgcgcttttaaaagagcgtttaaagccttattttaaggacatagtgcttggctatcagtcaaaactaggacctgtaaaatggcttgaaccaagtactagcgagcttttggctcagcttacaaatgaagcgcttgtttatccgctgtctttttgcgtagattgcagtgaaaccgcttttgagctagaaatcgagtatagaaaaatcgccacaaaggactataaagtcatcgcctgtcctaatgatagtgctgaatttgtggagtttgtgaaagcgtatgtaaaggatagatgatgaaaaaatacctttttgttttgcttttagccttttcagtggcgggctgctcggtaacgggcgacaggcaagtcgatgcgatgattgataaaatgggcattgaaatcatacacgatatacccatcaacgataacacaaaggctggcaagcacatagacaacaccatacatatgaaagcgcgctcattttaccccgacaaacagcagtatttgctggtgcttttgcacgagatagcccatcacataggctctttaaacaagcgcgtgtcttaccaactctactcacaaagcgattacaggctgcttgaagagcttatcgcaaacaaatacgccacaacgatgatgaaaaaatttggctacaaactgcgctttaattacgacaaactcaacaaagagtatatgaacgagctgacaacgcagcacggctactccaaagaacgcgtcaatcaatatgtcaatgctgagctaaaacgctgcttgcaaacgagcgataggcttttgaaacgccgaatttagcgtgcttttggttggcgttgatttggcataatgagagcataatgcaaatttaaggagtgtgtgatgagagttttagggtttgatataggtgtagcaagcataggctgggctttggtggaagatagcgtgctgaaagattgcggagtgagaattttcacaaaggctgaaaatccaaaagacggctcttcgctagccctgccacgccgtgaggcgcgctcagttcgcaggagactagctcgcagaaaggcaagactaaatgagcttaaaaggctcgtcgcggctgaatttggcttaaatttagaggattttctagcaaatgctggcgagttaccaagggtttatggcggaattgaaaaagaaattcgtggtaaaatgcgtaaaacgccagaaggtaaagacaagcttaaaaagatgcttgctccatttcatatttcgccttatgagcttcgcgccaaagcattagaacacaaattagaacctagcgaatttgcgcgggtgattttacacatagcaaaacacaggggctatgacaacaaacacacgaaggatacaaatgatgatgacagcggcaaggtaaaaaaggcgataagtgaaaataaagcagaaatgcaaaaatgggcacagaaaaatggcaagaatataaatgaatgcacggtaggcgagtatctttacaaggaattttaccaacaaaagcgtgatttgagcgaaaagtcgccaaagaacgcttttgcaacgcaggaatttcaaaatgtccgcaacaaaaaggataattacgcgcgttgtgtggctcaaagtgagctaaaaagagagttggagctgatttttgaaacacaaaagcgccttggttggaaatttagcgagaaaaaatatcaaatttttgatgaaaatcgcaagataaaagaggcggattttgaaagcgcggttatggaagttgcctttttgcaacgcccgcttaaaagttctgcggacaaggtgggcaaatgcaccttttttgaaaacgaaccgcgcgccccaaaggacagcctcagcgctatggagtttgtcgcccttactcgcatcatcaacacgcttgcaaatatcagcaagaaaacgggcgagatttacagcgcagacaaggtgggcaaagttttagaggctgtgcttgaaaagggcgagattacttacaaaaatttgcgtaaaatcatcagcctagatgataaaattcagtttccaaaggactcaaagcttgattatgccaaaggcgatgaggctgaaaaggctaaatttatcgaatttaaaaagcttaaagattttaaaaaggcgttgggcggcagttttgagagatttagtagagatgagcttgacaagattgctaataaaatcgcactcattaaaagcaaagatgagttaaaggctgagcttgcgagcttcaagggcttaaacgaggcgcaaaaagaggatttaagtaagcttagttttgatgaatttattgatttgagttttaaggctttgggtaggattttgccgtttatgcgtggtgaaaatggcgagtgcaaaaggtatgacgaggcgtggcgggcagctggcttgcaagaggtggcaaaacaaacgcaaaagggagatatattgcctccgcttaaagactacgaaaaagacttggcaaatccagttgtcgcaagggctttgagcgaataccgcaaggttttaaacgccttgcttgaaaagcacggcaaggtgcataaaattcaccttgaatttacgcgtgaagcaggagtaagcagcaaagagcgaggcgagcttatcgctgagcaaaacaaacgctttaaggcaaacgaagaggcacgcaaaaggtgtgctgaatatggcttaaatccaagcggcaaaaacatccttaaactcaaactttggcaagaacaaaatgaattttgcgtgtatagtggcgagaaaatcacgcgcgagcatttgcgtgatgagagtgcgcttgaaattgaccacatttatccttactcgcgtagctttgatgacagccaaaacaacaaagttttagtctttaaaagcgcaaatcaaaacaaacgcaaccaaacgccttatgaggcttttggaggtgatagcgaaaaatggagtaggattatgagtagcattgctaaattgccaaaaccaaagaaaaatcgtatcgcaaataaaaatttcgcggataaagagaacggatttatcgcgcgaaacattgttgatactagctatatcgccacgcttacggctagctacacggatgcatttatcgagtttttgcccttagctgagagtgaggacaccacgcttgggcgcggcgaaaagggcagcaaaaagcacataagcgtggtaagtggctctttgacggctacaatgaggcattattgggggcttgatagcttgttaaatggcgaaagtgaagtaaaagacagaagcaaccatctccatcacgccctagatgcgataatcatcgcttacacaaacgacaaaatcatcaaggcatttagcgactttaaaaagacacaagagcaaaacacagcccgtctcatcgccaaagagataagctcggctgagtataaaacctcacgccgtttctttgccccagcaaattttgcaaacaatgaagcctttcgtcaaagcataaagggtaagatttttggcgagttgggcgaaaatggcgagttaagtggcggaatttttgtctccaaaccgccgagaaaaagagcgcgtggggctttgcacgaaaaaacttttggctctatttgtgaggaaaatggcgaatgggtggcaaaaataaaaattctcaaagaggataaagataatacagactcacaaaaagaaaaatatgagattttgtataaaggcaaggaaaatatcaaaaatgctttcaaatggggcaaaatccgcaaagtgcaaaataaagaaaatggcagaattaaggaaaaagatgaaattaaaatcggtgatacatttgcaaaaaatgacaaaataattcacacagatatttttagccgcacgataaagggtaaaaaagataaagttgaatattatgccgtgcctatttatagaatggactatgcgcttggtatattgccaaataatgcttgtcctacaagtgttacaaatagcaaaacaaaaaatcttaccgaatggattcctatggattcaaactatactttttgcttttcactttttacaaacgatttagtttgcgtaaagaaaaagaaaaccgacaagaaaggaatggaaaatcctgtgattggttattatgagggaataaatccatctaattcatctataacaatagcaaaacacgacaattactcgcaaaaagaggatttgagtgatttaagttctgatgaaagagaaatttttaaacgcaaagtcgataagaaaacgggaaaaatagagataattggcgagggtgtagggattagaaatttagaaatctttgagaaatggcaagtttctccgctgggcgaggtgaaaaaggcgaaatttaaaaaacgaaaaaacatttcgcttaaatccacgccaaaaaacgccaaacactcaatgtcaaattcaaatttggaggcacaatgagctttgatgaagcctttaaaagcgtgatgataagcaaggaagctaaactcacgctcaaacaaaagcacctttgcgtgagtcaagcgggcaacgaggctttgctctacctcaaagaccttgctttcatcgttttagaaagcgagcaaatcacgctcacttcggcacttctaagcgcactagcaaagcacaatgtcgtgcttttaagctgcgatgaaagccacttgccaaatggcgtttttatgccctttttaacgcactttcaagccgcgctcaccgccaaagagcaacttggggcaaagcctcaaacaaaggctattttgtggcaaaggattgtcaaaaacaaaatccgcaatcaagcctttgttttgcgtgaggctggctttgaaaaagaagcgggcgagtttgaaaatttagctaaaaatgtgcgcttaaatgatggctcgtatatggaaagtcgtgccgctgcgctttattttaaaactctttttggctcaaattttagccgtgatgagctttgctttgaaaattcagctctaaactatggctacgccgttgtgcgcgctgctgtggtgcgtgccgtgtgcgtgagcgggcttgtaagctgggagggggtaaagcacgctaatgcttttaatcaatttaacctagccgatgatttaatcgagccttttcgcgcctttgtagatagctgtgttttggggctttgtgctgaatttaagggcgatgagtttttgcaaaaagagcataaaagagcgcttgttgaaaacttgcaaaaagcggtgtttgtaaatgagcgcaaactgcctttaatccgcgctgtaaatcatttcgtgcaaagttttaaaagcgccttgctcaatggcacagagcttgcaaatgtcagctttgcttgaagataaatttatgcgcgttttgctgctttttgacctaccgacaacgagcaaaaaagagcaaaaacacgcggcgaaattccgcaatgaactcataaaacttggcttttttatgatgcaatttagcgtgtatatgcgaatttgcaagggcttggtttcggcaaatgctgtgatttcgcgtgtgcgtggcattttgcctccacttggcaatgtgcgcgcactcatcatcactgaaaagcagtttgacaatatgcaaattctgcttggaagtgcgggctttaacgaaagcgtgaatgatgataaaaatctcgtgctgtttgcgtttgatgagaaaatcggggattatcggtatttgggcaacggacaaagtgagcgtgatgagggcgtaaaaaatgacgaaaatgcttgtgggagcgaaaatgcgccaaaatgtgaaaatttggatttttcaaagggaaaaaatgctgggaaagaaaattttgtaagcaaatcaaaacgcaaaaagccacaagagcaaagtttatttgaattttaagcttttagtggctttatgcgggctatattttaaatttggctggtaaattgagcgttaatggctttgatgaatttggcttttgtgggtggattatgcgtgttttggtgtggtttagccttttgtaagagcgtatttttgagtgtttttcgttatttagcttttttaaagcgtgctttatatgtgtttttaagttttagaatttatttaaaggcttgaaaatgcgctatttgatttattataaattgaaatttactactaaaatgcgtgataacgcctttttaagcaagtgcaaagtgcctttttatcgtaacaaatcatacataaaaaacggcaaaggcatgtttatccttgtcgtaagtgctaaaaaagagctagacaaagaaaaatcaatgtttttgccttacaaagtgtcgcaaaaagcccttgcaaagccactgcataaggcttgcggaaaattcgcataaatcgggtgggcttgggattgactggcttgtctcccttgaaacaagcataaccctgcggggcgcccacaaccccttattttagtcccttgttaattcttttgccataagt

SEQ ID NO: 3830 - DNA, 14992 bp, synthetic construct
  source 1..14992: mol_type = other DNA
  misc_feature 1..14992: note = Synthetic
aaaggtacaaattcctctttgtaatatcatcatcaaagggccaaaatttagcggtaaaaaaaccttgatttttaactatttatcccaatttaagcccaatgaaattttatttttaaatttgtatgatactcgttttgaaaaccaaagcttagggcatctttcaaattttttagaaaaaaatgtccaaataaaattcctttgcatatacaatgtcgaatttgccttaaatttgcaagatattaaaattcctatcatcataagtacagataaaaaagatttgcatatcgaaggatttcaagagcttgagcttgattattttgactttgaagaatttgtaagtatcagtagaaaaaacttaccgataaacaatctagtgggactttttttacaaagtgggcgtagtaaattaggtgaaaaaaatatacttttaagacaaaattttaacactctagaacttgaaattttaaaatacttagctttaaatttaggacagcagatcagtatttccaagctttttttagagcttaaaaaaaagctaaaaacatctaaagatagcgtttatcacaccataaaagagcttgaaaatacctatatcatccatcctataagccacgatgaaaaaaagcttcaaaaaatttattttagggattttggcttaagaaacaatctatgcatacaaaaagattttgctcatttgtttgaaaatcttattttaaatgagctttttaaatttaaacaagaatttttttacaataaattttttacattttatagtaaggtttcaaaaatcgcatatatttccagtccgacgctagatatagacttgatcaaattgcgcgctaagaaaatcctttctaagggtttggagcttgggatttttcatgtggttttcatcactctttcgagcgaagatagcttttttgagcaaggggtgaaatttgaagttttgccttttgataaattttcactcggcttttagctaagactagaaagattttggagtatcgtatcgctcaagatcgtatcgttggatgattttagtaacgatattgatataataacccttgcgctcggagtaagaatctaaagttttaatagcctctagtcctgttatttctttgccttcgctttcaaatttagctctttcgttgcgaaattcctcataagcaaagtgccgatttaaattcagcacataagaatccacactatcttgcaagctatcaaaaattctaattttatgttttttatcaggatgtcttagatcagggattaagcccttttctccccaggtccattctccaaaaagattatttgcctctcttgcaaaacggcttgttcccgtagcactttcgaccaaagcttgggctatacccatggattttggaattttttgaatgcgttttttgtattctgtaaaatcataaagattttcaacgcggtatttgtttttaagattgattaatttttctagattgttttggtttgaatttctaagtccatttttatacgcatcataaaaaaaagcttctacaaaagccctttctttcgctatttcttcaaagcttttatcaaacattgcattcattttgacaaaaaatatttgtcttttttgctctacattgagtttataatactcctctccaaagccatttttaagctcgctattgccaaaaagagggagtaaataaaaactaagaaaaattataattcgcttcaaagcaatatctcacttttcccttaaaaaataattcttcattttcgaatttaaagctcagctcttcaccgctttttgggatgattctagcttgattgtggatttttttgtttaagaatgcaagataaaaacaagctcccatgcccgtgccacatgcttgcgtttcatcttctacgcctctttcaaaagtgcgaactcttaaagtattgtcattttcaacttttacaaaatttacattggcattatatttttctctcatttgtttgcaaagcttaagatcaaactcatccaaattttcacaaaaatgcaccaaatgtggaacccctgtatcgcaaagttgccagcttttttcgcactcattaaaggcatcttgtatattttttattttacccaaagaaacttctacgctattattatcaacatttgcttttataactcctactccggtaagaaaagccatacgaggcttaataccgtttatgtgatgtgcaaaatgtgctgctgctcttgagccatttccgcacattgaggctgttgagccatcgttgttgtaaaattcccattcaaaatcgtattttttatgaggtaaaatcactacaaagccatctgcacctatgccttcataacgattgcaaagttctttagctaaagcacttctgtcttttttttcactcgcattcattatcacaaaatcattgccacttgcgcaatatttataaaacttcacatttgtcctttggaaatattttgtattactttaacacattcttgcctaaaatcgacataagagccagtatttttaatgataaaatccgcttttttaagtttttcttcaatattcatttgagaatcaagccttgcttttgcagcttctaagcttaaattatctctttgtatgattctttttaggctgagttctttaggagcatagattaagatcacttttcccaaaccatcataagcaccgctttcaaaaaaaagaggaatttctacaaaaaaaggtttattttcttgttctagaatttgcatttgttctaaaatttgagcacgaattttaggatgggtgaaattttctaatatggttttggcttctttgttttgaaaaacaatttctccaagaatttttctatctatcttgccctctgctttcaataaattttttttatgaaatttagagaaaatttgagccagttccaaagcatatttatctaaaatttcgtgagcgatactgtctgcactaatgcttttaaagcccaaagaatttgctatttctataaaagtgctttttccacaggctatagaggcggttacaaaaaaagcgtttttcatcttatgccttattaaaacttttttcgttaaaatatctttttagttcttaaaggaaaataaatgaaaatttcatacgaagatgctggagtaagtatagataatggcaatgcctttgtagaggcgatcaaacctttggtaaaagaaacctttaacgataaagttgtaggaggtattggctcttttgctggagcttttagaatgccaagtggctttaaaaatcctgtaattttgggggctacagatggtgttgggactaaacttcgtttggctattgatgcaaaaaaatacgacaccatagggcaagatttagtagcaatgtgcgtgaatgatttgatttgtaattttgctactcctttgtttttcttggattattacgctacagccaagcttgaagtagaggttgcaaagtcagttgtggcaggcattgccgaggggtgtaaaatggcaaattgtgctttaataggcggagagactgccgaaatgcctggaatgtatgcaaaagatgattttgatcttgcgggttttgcagtgggcatggctgaagaagatgagatcgatagaagtaaatttgttaaaaatggcgatattttgcttgctcttcctagttcaggacttcattcaaatggctattctttagcaagaaaagtactttttgaaggtttaaaactgaaatttgatgataagatagaaggtaaaaatttaatcgatgttttattagagcctacaagaatttatgtacgcgattttcttactttaaagccttatatcaatgctttagcacacatcacagggggtggtttagtagaaaatttaccacgcgttttgcctcgcggaatgggagcaactatacgcaaacatcatcttaaaacccctgaaattttctataccataggacaagctgtagaagaaagtgaaatgtatagaagctttaatatgggtgtaggcttagtaatggtcgtagatccatctaatgtaagtaaggttttagaaaactcagacgcttttatcatcggcgaaatcacgatcaacgaaggtgttgttttagagtaaaataaagcgttaatgtgctttattttactctattaagttctatttttgtggaattttgctctttgggcaaaggattggtttgcgctagataaaaggcaacggctatattgattatcatagctataagtaaaagtggagtggtgcgttttataatatccatcggatctacttttacaaatccagccaaagctatgataccgcctgctatgggcgaggctgcgcgccctaaacaagatgcaatttctataggtaaaacaaaagtgataggggcaacgcctaattttgtagctatatcaggagctaatttcccaaaagcattaaaagcagcaatcccacttcccataatcactgtagcaaaataaactaaaaagcttaaaacagtgatgcttaaaagtatgccaaaccatgcaaaatttcctgttccaagatttgaaaccgcgttagcaaggatattaactccaccaagtgctttaatgccttcagcaaatactccagcggcgatgattatgcttacgactgagataaaaatttcagccatagcttttaaaatcaccatcatatcttcgcctaattttctagcatttctgtgtcttgcaaattcaacaagaaaaactaaagaaatgcttaaaaaatttgctgttacaacatcaagcttgatagtaaaaaaatatgctataaataaaaatacgacaggcagccaaggaaagagtatataaaaagtaggacatttaggatcaatgattggtggaatttcaacttcatcatttaaaacacctttttctttatctcttttatcaacccaagcaaagtaaaaaggtattaagatagcaataaccatcacataagcaatcacgctataaatttgataatttaaaaaaagccccacgacattatcgctttgtcctaccatatctgccatattgattgaatttccatcttttggaccataatcaagcgcaatcaaagaaagcacacatacagctgtaataggacggattttaagtgagattaaaacaggataaatacatgctaataaaagcaaaagaagtccagcatagctagaaataacaatttttaaggccattccaacgataaaagttccgcttaaaatcaaatatttatttttgatttttcctaaaggtttgtttgctaaaaaagcgagtttagccgaagcattgatatgtttcatataagcagcaaaacctgccacactcatgataataagtcctactccagaaagctgacttttaaaagtcgctgtgataaaagcatagctatcaagtaaaacattcaaaaagcttgcatgttctctgctcggagcttttggtataggtgttcctgtgatgtaaaaagcaaaaataagcaagataatacctgaaagaaaaaatacaaaaataggattgtattttttaagtatataataagcaacgacaattaccgctaaaagtgtagaacatatcataaaaattggcatgttttctcctaaagttattattagcttttattttattttagctaaaatttaactaataaatatttttcatttaaaattttacttattttttgcattataaaattaataatatgtatagtttggttactgaaaagtttatgtttgtttaaaaaaatgatttttgtattataattatacacaaatcataaatattaaaaaggatctagtgtggcaagaattttggcatttgatataggaataagctctattggctgggcatttagtgaaaatgatgagttaaaagattgtggagttaggatttttacaaaggctgaaaatcccaaaacaggagaatccttagccttgccaagacgccttgcaagaagtgccagaaaacgccttgctagacgcaaagcaaggctaaatcacttaaaacatttaatcgcaaatgaatttaagttaaattatgaagattatcaaagctttgatgaaagtttagctaaggcttataaaggctctttaattagcccttatgagttaagatttagagctttaaacgagcttttaagtaagcaagattttgcaagagtgattttacatattgcaaaaaggcgtggctatgatgatattaaaaataatggtgatgaagaaaagagcgagattttaaaagctatcaagcaaaatgaagaaaaactagtaaattatcaaagtgtgggagagtatctttataaagagtattttcaaaaattcaaagaaaattccaaagaatttataaatgttagaaataaaaaagaaagttatgaacgctgcatagcgcaaagttttttaaaagatgaattaaagcttatttttcaaaaacaaagagaatttggcttttctttttcaaagaaatttgaagaagaagtgcttagtgtagcattttataaaagggctttaaaagatttttctcatttagtgggaaattgtagtttttttactgatgaaaaaagagcgccaaaaaattcgcctttagcttttatgtttgtagcacttacaagaattatcaatcttttaaacaatcttaaaaatactgaaggaattttatatacaaaagatgatttaaacacccttttaaatgaagttttaaaaaacggcactctaacttataaacaaacaaaaaagcttttgggcttaagcgatgattatgaatttaaaggagaaaaaggaacttattttattgagtttaaaaaatacaaagaatttataaaagccctaggtgagcataatttaagccaagataatttaaatgaaatagcaaaagatattactcttataaaagatgagattaaacttaaaaaggctttagcaaaatatgatttaaatcaaaatcaaattgatagtttaagcaaattggaatttaaagaccatttaaatataagttttaaagccttaaaacttatcactcctttaatgcttgaaggtaaaaaatacgatgaagcttacaatgagcttaatttaaaagtagcaatcaatgaagataaaaaagactttttacccgcatttaatgaaacttattacaaagatgaagtaactaatcctgtggttttaagggcgattaaagaatatagaaaggtcttaaatgccttacttaaaaaatacggtaaagtgcataaaataaacattgaattagcaagagaagtaggtaaaaatcacagccaaagagctaaaatagaaaaagagcaaaacgaaaactacaaggccaaaaaagacgccgaacttgaatgtgaaaaactaggcttaaaaataaatagcaaaaatattttaaaattaagattatttaaagaacaaaaagaattttgtgcttatagtggagaaaagattaaaattagtgatttgcaagatgaaaaaatgcttgaaattgatcacatttacccttattctagaagttttgatgattcttatatgaataaagttttagtttttaccaagcaaaatcaagaaaaacttaatcaaaccccctttgaagcctttggcaatgatagtgcaaaatggcagaaaattgaagttttagcaaaaaatttacctactaaaaagcaaaaaagaattttagataaaaattacaaagacaaagagcaaaaagactttaaagatagaaatctaaacgatactcgctacatcgcaaggcttgttttaaactacactaaagattatttagattttttacctttaagcgatgatgaaaatacaaagttaaacgacacacaaaaaggctcaaaagtgcatgtagaagcaaaaagcggtatgcttacatcggctttaagacacacttggggctttagcgctaaggatagaaataaccatcttcatcacgccatcgatgcagtaattattgcttatgcaaacaactctatcgtaaaggctttttcagattttaaaaaagagcaagaaagcaacagtgcagaactttatgcaaaaaaaaattagtgaattagattataaaaacaaaaggaagttttttgagccttttagtggttttaggcaaaaggttttagataaaattgatgaaatttttgtctcaaaacctgagagaaaaaagccaagtggagctttacatgaagaaacatttagaaaagaagaagaattctatcaatcatacggcggaaaagaaggagttttaaaagccctagagcttggtaaaattcgcaaagtaaatggtaaaatagttaaaaatggcgatatgtttagagtggatatttttaaacacaaaaagacaaataaattttatgctgtgccaatttatactatggattttgctttaaaagtattaccaaataaagctgtagcacgaagtaaaaaaggtgagataaaagactggattttaatggatgaaaattatgagttttgcttttctttatacaaagatagtttgattttaattcaaactaaagatatgcaagagccagaacttgtttattttaatgcttttacaagctctactgttagtttgattgtttcaaaacacgataataaatttgaaacgctaagcaaaaatcaaaaaatattgtttaaaaatgcaaatgaaaaagaagtaatcgcaaaaagcataggaattcaaaatctaaaagtatttgaaaaatacatagtttcagcacttggagaagtgacaaaggctgagtttagacaaagagaagattttaaaaaatgagttacgatgaagcttttaaaacactgcttattagctctaatgccaagctaaatttagagttaaatcatcttgtgattaagcaagatgaaaatatagccaaattgtttttaaaagatataaacatcatcgttttagaaagcttacaagtaagcctgagttccgcactttttaacgcttttgcaaggcataaaatcatcttactaacctgcgatgaaactcatagtataaatggtgtttttactccttttttagggcattttcaaagtgcaaaaatcgcaaaagagcaaatgaatgtaagtgctcaaaaaaaggctattttatggcaaaaaatcattaaaaataaaatcctaaatcaagcctttgttttgaaaaaacacaataaaatagagcaaagcaatgagcttataaatttggctaaaaaagtaagcttaaatgatagtaaaaatatcgaagctgttgcggcggcgctttattttaaaactttgtttggcgtttctttttcaagagatgagctttgctttgaaaattctgctttaaattatggctatgcaatcattagagcttgtattattagagcagtttgtataagtgggcttttgccttggcttggcataaagcacgataatatttataattcttttgcgctttgcgatgatttgatagaagtgtttagggctagtgttgatgattgtgttttaaagcttaagggtgaaagtgagtttttaagcaaagatgacaaaagagcgttaattagcaatttacaaagcaaaatcaattttgatgggcaaaattatcctttaaatagagcgataaatcattatgtggcgaattttaaaaatgctttattgtatgaagatgaactaaagatagtaaaatttgatgattgaagataaatttatgcgtgtgcttttgatgtttgatgtgccaactaaaagtaaaaaagagcaaaaactagcaagtaaatttagaaacaatcttataaaattgggttattttatgctacaatttagcgtttatatgcgtatttgcaagggtttaagttctgcaaaaagttctattgaaaatgtaaaaaagattttgccaccttatggaaatgtaagggctttaatcatcactgaaaagcagtttgataaaatggagcttttgcttggtggcatagtttttaatgaaaaagttaataacgaaactaatttaacgctttttgatatagatagtcatggagaatttaaatacaaaaattcaaataatgaagaaatacaactaaacaaaaaacaagaaaaatatcatcagcaaaatttatttgaattttaaaagcggttttaggggattgtaaccccgcagagtcccgcaaactctttattttagtccctttttaaatttcttattgagattatagcataatttttgctatttttcatcaaaaaaccccgaaattttcattatctggtaaatatctattttaccataaagaaatttaaaaagggactaaccctagtggattgaaactccgctagggctaattactccactaaaaggaggttgcgaatttgaaacttattgaaatttagggttgattaaaatcgaaataaaattatttaaataattttaaggcataaagataatatctactaaactttcattttctaacatttcacattcttttggcaccaccataagagcagctttattgttaagattatttatgatcgcactagagccttcttttttgccttcaagattggctaaaatgcgtccatttttaaactctatattgcaagcgacaaattccaaataaggtgtttttttcttgtaacttccttgtaaaaaggctttgcaaatatagtctttaggttgaagtaaccaagagtttaaaatctctcttgcataaagattaaacatcaccatggctgagtaaggaaaacctggtaaggcgatgatgaatttttcattagccttagctattttgatatgtctacctggttttatgtcggctttatcgatgatgatttcgtattctttgatggctttttttaaaaagtcaaaatctcccatagaaaccccacccgttgtaaccaaaatatcacaactttgcaaagcactttcaagggtggaaaaagtggctttctcatcatcttttaaaagaggaaaaacccttgtatcgcaatttaaatttttagctaaattagctatggcgatatgatttgaagagcggatttgagcaggattttccaaggcttctcctagatctttgatctcacttccactacttaaaacccctacaataggctttataaacacactaatgtgaaaaaatccaagttcagctaaaagagctatctcgctataatttaaccttgtgccttttttgagcaaaatttcatcttttttatagttttctcctactgcacgcacggcaaaagcttggggaacttttttttctataaaaagagtatcattttctacgcgtacattttcaacagggactaaagtatcacttccctcgctcatgagtgagcccgtaaaggtttttacacaagtaccattttgcacgctaaattgtggcatagtacccgcaggtgtgaggcctaaaatttttaaaggcttgtcttgatcttcaaatttgatcgcataaccatccatagccgaggttggaaattcaggctgatttttaagggcttttatatcttgagctaaaatgcgtcctaaacactctgtaagagctattttttcaatcttttcataagttttgatatgagaatgtaaaatttttaaactttcttcataagacattagcattttttatccttttaaaagtcctgcaccgcaaagcttggttgatctttctttggcataaattctttctttgtttatcacatcatacttccaaatgggcgcacttgctttaaaatcttcaacaaattcattaagaagtttaagtcctaattttctttgtttgcttaaaattcctgcaaaatacgagctttcatgtatcgctacatcgcctatagagtgagcaaaaagcaagctaataccatcaaaatctactcttttttgccactcatcaaaccatttttttaaaagcgattcataaatatcaaaactaagtgcctcaatacctccttcttcacgcacaataccacaaaaagtcagtaaagcaccgcagtttttatccttggaaaattcataccattggctataaattttaggaatatctaaagagccttgataaagtgtaaaatgtttcatttagcctccacaaactggcggtaaaagtgctattttatcaccatcttttaacttggtgttttcatcaaaaatgatttcatcatttaaagatatggcacaaagttctagccattcttttaaactctcatctttttgcaaaatttcttttaattcttttaaattttttacttcaagttctaaattttctttatttatagggcctaaaaattccacttttaccattttattcctttacttctaaatttcccatcattcctaaatcttcatgttctaaaatatggcaatgatacattctaagtcctttaaaatcttgtttcattctaagtcttaactcttcattaggacgcacatttatagtatctctgaaggctctaaattcggctttttgaactttgccattgagttttgatgagatgagttcaaattgcgtgccgtgtatgtggaaaggatgatccatgtgagatttgtttatcactatccagtcttcaactactccgattttagaatttaaatcaacgcgttttaaattataacttttgccatttattaaaaacatagatgcaagagcagtttttagttcatcttcgcttttgcccatcattccatgcatttgcatgtgatcttcactcatgattatttctttaaattccttaggttcttctaaaggtttgaaaatttttaaattttttggaagttctaatttttctttttttaggctaatactagctaaaaatagggtattagattcttcttttaccatcattttgtccctatcataataagcactttctagcttaaaattcccatcttttggagcgtcgattaaaacttctacacgagaagcaggacttaagaaaagttcttctttataaatagctttttctataagtccaccatcagtaccaacaagtataaacttagctccttgtatgcgtaaatttaaatatcttgctgcagtagcattataaatgcgtatgcgttcgtttgtggcgagtttgattttaggtttaaattgtccattgatgagtacaaattctccttctctaccatttagccaatcatttaggttgttgtttggaatttgagcgttttcatcaagacgcaaatcgctaatcatcaaatctttttcttttaaatgacttaaagcatctttttttgctttgatcacaaaagcccctgctaaacccataaaaacttgtttagaagccgtataatgaggatgtggatgataccagtaagttcctgcgctatcttgaggaatttcaaaacgatatattctttcttctcctgctaagataggatcatgtgggcttccatcttgatcaggtggcacaggaacgccatgccaatgtatagttgtagcttctttgagtttgtttttgactaaaatttcaagtttatctccttcaaaaacttctatttttggagcaggcacgaggccattgtaagtataaaataaggtttttttacctttgataagctctatatgattttctttgatttctagggtagcacgaaaaatatttttttctttactttcatttttgagtaaaggcaaggcttttaaaatttctccttgggggaattgttttggatctaaaagctttaaattttttggagcaaagtttataaaagaagtatctaagtcatgatttatagaatgatttttatgcatggagtgcatatcatgcataggatttgcataggctacacccatacttgctagagtgagtgcattaaattttaaaaaatttcttctattcattagtttttccttttgcttgattttttgtattatagtcattatttttttaactttagtaaatatttattttgaaaatttggtttaattttgttatgattttagcaatttaatcaaggaaaaataatgttttatgaaaaaattcaaactccagcttatattttagaagaagataaattaagaaaaaattgtgagcttttagcaagtgttggtgaaaaaagtggtgctaaagtgcttttagctttaaaaggttttgctttttcaggagcgatgaaaattgttggagaatacctaaaaggttgtacttgtagcggactttgggaagcaaaatttgctaaagaatacatggataaagaaattcatacttattcgcctgcctttaaagaagacgaaatgagtgagattgcccatttgtctcatcatattgtttttaattctttgtatcaatttgataaatttaaatccttgtgtgctaataactccttaggacttcgttgcaatttagaattttcttttgctcctaaagagctttataatccttgcgggaaatactctagactagggattttgagcaaggatttagaaaattttgatttaagcggagtagaaggacttcattttcatgcactttgtgaagagagtgcagatgctttagaagctgttttaaaggtttttgaagagaaatttggcaaatggatcaaacagatgaaatgggtcaattttggcggaggtcatcatatcacaaaacagggctatgatatccaaaaaatcatcactctttgtaagaattttagtgataaatatggcgtgcaagtttatcttgagccaggagaagctgtgggttggcaaagtggggttttggtagcaagtgtagtggatatagttgaaaatgagaaaagaattgctattttagacacttcaagtgaagctcatatgcctgataccatcatcatgccttatacgagcgaggttttaaatgctagaattttagcaacaagagaaaatgaaaaaatttcggatttcaaagaaaatgaatttgcctatttactcacaggaaatacttgtttagctggagatgtgatgggagagtacgcttttaaagaagaattaaaacgcggagatagggtggtatttttagatcaaattcattattctatagtgaaaaatacaacttttaatggcataagacttccaaatttaatgcttttaaattccaaaaatgagcttgaaatggtaagagaattttcttacaag

SEQ ID NO: 3831 - DNA, 14734 bp, synthetic construct
  source 1..14734: mol_type = other DNA
  misc_feature 1..14734: note = Synthetic
cttgcatcaatttctacgatttcattgatagtagaaactttccaattactcacaccaagtgctggtagatgtctgcttatagctccatcttcgccatgcaagatgatattttttatgagtttgttttcttttaagtattttttcatacttcttaaaacacactcatagcttataaattcatcttttttgcctagaaaatcttttaaatctaacttgccattctttgctaattcataatttaataccctgtggatattagaagcattaagccttcctttttgagcaagtaaggtatttataaaaagctcttttataccaagagtgctaatggcatcatcttttttattttctcttttatctattaaagcatcaagtccgtttgctaagtattctttttgccaagcaaagagtttgttttgtgtgagcttaaactcatagatttttttagcgttaatgtaatttataaaatcatttgtgcttatcttgcctttagcatggagccattctttaaccacagcagctttttgtaaggctaaattttgctttttagaactggcttttgcaaagagacttaagctatctttgtttatttgtatttgattttcgctaagtttggttttgtcagtgttttgcacttgcaaggctttagaatttttaagcaaaacatcatcatttaatgctttgcttaaagcttcttgtgttgttttaggagttatagtagtagtattgcttatatcttctatgttaaaaccttgctctactagctgtgtttcttccttatttaaaggtttagaccagatttgaagggttttaccaccgtgtcctttgccttgggtgtatttaaagtgtattatatgactacctgaaatacaaatttttttagtctgcttatttgcacgaatacaagattttttaagtgcttcgtaatttatatcatattgctttgcaaattctttactgcttatccacatttaagccaccttaaatccatctttttctaacatttcttttaattctttggctctgcctcttataccttttgttttgccatagctcatatttaaaagcagtctataatcgctttcatttaactttttaaatttagcccaagtacgaagcttaaagccttttttgctcatttgctcagttaaacttgtaaagcttttacgcatttttactcctttatggtataatcacttaaaccactccaaaaaaaggagtggtaaagatgattttataactcaagtttgaaagtgatttttagcttccaaacttgagttttacgaccacctttttacactttaaaactttcattttaaagctccaaaagtgatattatccccacccacccaagccacttttaaaaaaaatctttttgtgatacaattcttttaaaagtaatagaattatagtgtaatttattaaacttgtcaagacaaaaggtgtattttatgaatatttctcaaaaaattaaaaatgctagagaagctaaaaacttaacacaattagaattagctaaatcaagcggtgtttcactggattcaataaaaagatatgaaacaaaagaatctaatataacaatacataatttaataaaaattgcaaaagttttagatattgatttgaattattttgcgaatgtccctaagttgtcccttagtctgtcttctaaaatgtccctaagccaagataaatatgtccctaagttggaaaatcaacaagaaaccttaaacgatgatatgataaacattcctttttttgaaaatgtaagagcaagtgctggaagtggcgcttataacgatgaagaaagcactcaagctttgggactttctaaaagttttttgcgtgaatgttttggcttatactcttttataaatctctctgtgattttaggacaaggcgattctatggcaccaacacttcctgaaaactgctatcttttaatccagcaaggagaagtggcagaaggcgaaatttgcgtaacacgcatagaagatgagctttatgtaaaacgccttcaaaaacgccccaagctaaaactccttagcgataacaaagcgtatgagcccattaatttagaaggtgaaaactttgaaatactcggacgcgttgtaggatattttaaaaagactactctttaattttttaaaggtgtttaaaagactttgtaaagtatttgtaaaaagaatgtaaaaatgtgtaaagcacaatgtaaaaaaatgtaaagataaaagctcactttgatttctaaaaaaatctcatcaaaatactataaaataatactttgattaaaatttttctcactttacttttttacatatctttatagttagaaataaaaaagaaagttatgaacgctgcatagcgcaaagttttttaaaagatgaattaaagcttatttttaaaaaacaaagagaatttggcttttctttttcaaaaaaatttgaagaagaggtgcttagtgtagcattttataaaagggctttaaaagatttttctcatttggtgggaaattgtagtttttttaccgatgaaaaaagagcgccaaaaaattcgcccttagcttttatgtttgtagcacttacaagaattatcaatcttttaaacaatcttaaaaatactgaaggaattttatatacaaaagatgatttaaacgcccttttgaatgaagttttaaaaaacggcactctaacttataaacaaacaaaaaagcttttgggcttaagcgatgattatgaatttaaaggggaaaaaggaacttattttattgagtttaaaaaatataaagaatttataaaagccttaggtgatcatagtttaagccaagatgatttaaatgaaatagcaaaagatattacccttataaaagatgagattaagcttaaaaaggctttagcaaaatatgatttaaatcaaaatcaaattgatagtttaagcaaattggaatttaaagaccatttaaatataagttttaaagccttaaaacttatcactcctttaatgcttgaaggtaaaaaatacgatgaagcttgtaatgagcttaatttaaaagtagcaatcaatgaagataaaaaagattttttacccgcatttaatgaaacttattataaagatgaggtaactaatcctgtggttttaagagcgattaaagaatacagaaaggtcttaaatgctttacttaaaaaatacggcaaagtgcataaaataaacattgaattagcaagagaagtaggtaaaaattacagccaaagagctaaaatagaaaaagagcaaaatgaaaactacaaggccaaaaaagacgccgaacttgaatgtgaaaaactaggcttaaaaataaatagcaaaaatattttaaaattaagattatttaaagaacaaaaagaattttgtgcttatagtggagaaaagattaaaattagtgatttgcaagatgaaaaaatgcttgaaattgatcacatttacccttattctagaagttttgatgattcttatatgaataaagttttagtttttaccaagcaaaatcaagaaaaacttaatcaaaccccctttgaagcctttggcaatgatagtgcaaaatggcagaaaattgaagttttagcaaaaaatttacctactaaaaagcaaaaaagaattttagataaaaattacaaagacaaagagcaaaaagactttaaagatagaaatctaaacgatactcgctacatcgcaaggcttgttttaaactacactaaagattatttagattttttacctttaagcgatgatgaaaatacaaagttaaacgacacacaaaaaggctcaaaagtgcatgtagaagcaaaaagcggtatgcttacatcggctttaagacacacttggggctttagcgctaaggatagaaataaccatcttcatcacgccatcgatgcagtaattattgcttatgcaaacaactctatcgtaaaggctttttcagattttaaaaaagagcaagaaagcaacagtgcagaactttatgcaaaaaaaattagtgaattagattataaaaacaaaaggaagttttttgagccttttagtggttttaggcaaaaggttttagataaaattgatgaaatttttgtctcaaaacctgagagaaaaaagccaagtggagctttacatgaagaaacatttagaaaagaagaagaattctatcaatcatacggcggaaaagaaggagttttaaaagccctagagcttggtaaaatccgcaaagtaaatggtaaaatagttaaaaatggcgatatgtttagagtggatatttttaaacacaaaaagacaaataaattttatgctgtgccaatttatactatggattttgctttaaaagtattaccaaataaagctgtagcacgaagtaaaaaaggtgagataaaagactggattttaatggatgaaaattatgagttttgcttttctttatacaaagatagtttgattttaattcaaactaaagatatgcaagagccagaatttgtttattataatgcttttacaagctctactgttagtttgattgtttcaaaacacgataataaatttgaaacgctaagcaaaaatcaaaaaatattgtttaaaaatgcaaatgaaaaagaagtaatcgcaaaaagcataggaattcaaaatctaaaagtatttgaaaaatacatagtttcagcacttggggaagttacaaaggctgagtttagacaaagagaagattttaaaaaatgagttacgatgaagcttttaaaacactgcttattagctctaatgccaagctaaatttagagctaaatcatcttgtgattaagcaagatgaaaatatagccaaattgtttttaaaagatataaatatcatcgttttagaaagcttacaagtaagcattagttccgcactttttaacgcttttgcaaggcataaaatcatcttgctaacctgcgatgaaactcatagtataaatggtgtttttactccttttttagggcattttcaaagtgcaaaaatcgcaaaagagcaaatgaatgtaagtgctcaaaaaaaggctattttatggcaaaaaatcattaaaaataaaatcctaaatcaagcctttatcttaaaaaaatacaataaaatagagcaaagcaatgagcttataaatttggctaaaaaagtaagcttaaatgatagtaaaaatattgaagctgttgcggcggcgctttattttaaaactttgtttggtacttctttttcaagagatgagctttgctttgaaaattctgctttaaattatggctatgcaatcatgagggcttgtattattagagcagtttgcataagtgggcttttgccttggcttggcataaagcacgataatatttataattcttttgcgctttgtgatgatttgatagaagtgtttagggctagtgttgatgattgtgttttaaagcttaagggtgaaagtgagtttttaagcaaagatgacaaaagagcgttgattggcaatttacaaagcaaaatcaattttgatgggcaaaattatcctttaaacagagcgataaatcattatgtggcaaattttaaaaatgctttattgtatgaagatgaactaaagatagtgaaatttgatgattgaagataaatttatgcgtgtgcttttgatgtttgatgtacctactaaaagtaaaaaagagcaaaaactagcaggtaaatttagaaataatcttataaaattaggttattttatgctgcaatttagtgtttatatgcgtatttgcaagggtttaagttctgcaaaaagttctattgaaaatgtaaaaaagattttgccaccttatggaaatgtaagggctttaatcatcactgaaaagcaatttgataaaatggagcttttgcttggtggcatagtttttaacgaaaaagttaataacgaaaccaatttaacgctttttgatatagatagtcatggagaatttaaatataaaaattcaaataatgaagaaattcaaataaacaaaaaacaagaaaaatatcatcagcaaaatttatttgaattttaaaagcggttttaggggattgtaaccccgcagagtcccgcaaactctttattttagtccctttttaaatttcttatgagattatagcataatttttgctatttttcatgaaaaaaccccgaaattttcattatctggtaaatatctattttaccataaagaaatttaaaaagggactaaaactgcctttgttgatgtatcactaaatactagattttaccataaagaaatttaaaaagggactaaaactccaaagcgttttaaagcatttcctaaagcattttaccataaagaaatttaaaaagggactaaaataaaccctagtggattgaaactccgctagggctaattacttcactaaaaggaggttgcgaatttgaaacttattgaaatttagggttgattaaaatcgaaataaaattatttaaataattttaaggcataaagataatatccactaagctctcattttctaaaatttcacattcttttggcaccaccataagggcagctttattgttaagattgtttataatcgcactagagccttcttttttaccttcaagattagctaaaatgcgtccatttttaaattccacattacaagcgacaaattccaaataaggtgtttttttcttgtagcttccttgtaaaaaggctttgcaaatatagtctttaggctgaagtaaccaagagcttaaaatctctcttgcgtaaagattaaacattaccatagccgagtaaggaaaacctggtaaggcgatgatgaatttttcattagccttagctattttgatatgtctgcctggttttatgtcggctttatcgatgatgatttcatattctttgacggctttttttaaaaagtcaaaatcccccatagaaaccccgcccgttgtaatcaaaatatcacaactttgcaaagcactttcaagtgtagaaaaagtggctttttcatcatcttttaaaagaggaaaaacccttgtatcgcaatttaaatttttagctaaattagctatggcgatatgatttgaagagcggatttgagcaggattttccaaggcttctcctagatctttgatctcacttccactacttaaaacccctacaataggctttataaatacactaatgtgaaaaaatccaagttcagccaaaagagctatctcgctataatttaaccttgtgccttttttgagtaaaatttcatcttttttatagttttctcctaccgcacgcacggcaaaagcttggggaacttttttttctataaaaagagtatcattttctatgcgtatattttcaacagggactaaagtatcgcttccttcgctcatgagtgagcctgtaaaggtttttacacaagtgccattttgtacgctaaattgtggcatagtacccgcaggtgtgaggcctaaaatttttaaaggcttgtcttgatcttcaaatttgatcgcataaccatccatagccgaggttggaaattcaggctgatttttaggggcttttatatcttgagctaaaatgcgtcctaaacactctgtaagagctattttttcaatcttttcataagttttgatatgagaatgtaaaatttttaaactttcttcataagacattagcattttttatccttttaaaagtcctgcaccgcaaagcttggttgatctttctttggcataaattctttctttgtttatcacatcatacttccaaatgggtgcacttgctttaaaatcttccacaaattcattaagaagtttaagtcctaattttctttgtttgcttaaaattcctgcaaaataagagctttcatgaaccaccacatcgcctatagagtgagcaaaaagcaagctaataccatcagaatctactcttttttgccactcattaaaccatttttttaaaagcggttcataaatatcaaaactaagtgcctcaatgcctccttcttcacgcacaataccacaaaaagtcagcaaagcaccgcagtttttatccttggcaaattcataccattggctataaattttaggaatatctaaagaaccttgatagagtgtaaaatgtttcatttaacccccacaaactggtggtaaaagtgctattttatcaccatcttttaacttagtgttttcatcaaaaatgatttcatcatttaaagatacggcacaaagttctagccattcttttaaactctcatctttttgcaaaatttcttttaattcttttaaattttttacctcaagttctaaattttctttatttatggggcctaaaaattccacttttaccattttattcctttacttctaaatttcccatcattcctaaatcttcatgttctaaaatatgacaatgatacattctaagccctttaaaatcttgtttcattctaagtcttaattcttcattaggacgcacatttatagtatctcttaaggctctaaattcggctttttgaactttgccattgagttttgatgagatgagttcaaattgcgtgccgtgtatgtggaaaggatgatccatgtgagatttgtttatcactatccagtcttcaactactccaagcttggagcttaaatcaatgcgttttaaatcatagcttttgccattgattaaaaacatagacgcaagagcgatttttaattcgctttcactttttcccatcataccatgcatttgcatatgatcttcactcatgattatttctttaaattccttaggttcttctgaaggtttgaaaatttttaaattttttggaagttctacattttctttttttagactaatattagctaaaaatagggtattaggttcttcttttaccatcattttatccctatcataataagcactttctagcttaaaattcccatcttttggagcgtcgattaaaacttctacacgagaagcaggacttaagaaaagttcttctttataaatagttttttctataagtccaccatcagtaccaacaagtataaacttagctccttgtatgcgtaaatttaaatatcttgccgcagtagcattataaatgcgtatgcgttcgtttgtggcgagtttgatttgaggtttaaattgtccattaatgagtacaaattctccttctctaccatttagccaatcatttaggttgttgttcggaatttgagcgttttcatcaagacgcaaatcgctaatcatcaaatctctttcttttaaatgacttaaagcatctttttttgctttgatcacaaaagcccctgctaaacccataaaaacttgtttagaagcggtataatgagggtgtggatgataccagtaagttcctgcgctatcttgaggaattttaaaacgatatattctttcttctcctgctaaaataggatcatgtgggcttccatcttgatcaggcggcacaggaacgccatgccaatgtatagttgtagcttctttgagtttgtttttgactaaaatttcaagtttatctccttcaaaaacttctatttttggagcaggcacgaggccattgtaagtataaaataaggtttttttacctttgataagctctatatgattttctttgatttctagggtagcacgaaaaatatttttttctttactttcatttttgagtaaaggcaaggcttttaaaatttctccttgggggaattgttttggatctaaaagttttaaattttttggagcaaagttgataaaagaagtatctaagtcatgatttatagaatgatttttatgcatggagtgcatatcgtgcataggatttgcataggctacacccatacttgctagagtgagtgcattaaattttaaaaaatttcttctattcattagtttttccttttgcttgattttttgtattatagtcattatttttttaactttagtaaatatttattttgaaaatttggtttaattttgttatgattttagcaatttaatcaaggaaaaataatgttttatgaaaaaattcaaactccagcttatattttagaagaagataaattaagaaaaaattgtgagcttttagcaagtgttggtgaaaaaagtggtgctaaagtgcttttagctttaaaaggttttgctttttcaggagcgatgaaaattgttggagaatacctaaaaggttgtacttgtagcggactttgggaagcaaaatttgctaaagaatacatggataaagaaattcatacttattcacctgcttttaaagaagatgaaataggtgaaatagccagtttatctcatcatatagtgtttaactctttagcccaatttcataaatttcaagctaaaacacaaaaaaattccttaggtcttcgttgtaatgttgaattttctctagccccaaaagaactttacaatccttgtggaagatactcaagacttggaattcgtgctaaagattttgaaaatgtggatttaaatgctatagaaggacttcattttcacgcactttgtgaagaaagtgctgatgctttagaagcagttttaaaggcttttgaagagaaatttggcaaatggatagggcaaatgaaatgggtgaattttggaggaggacatcacatcactaaaaaaggctatgatgttgaaaaatttattgctttgtgtaaaaatttcagtgataaatatggcgtgcaagtttatcttgaaccaggcgaagcggtgggttggcaaacaggaaatttggtggctagtgtagtagatatcatagaaaatgaaaaacaaattgctattttagatacttcaagcgaagcacatatgccagatactatcatcatgccttatacaagtgaagttttaaatgctagaattttggccacaagagaaaatgaaaaaatttcagacttaaaagaaagcgaattttcctatttgcttactggaaatacttgtttagcaggtgatgtaatgggagaatacgcctttgataaaaagcttaaaatcggcgataaaattgtttttttagatcaaattcattacaccattgtgaaaaacacaacttttaatggtataagacttccaaatctcatgcttttagaccgtaaaaatgaacttcaaatgataagagaattttcttataaggattattctttaagaaattagtattatttataatttgcataaaatgttaattttactcggaagagaatcaaagatgtaaattttatgcaaagtattttattttttcaaatataaaatcaactcaaatatctaattttcaatactttggtatgattttttaatattttaaatccttgtggaattttattgaaattcagtgatttttaaatcaaatagtattaagataaatcgatttaaaaatcggctttaaaatgaatattaggtatattttgcataatattcattcaagcaaaatttaaagctatttttgaaaattttgaatgcatgggagctttaatggatttggaaaaattaagattagctagaagtctttattatcaatgtctaggagagctttttgttttttcattttctgaagaaagattgtcaaaattacaagagtatttaaagacaatgcaagaatgtttatttgatgaaaatttaaaatcaaattttgatatcttgcttaagcatttagatgatgaaaattctatacaagcattttttaaagaatatgatttgctttttttaagtcttaaaaatagcattccaacgactttttcttacatagaagaaggttttgaaaattcaaatcctttactttgcgtgcgtcaaattttagtcaaaagtaaaataagacgcaatgaaaaattttttaaagaaagtgaagatagtgttggattttgtttattgttgatgagtgaatttttaaggcaaaatgaagatgatttagccaaagagctttttgaaaaagtgatcaataaaagcattgatgagtttttaggcgatgttttcatgaataaaaatgcgaatttatataaggaaattgcaagtattgcatcggcttttatggaatttgaaagactttgctttgaagtggaaaaacctgcaaaaataaattctaaaaaagtgcaaaacgatctatcgcgttcagaatttttaagaagagaagcaaataaacaaaggaggactcgtgaaaaatcgcagggaatttcttaaaaaatccgcttttgccttaggggctgctggagtgcttggtagcacgactttagctctagctaaagatgaagaaagaaaagatttagttaaaggtaaaagtaagaaaaaagaagtgctttttcaaagaagtgctaattgggaaaaatattatataaaggctgagtaatgtcaagtgtaggtgaaaatatcaagcttacgcgtcgttcttttcttaaaatggcagcactttcaagcctagcaacaccgttgcttgctagaagtgaaactttaagagaagcgagtgctgatgagcttaaagaagcgtatgaaggtagtaaaaaagtaaaaacagtttgtacagcctgttctgtaggctgtgggattattgcagaagtgcaaaatggtgtttgggtgcgtcaagaaattgctcaagatcatcctgtgagttcaggtggacattgctgcaagggatctgatatgatcgatatggtgcgttcacatgtgcgtttaaaatatcctatgaaaaaagaaaatggagaatggaaacgcataagttatgagcaagctttaagtgagatcggagaaaaactagctgcttatcgtaaagaaaatcctgaaagtgttatgtttttaggttctgcaaaacttaataatgaacaagcttattatataagaaaatttgcagcattttttggaacgaacaatgtagatcatcaagctagaatttgacacagcgcaacagtcgccggtgtggcgaatacatttggttatggcgctatgacaaaccatcttggagacattcaaagaagtaaatgtatcattatcattggagcaaatccagcggtaaatcaccctgtgggttttagacatttcttaaaagcaaaagaaaaaggtgcaaagcttatcgttgtagatcctagatttacaaaaagtgcagcaaaagcggatatttatgcaagaattcgtccaggaactgacattgctttcatgtatggaatgttaaaaatcatttttgatgaaggcttggaagatacaaaatatcttgatgaaagagtttttggaattgataaaattcgtgaagaagcagcaaaatggacagctgaagaagtggaaaatgttacagggatctctaaagaacttttggtgcaaatcactcacgaagtagctaaaaacaaaccaactacgcttatttgggctatgggtttaactcaacatactgtaggaacttcaaatacacgtttagcacctattgtgcaaatggtacttggaaatataggtaaatttggtggtggagttaatatcttacgcggacacgataatgttcaaggtgcttcagatatggcttgtttgagcgaaaatttaccaggttattatcctttaaatgaagcgacttggagatactatgccaaaatttggggtgtggattatgagtggcttttaggaaattttgtaagcaaagattggatgcataaaactgggctttcacttgctagatggtgggcagcggctttaaatggaaaagatggaaatgatgctatcgataatgcaggaacgcctttaaaagctttagtagttatgggaaatggtattacttcgactgcacaacaagtaaaagttaaagaaggtttggaagctttagagcttttagttttagccgatccttttgtaaatgaagcagggattattgcagaaagaaaagatggaatttatcttttacctgcagcaacacagtttgaaacaagcggaagtgtaacagcaacaaatcgtagcggacaatggagatttaaagttgtagatccactttatgaaagcatggaagatcaagaaattttatttgagcttgctaaaaaattaggtttttatgaagactttaccaagactttacgcgatgaaaaaggtgagattgtttggcctgaaaatgcaacaagagaaattgcaaaagcagttagaagtatagggcttaatggttggagtcctgaaaggcttaaaaagcatactttatactgggataaatttgatgaggtaactttagaaggaaaagacgaagttgctggcgagtattacgggcttccttggccttgttggagtgataagcacccaggttctcctgtgctttataataccgacattgaagtagcaaaaggtggtatgggctttagaaacaattttggacttgaatatgaaggagagagtttacttgctaaaaatgcacctttaaattcacctattgatacaggttatccacaaattactaaagataatatagaaaaagttttaggtattactttaagtgctcaagaaaaagaaaaaatgggatcaacttggtcttatgatgatagcaatatcatagcaactaaatgtatagaaaaaggcatagttccttatggaaatgctaaagctagagctgtagtttggacttttaaagataaaattccactccaccgtgagcctttacattctccaagaaacgatttggtgcaaaaatatccaagttttgaagatcaaaaagcgctttaccgcgtggatactaaatttgtttctgtgcaacaagctaaggattattctaaagaattcccgcttaatc

SEQ ID NO: 3832 - DNA, 14624 bp, synthetic construct
  misc_feature 1..14624: note = Synthetic
  source 1..14624: mol_type = other DNA
tgattaatactaggcattttgataaaaattttaatcaaattgatttttctaaaattaaaaatttattaccttatgatgcaagattaagtgataatttttttaaacaaattgatacaaaatatgaaaaaattataggtattaatgctttttcaaataatagcgaatatagaggatttaatttttttataaaagattggatagggcttgcaaggcaactttctttaaaatatcctaaatttttatttatacttttaaattttagtacgaattctattcagtataatattgatcagaatgcaaatttgaaagttttctgtaataataaaaatattgcttctttggtaagtatttctcaaaagctagattttttaattactgttgatactggaaatttacatctttgtgatattttacaaattcctactttggcttttacaagtagtcttgcagcttatagatttggaggtggaagttatggaggtagatttgataaattgatagtaaaaccagcttggcaaaaagaatatagaaaaatttatgaaatttttactaaaaaagcagaaaataatttagaaaatttatagtttttataaaataataaatatttattatttattatttaaagatactgctatttttgtagtgttttgttcttttggcaaaggattggtttgtgctagataaaaggctacgagtacatttacaagcatagcgataagcaaaagaggagtggttcgttttataatatccattggagctacttttgcaaatccagctaaagctatgattccgcctgctattggtgaagctgcacgacctaaacaagatgcaatttctataggtaaaactagagtaataggtgcaacgcctaattttgtagctatatcaggagctagttttccaaaagcattaaaagcagcaattccacttcccataatcactgtggcaaaataaactaaaaagcttaaaatagctatacttaaaagaattccaaaccatgcaaaatttcctgttccaagatttgaaaccgcgttagcaaggatattaactccaccaagtgctttaatgccttcagcaaatactccagcagcgatgattatgcttacgactgagataaaaatttcagccatagcttttaaaatcaccatcatatcttcgcctaattttctagcatttctgtgtcttgcaaattcaacaagaaaaactaaagaaatgcttacaaaatttgctgttacaacatcgagcttgatagtaaaaaaatacgctgtaaataaaaatacaacaggtaaccaaggaaagagtatgtaaaaagtagggcatctaggatcaatgatttgcggaatttcaacttcatcatttaaaacacctttttctttatctcttttatcaatccaagcaaaataaaaaggaatcaagatggcaataactacaacataggcaatcacactataaatttggtaatttaaaaaaagccctacgacattatcactttgtcctaccatatctgccatattgattgaatttccatcttttggaccataatcaagcgcaattaaagaaagcacacatacagctgtaataggacggattttaagtgagattaaaacaggataaatacatgctaacaaaagcaaaagcaatccagcatagctagaaatgacgatttttaaagccattccaacaacaaaagttccacttaaaatcaagtatttatttttgatttttcctaagggtttatttgccaaaaaagcaagttttgccgaagcattgatatgtttcatataagcagcaaaacctgccacactcatgataataagtcctactccagaaagctgacttttaaaagtcgctgtgataaaagcataactatcaagtaaaacattcaaaaagcttgcatgttctctgctcggggcttttggtataggtgttcctgtgatgtaaaaagcaaaaataagcaagataatacctgaaagaaaaaatacaaaaataggattgtattttttaagtatataataagcaacgacaattaccgctaaaagtgtagaacatatcataaaaattggcatgatttctcctaaagttattattagcttttattttattttagctaaaatttaactaataaatatttttcatttaaaattttacttattttttgcattataaaattaataatatgtatagtttggttactgaaaagtttatgtttgtataaaaaatgatttttatattataattataaacaaattataaatatcaaaaaggatctagtgtggcaagaattttggcatttgatataggaataagctctattggctgggcatttagcgaaaatgatgagttaaaagattgcggagttaggatttttacaaaggctgaaaatcctaaaacaggagaatccctagccttaccaagacgccttgcaagaagtgccagaaaacgccttgctagacgcaaagcaaggctaaatcacttaaaacatttaatcgcaaatgagtttaagttaaattacgaagattatcaaagctttgatgaaagtttagctaaggcttataaaggctctttaattagcccttatgagttaagatttagagctttaaacgagcttttaagtaagcaagattttgcaagagtgattttacatattgcaaaaaggcgtggctatgatgatattaaaaataatggtgatgaagaaaagagcgagattttaaaagctatcaagcaaaatgaagaaaaactagtaaattatcaaagtgtgggagagtatctttataaagagtattttcaaaaattcaaagaaaattccaaagaatttataaatgttagaaataaaaaagaaagttatgaacgctgcataacgcaaagttttttaaaagatgaattaaagcttatttttcaaaaacaaagagaatttggcttttctttttcaaagaaatttgaagaagaagtgcttagtgtagcattttataaaagggctttaaaagatttttctcatttagtgggaaattgtagtttttttactgatgaaaaaagagcgccaaaaaattcgcctttagcttttatgtttgtagcactcacaagaattatcaatattttaaacaatcttaaaaatactgaaggaattttatatacaaaagatgatttaaacgcccttttaaatgaagttttaaaaaacggcactctaacttataaacaaacaaaaaagcttttgggcttaagcgatgattatgaatttaaaggagaaaaaggaacttattttattgagtttaaaaaatacaaagaatttataaaagccctaggtgagcataatttaagccaagatgatttaaatgaaatagcaaaagatatcactcttataaaagatgagattaaacttaaaaaggctttagcaaaatacgatttaaatcaaaatcaaattgatagcttaagcaaattggaatttaaagaccatttaaatataagttttaaagccttaaaacttatcactcctttaatgcttgaaggtaaaaaatacgatgaagcttgcaatgagcttaatttaaaagtagcaatcaatgaagataaaaaagactttttacccgcatttaatgaaacttattacaaagatgaagtaactaatcctgtggttttaagggcgattaaagaatatagaaaaatcttaaatgccttacttaaaaaatacggtaaagtgcataaaataaacattgaattagcaagagaagtaggtaaaaatcacagccaaagagctaaaatagaaaaagagcaaaacgaaaactacaaggccaaaaaagacgccgaaattgaatgtgaaaaactaggcttaaaaataaatagcaaaaatattttaaaattaagattatttaaagaacaaaaagaattttgtgcttatagtggagaaaagattaaacttagtgatttgcaagatgaaaaaatgcttgaaattgaccatatttacccttattctagaagttttgatgattcttatatgaataaagttttagtttttaccaagcaaaatcaagaaaagcttaataaaaccccctttgaagcctttggcaatgatagtacaaaatggcagaaaattgaagttttggcaaaaaatttacctgaaaaaaagcaaaaaagaattttagataaaaattacaaagacaaagagcaaaaagactttaaagatagaaatctaaacgatactcgctacatcgcaaggcttgttttaaactacactaaagattatttagattttttacctttaagcgatgatgaaaatacaaaattaaacgatacgcaaaaaggctcaaaagtgcatgtagaagcaaaaagcggtatgctaacatcggctttaaggcacacttggggctttagcgctaaggatagaaacaaccatcttcatcacgccatcgatgcagcaattattgcttatgcaaacaattctatcgtaaaggctttttcagattttaaaaaagagcaagaaagcaacagtgtagaactttatgcaaaaaaaattagtgaattagattataaaaacaaaaggaagttttttgagccttttagtggttttaggcaaaaggttttagataaaattgatgaaatttttgtctcaaaacctgagagaaaaaagctgtaaggggtattttaaaaagaacatgtaactatccctaaataattttagcaaaaatcccaaataataggcttttagagcatataaaaacgactttttatctttcctaatttaaagtgtaaaatatcccaaatatcctaaaatgtccgttttgtcccaagaaagtgattaaatactgtttaaaaggcatataaatacgagctttgattttaaattttatattccaaaagtgttttttactctctaggatagttacatttttgcttaaaatattcttatatttttttaaccatgtaactatccctataaaacactatatatccatagcacaaccactttttatataaaaatagcatgtaactatctatagctttaaggtttggaagatagttacatagaaaacttaaatatttttatataattacataaatattttataggagtgtataatgaataagattgacaatattgcaaattttttaaataaaaaatctaaaaaatgtttagctataaatgggtcttggggtataggtaaaacttatttatggaaacaagttgaaaagaaactttctgaagatagcaaagataaagaagataaaaaagttgtttatatagatctttttggcaaagaaagctataagcaaatattagaagaaatagtttttaaattatatggaacttacaattctattacagaaaaaacctctgatattataagcggtcttataaaaaaagtaagctgtgagtttataaaaatagaacctaatgctatcttttcctttttaaaaaaggaagactttaataatattattgtgtgttttgataatatagaaagaagatcagataatctttctttgaaagaaattttaggacttgtaaatttacttaaagaagaaaaagaatgtaatgttgttatgatttttcacaaaggtgaattagaagaacaagacagtaattcaactataaatgataaagaaaaacaagctaaacaagataatagtaaaaactggtaccaaacatacaaagaaaaggttattgattgtgaaataaccataaaaaacaatgatgaagcagcaaaagcaattataaaagagaaaatagatcaatatactaaaattacggatgagataagaaatattattgaaaatattatttttgaaatatataaagaacattgcaatggcaatttaagattattatttcacgcattagaacacatagattattttaataagcattgttttttaaaatttagagaatatgatgataaacaagcatttgcaattgctctaaaattaaattatcaatcattaatatttcaaactaaaaaatatctttctattaaaatagagacaatcgacttatcttcaggcttctatcatctttatgaaaaatacctaaaaaatatgttttatttaagtaaaaaagaaaaagaacaagtaagatatgattttaatcaaactctaaaaactaatttttatttcaagcttcaaaactgcaaaatggaacatttaacaggtaatttaagtgatgagcaatttgtaaaagttgttgaaaattcactcttagaaatagacttttattcaaaaggtggaattatttattatccttatgatttttatcaagatttattttcaacctacacacaaattacaaagaaaaaattaagcaatatagaagaaaaaatcaataaacattacatagaagctcttgttacagaagaattagaatttgattttcgtgataactataaatctgataaagatcttttaaaattattagaaaatgaaaaatggaagcgttattatgaagacaccaaagaaaaatacataacaagcaagtatgaaaatattaatgcttttattaatagctgtgaaaatatagaaagtagttttaattctgaagcaatcaagcaatatactttttttaaaaaagaagaattaatacaactatttaaagaaaataacgatttttataagaaattttttaatcatttttctaaaaatatgaatataaatcataattttaatgatgatttaaacaataatttatttcgagcttatttggattttttggatttagatgaaaataaaataaaaaaaagtattgttttaaaatatataaattcacgaaatagtgtattaagaaagctactaatagaataattgctaactttcaaaacaaaagtttttaattgctttttgaaattttatgtttaaattctttgaaattaaaatcaaaggattaaaatgcaaatgcaagaagtgattgaaaaattaaaagatatacttgcaagtgaaggtaagcgtgatttaaaaaccaaagatatagccaaagaattaggaatcaatcctgatacttttaattccatgaaatttagaaactccattccttatccacaaatcttaaactttttaaataagaggaatataagtataaattatttcttttatggtgtctctcctaaagatcaattagaatgtgagaataaatataaaattttaaagctttataaaacaaatgcgagtttaggtggaggtggtataaatgatttgattgatagctctgatttaatcatcgatgaaaaggttttaaacttttttggaagtaaagaatgtgagtttatcacttgttatggagagagtatggagccacttataaaagatggaagtatttgtgtaatagatagaaataaaacttttaagaataaaagcatttgtgtgattaatactagagatggactttttataaaacaagttttaaagcaaaatgatggagtaatgcttcattctttaaatcctttgtataaagatatattttataaaaatggagattttttgctaattggtgtggtaattggagaactttcaagactatgacagcacacaataagctaagccaagctaatctcacagagagtgtaaaacacaaggttgttctatcaaaaaaggagataaacatgaaagatatcaaaaattacaccgataaagaattaaaagaaaaaatcatacaagatttagagagtgaatttaggattttgtacaaaaagcttttaaaagaaaaagattatcttgctagggataatatattagagcttatgactatttataatatgggcataaactcttattcaatcgctaaaagatttgagatgaatgaagataaaagtcttatacaagttcctttgtttgaaagatatattataggtagaaaatttgtagttaaatataatgatgaaaaacaaagatacgaattaaaaagtaccttttgtgaattttaaggagaaaagatgaaatatcctaatgtttatgtgaaattagttggcgaagatggcaatgcttttagtattctagcaagagtaagcaaggctttaaaaaaagcaggtgtaagcaaagaagaaataagtaaatttcaaaaagaagccatgagtagtgattataatcatttattaaatgtggtgcaagattgggttaatacaaattgatttcaaaaagatgtcaaacaacagcacacattcagccaagcgaagctaatcttgtcttatcaaaacaaaaggagataagatgagtaaagtaatagtagatatcaaaaaaggttttagcaagacttttataaacgcaatttgcaaccataacaatgaacttgttttagaatatcttaaaaatggtatgagtgcaactaaagaatgcatgggcgaagaacctatgttttatgcaataactcataataattttggagcgattttacttttattaaaatacggtgctattttagataaagagtatctagaagaaagcaataaagattttagcaaagaagctctaaagtttttaagctctttgctaaaataaaagagaatataaaaatattctcttagcttttaaaagttcataatcaaaagctctttgctttcttttctttttaaaacattattatttaaagaataccttactttcaactccttaaaattaaaatctttataaagctctcttataagctcacaatcattataagaaagcataaatttacctttgatatttttaagcaaattacataaaagttcatgttcttttagcccaaaacctcctgtgtttttataataattctcagtccctacataaggtggatctaaataaaataaagcttcattgtaatcatattcttttaaaatatattcaaagcttttattttcaatactggcatttttaagtctttttgtatgtaagctaaaatccctacataatctctttggtgctctttgtttactcatagcaaattgtcccatacttgaaccaaaagaagtactgataagataaaaataaaaagcagccctttctaagtcatttcttggcttaatttctttatttttaagcatatgaaagatttttctacttattatcatagaattaagcacatttgctaggctttggggtttgtttcttatacaaagatgtaaattaataagctcgtcgttaatgtcgttaatgacttctatttttgaagcacttttttgataaaaaacacttaaagctcctccaaaaacttcaatatagcttttatgctcaggcattaaagcgatgatttctttagctaaatagtttttaccacccacccaagcaaacggagcttttagtgtagttcttgtaggtttagtaagtgtgctagtttttagaaatttgtctgtattatttttcatacaaactcctttcaaaataaaatttaaaaagctagtctttaaaaataaagctataatacttttgctagtttttagaaaaaggaaggctttagtcttccttgccatcacttcttaacaatttttacaataaaatccttagtatctttataaatcacacttcttatacttgggtgcaagactttgttattatctatgggtaaaaaagctctttgaggaatttttctttttctgtttccccattgatgaacataaccatatttaaagccatttttagtctgtatattattaaagacttctactccgcttttggtaggttcgctttgccaatttaaagcattacttaaatccccatctctttttaaaattcctttattcttaccatcttttatcttttgttttatggtagctggttttaagcttttccattttccattaaaaatactgcattcgtttttaaaagagtctataatgctatttcttatactctctccagcacccgccataatgctttgcccgtgtttatccatatctattaatttatcacaagctttaaaaaagttttcaagcccttttatttctatatattcactcatattttatccataaattgtagtgttaattttgttttgttcttgctttcttaaagcgtcaaatacacttttttgtatagtatttgcaaattcttgcatattaaaattgccatctttagtcgctatgttaaaagtaccattaacacttatattgatattgccattattaaagcttggagtatgatttatactttttgtctcagctaattcatctttataagtgtttgtagtaaagactttttctttgttttgttcactttggcttatcttaacttcttcatcatctccaagccctacaaaatcaagagcatcttttataaagccacttatagatgagatcatatctcctacccaagaaagcttagaagcaaaccaatcaaataaagaaccaaaaatactataaaagaaatccccaacaccttgccaaatagaatttaaaaactcagctaatggagaagcaacactcataataatatctttaaaacttgtaaatacaagggcacatttatcaaatactgctttaatgacattgtatataggctcccaaacaggtttaagccattctataaaagatttaaaccaagacttaaccttatcccaatttgcaataataagcccagccactattgcaatgccccctaaaataagaccaatgggattactcatcatagccatgcttaacactctaataccaatagctacggctttaaaaactttattaagcccacctaaaacaaaagataaggctttaagggaggttgtgtaaatagtagttgtgacggtttttgcttttaaagtaatattagataatatacaagaattacgaaaagctaaaagatgtattcttgttttaatcaaagcacttttaagtaaaatggtgcaatctttaagatagtttttagcaatagcataagctaagactgcaggtttggcgagcaaaaaaactgttgtagctgtagctacgatggtactaagcactggaaattttgaaagtaaggtatctactatatcaattacaaagctaaatcctgaagcgactaatttaactacagggagtaaagcatctgaaaatttaatcgccaaagcacttatattatttcctaaaatttttaatatagaagctgtagtctcacacttattaataagctctttatccattgaacctttcttctcttctgaatttgtcatctttaaaagctcttgataacgatcataaccattaactaaagttgccatagctctaatcgtgccactatcattgccaaaaatattagtaataacacctatttgagactctttatcaagcgtttttattcgtgaaagtaaaatattgattgcttcttgcgaatttcgatttaaagcttttttcataaactccccgctaagacctaattgtgaaaaagcttcttctgccttagctcctaaagtatcagcagttgaaagtttagtaaacatgctagaaatagcagtccctgcaacttcagctgggatctttacttcatcaagcgtagcagcaagagctgccatgttttctctttgaagtcctataagatttcccattcctccaattctgctcacaatatttactatatttttggcatcacttgaacctttatcagctaaatagttaatgctatcacctaaatctttaatgcctttaacatcggtttgaaggtttgccataagaccacctatggcttctcctgcttcattggcactcatttcaaaagcaacacccatagcagtagcagttttaccaaactccaaagcttctttagaggcaagaccaagttttccaccctctgccactatatttgcaatttcttctgctgtcataggaagttttttggataaatctaaaatatcttgttttaagccttctagtgtatgaccttcactaagatctgttactttttttacatcagccatagcactttcaaaatcaataccaacttttatacttttccctacaataccgccacttattatatttcctagagaaaaaagttcatcttgcaaaccttttctttgagcttttaattccgctcttaaattggcattgagtttaagagtgtttaattctttttgtaatccactaatgccgagtttagtttttgctgctattttttctaaattgctaaaatctttaaccaccttgccaacggcacttgcgtttttaatcgctagtcctaaaataacaccaattccaatacttccagcattttccatattcaaccctttttaagcgattgtattttaaaatctttactatgaaagttttaaaatttattaacgatgatataatttcacatattgccttattattaacaacgctcatacctgctttttacataagctatcaaagtgcaagtgatggtttttttaatacaatggctatttttattttttcttattttataagcattatcataactgctattttagtgatgattatgccacccattgctttattgcttattttacccacttggctaattgtaataagtttagattttattctttttgctattttaaaaatttattttttgaaaaataaaacaatcaaaaactcttagcctttaaaaattcttttgaaatttccaaagcttcttcaaactcatctaagcttaaatctaaaacttcatttaatccccaatgcaaagtatgacttataagagctatagcctctaagctataactcctgcttctaccaaaaaatctttaagagcgtcctgtaaagctttaaaatctttaagattcaaatcttcaatttcactttcttgcttattggtaagtgcagctatcatacaaatagtttgctccatttctttttcacttttattagtggcgtttttgagtacacgcacatttggctctctcatttttaattcttcgccattttcaagtttgattattttttctttcatttttctttcctttttatccttctttatggcggaagtaattccgcctgagaagcaactaaaggcttccccacccattgctacgcaatgcccaaaaagccaaactttaatcctaaaatcccagtattgttaattaaactccgattaatcagtgtttaaagggttaaattgcttcttacatcactcatcatatccaccccatttatcattaaaatagtgtttttatgatcgtaggtaatgattggaatgttattgcggcgttgcatgtaaaaatgaactgccattttaatttcagcttccacctcttttccactttcatgatcactttcacttatgcttataaactctcctaaaaactcagcactaataccatagttttttccacctttgtgaacactttctctaaaaagcaaaggagctttaatctcgctaaaagtagtatgaaagaaagccgcataaagcactggatcaacaacggctaatttaaagctaatttctaaaggctttaaaaccccgctactataatttgctcctaaaactcctttggtttcaatcatctcttgttctatatcaggcaattttaaatttctaaccactccaagataaccttgaccatttatataaatattaccttcctgtataacttcgccaattattcttttcatttttattttctccttgtaaaaatttattaactatccgcactaatagttttaatcaaatcactcgcccatttatcagagtagatgaactctaaagtgatttgtttaacgattggattattcatcatttttatatttagataaaacttaccagcactcacattggcatctgtgtttctttcttcatcccagcttacctcataaccaattaaaaccttagctccttttaaatctcttagcaattcttcaatgctgatttttataaaatataattcacttgcttttttatcaatagccttaaaagctgctttttgtcctgctagggctatacgatcaaaagttcttacacgagctaaatcttgccaaatcgtatcttcatggctagtctccccaccccaagagcgataaccttcacttaaaatacaagttgaaatgtgagcatttcttaatctttctgcatcacaatcaaagccattgataaactctataaaatactctgtaccagtaaccccattcatcactctatttgagtaagaatcactaaagccatattctttatccccatctgtatgggctataagccctgcaataaatggactttgtggaacataagcgtattttccttgtgtgtttaagatttgaacctgtggccaagtggcaattaatcttttagagctaaaagcctccattgtattaatagcttcgccaacatttgtagcgtaaagatccacaatagctgtgatattcatagaacttgccacactttcaagcttagcctttactcctgcttcatgtgagtaataaggagtaatgattaaatcaggactaaagcctgttttatgtttggcttttttaaaggcttctatggcattaacaatattggttaaagtgttttcactttcctcgctttcttcaaaaaagctgacgattataacattgtttacattttgtaaattgatacattctaaagtatctaaaagtctaaaatcttgtaagttattttctttgattaaatcgtttacaaattcttttgctttatttacatttgaaaaggcaaagattggcatagcttccacgctttcataaccagcctttgtgtaaatcatttctttacttgcaccttttaagctagcc

SEQ ID NO: 3833 - DNA, 14618 bp, synthetic construct
  source 1..14618: mol_type = other DNA
  misc_feature 1..14618: note = Synthetic
tgattaatactaggcattttgataaaaattttaatcaaattgatttttctaaaattaaaaatttattaccttatgatgcaagattaagtgataatttttttaaacaaattgatacaaaatatgaaaaaattataggtattaatgctttttcaaataatagcgaatatagaggatttaatttttttataaaagattggatagggcttgcaaggcaactttctttaaaatatcctaaatttttatttatacttttaaattttagtacgaattctattcagtataatattgatcagaatgcaaatttgaaagttttctgtaataataaaaatattgcttctttggtaagtatttctcaaaagctagattttttaattactgttgatactggaaatttacatctttgtgatattttacaaattcctactttggcttttacaagtagtcttgcagcttatagatttggaggtggaagttatggaggtagatttgataaattgatagtaaaaccagcttggcaaaaagaatatagaaaaatttatgaaatttttactaaaaaagcagaaaataatttagaaaatttatagtttttataaaataataaatatttattatttattatttaaagatactgctatttttgtagtgttttgttcttttggcaaaggattggtttgtgctagataaaaggctacgagtacatttacaagcatagcgataagcaaaagaggagtggttcgttttataatatccattggagctacttttgcaaatccagctaaagctatgattccgcctgctattggtgaagctgcacgacctaaacaagatgcaatttctataggtaaaactagagtaataggtgcaacgcctaattttgtagctatatcaggagctagttttccaaaagcattaaaagcagcaattccacttcccataatcactgtggcaaaataaactaaaaagcttaaaatagctatacttaaaagaattccaaaccatgcaaaatttcctgttccaagatttgaaaccgcgttagcaaggatattaactccaccaagtgctttaatgccttcagcaaatactccagcagcgatgattatgcttacgactgagataaaaatttcagccatagcttttaaaatcaccatcatatcttcgcctaattttctagcatttctgtgtcttgcaaattcaacaagaaaaactaaagaaatgcttacaaaatttgctgttacaacatcgagcttgatagtaaaaaaatacgctgtaaataaaaatacaacaggtaaccaaggaaagagtatgtaaaaagtagggcatctaggatcaatgatttgcggaatttcaacttcatcatttaaaacacctttttctttatctcttttatcaatccaagcaaaataaaaaggaatcaagatggcaataactacaacataggcaatcacactataaatttggtaatttaaaaaaagccctacgacattatcactttgtcctaccatatctgccatattgattgaatttccatcttttggaccataatcaagcgcaattaaagaaagcacacatacagctgtaataggacggattttaagtgagattaaaacaggataaatacatgctaacaaaagcaaaagcaatccagcatagctagaaatgacgatttttaaagccattccaacaacaaaagttccacttaaaatcaagtatttatttttgatttttcctaagggtttatttgccaaaaaagcaagttttgccgaagcattgatatgtttcatataagcagcaaaacctgccacactcatgataataagtcctactccagaaagctgacttttaaaagtcgctgtgataaaagcataactatcaagtaaaacattcaaaaagcttgcatgttctctgctcggggcttttggtataggtgttcctgtgatgtaaaaagcaaaaataagcaagataatacctgaaagaaaaaatacaaaaataggattgtattttttaagtatataataagcaacgacaattaccgctaaaagtgtagaacatatcataaaaattggcatgatttctcctaaagttattattagcttttattttattttagctaaaatttaactaataaatatttttcatttaaaattttacttattttttgcattataaaattaataatatgtatagtttggttactgaaaagtttatgtttgtataaaaaatgatttttatattataattataaacaaattataaatatcaaaaaggatctagtgtggcaagaattttggcatttgatataggaataagctctattggctgggcatttagcgaaaatgatgagttaaaagattgcggagttaggatttttacaaaggctgaaaatcctaaaacaggagaatccctagccttaccaagacgccttgcaagaagtgccagaaaacgccttgctagacgcaaagcaaggctaaatcacttaaaacatttaatcgcaaatgagtttaagttaaattacgaagattatcaaagctttgatgaaagtttagctaaggcttataaaggctctttaattagcccttatgagttaagatttagagctttaaacgagcttttaagtaagcaagattttgcaagagtgattttacatattgcaaaaaggcgtggctatgatgatattaaaaataatggtgatgaagaaaagagcgagattttaaaagctatcaagcaaaatgaagaaaaactagtaaattatcaaagtgtgggagagtatctttataaagagtattttcaaaaattcaaagaaaattccaaagaatttataaatgttagaaataaaaaagaaagttatgaacgctgcataacgcaaagttttttaaaagatgaattaaagcttatttttcaaaaacaaagagaatttggcttttctttttcaaagaaatttgaagaagaagtgcttagtgtagcattttataaaagggctttaaaagatttttctcatttagtgggaaattgtagtttttttactgatgaaaaaagagcgccaaaaaattcgcctttagcttttatgtttgtagcactcacaagaattatcaatattttaaacaatcttaaaaatactgaaggaattttatatacaaaagatgatttaaacgcccttttaaatgaagttttaaaaaacggcactctaacttataaacaaacaaaaaagcttttgggcttaagcgatgattatgaatttaaaggagaaaaaggaacttattttattgagtttaaaaaatacaaagaatttataaaagccctaggtgagcataatttaagccaagatgatttaaatgaaatagcaaaagatatcactcttataaaagatgagattaaacttaaaaaggctttagcaaaatacgatttaaatcaaaatcaaattgatagcttaagcaaattggaatttaaagaccatttaaatataagttttaaagccttaaaacttatcactcctttaatgcttgaaggtaaaaaatacgatgaagcttgcaatgagcttaatttaaaagtagcaatcaatgaagataaaaaagactttttacccgcatttaatgaaacttattacaaagatgaagtaactaatcctgtggttttaagggcgattaaagaatatagaaaaatcttaaatgccttacttaaaaaatacggtaaagtgcataaaataaacattgaattagcaagagaagtaggtaaaaatcacagccaaagagctaaaatagaaaaagagcaaaacgaaaactacaaggccaaaaaagacgccgaaattgaatgtgaaaaactaggcttaaaaataaatagcaaaaatattttaaaattaagattatttaaagaacaaaaagaattttgtgcttatagtggagaaaagattaaacttagtgatttgcaagatgaaaaaatgcttgaaattgaccatatttacccttattctagaagttttgatgattcttatatgaataaagttttagtttttaccaagcaaaatcaagaaaagcttaataaaaccccctttgaagcctttggcaatgatagtacaaaatggcagaaaattgaagttttggcaaaaaatttacctgaaaaaaagcaaaaaagaattttagataaaaattacaaagacaaagagcaaaaagactttaaagatagaaatctaaacgatactcgctacatcgcaaggcttgttttaaactacactaaagattatttagattttttacctttaagcgatgatgaaaatacaaaattaaacgatacgcaaaaaggctcaaaagtgcatgtagaagcaaaaagcggtatgctaacatcggctttaaggcacacttggggctttagcgctaaggatagaaacaaccatcttcatcacgccatcgatgcagcaattattgcttatgcaaacaattctatcgtaaaggctttttcagattttaaaaaagagcaagaaagcaacagtgtagaactttatgcaaaaaaaattagtgaattagattataaaaacaaaaggaagttttttgagccttttagtggttttaggcaaaaggttttagataaaattgatgaaatttttgtctcaaaacctgagagaaaaaagctgtaaggggtattttaaaaagaacatgtaactatccctaaataattttagcaaaaatcccaaataataggcttttagagcatataaaaacgactttttatctttcctaatttaaagtgtaaaatatcccaaatatcctaaaatgtccgttttgtcccaagaaagtgattaaatactgtttaaaaggcatataaatacgagctttgattttaaattttatattccaaaagtgttttttactctctaggatagttacatttttgcttaaaatattcttatatttttttaaccatgtaactatccctataaaacactatatatccatagcacaaccactttttatataaaaatagcatgtaactatctatagctttaaggtttggaagatagttacatagaaaacttaaatatttttatataattacataaatattttataggagtgtataatgaataagattgacaatattgcaaattttttaaataaaaaatctaaaaaatgtttagctataaatgggtcttggggtataggtaaaacttatttatggaaacaagttgaaaagaaactttctgaagatagcaaagataaagaagataaaaaagttgtttatatagatctttttggcaaagaaagctataagcaaatattagaagaaatagtttttaaattatatggaacttacaattctattacagaaaaaacctctgatattataagcggtcttataaaaaaagtaagctgtgagtttataaaaatagaacctaatgctatcttttcctttttaaaaaaggaagactttaataatattattgtgtgttttgataatatagaaagaagatcagataatctttctttgaaagaaattttaggacttgtaaatttacttaaagaagaaaaagaatgtaatgttgttatgatttttcacaaaggtgaattagaagaacaagacagtaattcaactataaatgataaagaaaaacaagctaaacaagataatagtaaaaactggtaccaaacatacaaagaaaaggttattgattgtgaaataaccataaaaaacaatgatgaagcagcaaaagcaattataaaagagaaaatagatcaatatactaaaattacggatgagataagaaatattattgaaaatattatttttgaaatatataaagaacattgcaatggcaatttaagattattatttcacgcattagaacacatagattattttaataagcattgttttttaaaatttagagaatatgatgataaacaagcatttgcaattgctctaaaattaaattatcaatcattaatatttcaaactaaaaaatatctttctattaaaatagagacaatcgacttatcttcaggcttctatcatctttatgaaaaatacctaaaaaatatgttttatttaagtaaaaaagaaaaagaacaagtaagatatgattttaatcaaactctaaaaactaatttttatttcaagcttcaaaactgcaaaatggaacatttaacaggtaatttaagtgatgagcaatttgtaaaagttgttgaaaattcactcttagaaatagacttttattcaaaaggtggaattatttattatccttatgatttttatcaagatttattttcaacctacacacaaattacaaagaaaaaattaagcaatatagaagaaaaaatcaataaacattacatagaagctcttgttacagaagaattagaatttgattttcgtgataactataaatctgataaagatcttttaaaattattagaaaatgaaaaatggaagcgttattatgaagacaccaaagaaaaatacataacaagcaagtatgaaaatattaatgcttttattaatagctgtgaaaatatagaaagtagttttaattctgaagcaatcaagcaatatactttttttaaaaaagaagaattaatacaactatttaaagaaaataacgatttttataagaaattttttaatcatttttctaaaaatatgaatataaatcataattttaatgatgatttaaacaataatttatttcgagcttatttggattttttggatttagatgaaaataaaataaaaaaaagtattgttttaaaatatataaattcacgaaatagtgtattaagaaagctactaatagaataattgctaactttcaaaacaaaagtttttaattgctttttgaaattttatgtttaaattctttgaaattaaaatcaaaggattaaaatgcaaatgcaagaagtgattgaaaaattaaaagatatacttgcaagtgaaggtaagcgtgatttaaaaaccaaagatatagccaaagaattaggaatcaatcctgatacttttaattccatgaaatttagaaactccattccttatccacaaatcttaaactttttaaataagaggaatataagtataaattatttcttttatggtgtctctcctaaagatcaattagaatgtgagaataaatataaaattttaaagctttataaaacaaatgcgagtttaggtggaggtggtataaatgatttgattgatagctctgatttaatcatcgatgaaaaggttttaaacttttttggaagtaaagaatgtgagtttatcacttgttatggagagagtatggagccacttataaaagatggaagtatttgtgtaatagatagaaataaaacttttaagaataaaagcatttgtgtgattaatactagagatggactttttataaaacaagttttaaagcaaaatgatggagtaatgcttcattctttaaatcctttgtataaagatatattttataaaaatggagattttttgctaattggtgtggtaattggagaactttcaagactatgacagcacacaataagctaagccaagctaatctcacagagagtgtaaaacacaaggttgttctatcaaaaaaggagataaacatgaaagatatcaaaaattacaccgataaagaattaaaagaaaaaatcatacaagatttagagagtgaatttaggattttgtacaaaaagcttttaaaagaaaaagattatcttgctagggataatatattagagcttatgactatttataatatgggcataaactcttattcaatcgctaaaagatttgagatgaatgaagataaaagtcttatacaagttcctttgtttgaaagatatattataggtagaaaatttgtagttaaatataatgatgaaaaacaaagatacgaattaaaaagtaccttttgtgaattttaaggagaaaagatgaaatatcctaatgtttatgtgaaattagttggcgaagatggcaatgcttttagtattctagcaagagtaagcaaggctttaaaaaaagcaggtgtaagcaaagaagaaataagtaaatttcaaaaagaagccatgagtagtgattataatcatttattaaatgtggtgcaagattgggttaatacaaattgatttcaaaaagatgtcaaacaacagcacacattcagccaagcgaagctaatcttgtcttatcaaaacaaaaggagataagatgagtaaagtaatagtagatatcaaaaaaggttttagcaagacttttataaacgcaatttgcaaccataacaatgaacttgttttagaatatcttaaaaatggtatgagtgcaactaaagaatgcatgggcgaagaacctatgttttatgcaataactcataataattttggagcgattttacttttattaaaatacggtgctattttagataaagagtatctagaagaaagcaataaagattttagcaaagaagctctaaagtttttaagctctttgctaaaataaaagagaatataaaaatattctcttagcttttaaaagttcataatcaaaagctctttgctttcttttctttttaaaacattattatttaaagaataccttactttcaactccttaaaattaaaatctttataaagctctcttataagctcacaatcattataagaaagcataaatttacctttgatatttttaagcaaattacataaaagttcatgttcttttagcccaaaacctcctgtgtttttataataattctcagtccctacataaggtggatctaaataaaataaagcttcattgtaatcatattcttttaaaatatattcaaagcttttattttcaatactggcatttttaagtctttttgtatgtaagctaaaatccctacataatctctttggtgctctttgtttactcatagcaaattgtcccatacttgaaccaaaagaagtactgataagataaaaataaaaagcagccctttctaagtcatttcttggcttaatttctttatttttaagcatatgaaagatttttctacttattatcatagaattaagcacatttgctaggctttggggtttgtttcttatacaaagatgtaaattaataagctcgtcgttaatgtcgttaatgacttctatttttgaagcacttttttgataaaaaacacttaaagctcctccaaaaacttcaatatagcttttatgctcaggcattaaagcgatgatttctttagctaaatagtttttaccacccacccaagcaaacggagcttttagtgtagttcttgtaggtttagtaagtgtgctagtttttagaaatttgtctgtattatttttcatacaaactcctttcaaaataaaatttaaaaagctagtctttaaaaataaagctataatacttttgctagtttttagaaaaaggaaggctttagtcttccttgccatcacttcttaacaatttttacaataaaatccttagtatctttataaatcacacttcttatacttgggtgcaagactttgttattatctatgggtaaaaaagctctttgaggaatttttctttttctgtttccccattgatgaacataaccatatttaaagccatttttagtctgtatattattaaagacttctactccgcttttggtaggttcgctttgccaatttaaagcattacttaaatccccatctctttttaaaattcctttattcttaccatcttttatcttttgttttatggtagctggttttaagcttttccattttccattaaaaatactgcattcgtttttaaaagagtctataatgctatttcttatactctctccagcacccgccataatgctttgcccgtgtttatccatatctattaatttatcacaagctttaaaaaagttttcaagcccttttatttctatatattcactcatattttatccataaattgtagtgttaattttgttttgttcttgctttcttaaagcgtcaaatacacttttttgtatagtatttgcaaattcttgcatattaaaattgccatctttagtcgctatgttaaaagtaccattaacacttatattgatattgccattattaaagcttggagtatgatttatactttttgtctcagctaattcatctttataagtgtttgtagtaaagactttttctttgttttgttcactttggcttatcttaacttcttcatcatctccaagccctacaaaatcaagagcatcttttataaagccacttatagatgagatcatatctcctacccaagaaagcttagaagcaaaccaatcaaataaagaaccaaaaatactataaaagaaatccccaacaccttgccaaatagaatttaaaaactcagctaatggagaagcaacactcataataatatctttaaaacttgtaaatacaagggcacatttatcaaatactgctttaatgacattgtatataggctcccaaacaggtttaagccattctataaaagatttaaaccaagacttaaccttatcccaatttgcaataataagcccagccactattgcaatgccccctaaaataagaccaatgggattactcatcatagccatgcttaacactctaataccaatagctacggctttaaaaactttattaagcccacctaaaacaaaagataaggctttaagggaggttgtgtaaatagtagttgtgacggtttttgcttttaaagtaatattagataatatacaagaattacgaaaagctaaaagatgtattcttgttttaatcaaagcacttttaagtaaaatggtgcaatctttaagatagtttttagcaatagcataagctaagactgcaggtttggcgagcaaaaaaactgttgtagctgtagctacgatggtactaagcactggaaattttgaaagtaaggtatctactatatcaattacaaagctaaatcctgaagcgactaatttaactacagggagtaaagcatctgaaaatttaatcgccaaagcacttatattatttcctaaaatttttaatatagaagctgtagtctcacacttattaataagctctttatccattgaacctttcttctcttctgaatttgtcatctttaaaagctcttgataacgatcataaccattaactaaagttgccatagctctaatcgtgccactatcattgccaaaaatattagtaataacacctatttgagactctttatcaagcgtttttattcgtgaaagtaaaatattgattgcttcttgcgaatttcgatttaaagcttttttcataaactccccgctaagacctaattgtgaaaaagcttcttctgccttagctcctaaagtatcagcagttgaaagtttagtaaacatgctagaaatagcagtccctgcaacttcagctgggatctttacttcatcaagcgtagcagcaagagctgccatgttttctctttgaagtcctataagatttcccattcctccaattctgctcacaatatttactatatttttggcatcacttgaacctttatcagctaaatagttaatgctatcacctaaatctttaatgcctttaacatcggtttgaaggtttgccataagaccacctatggcttctcctgcttcattggcactcatttcaaaagcaacacccatagcagtagcagttttaccaaactccaaagcttctttagaggcaagaccaagttttccaccctctgccactatatttgcaatttcttctgctgtcataggaagttttttggataaatctaaaatatcttgttttaagccttctagtgtatgaccttcactaagatctgttactttttttacatcagccatagcactttcaaaatcaataccaacttttatacttttccctacaataccgccacttattatatttcctagagaaaaaagttcatcttgcaaaccttttctttgagcttttaattccgctcttaaattggcattgagtttaagagtgtttaattctttttgtaatccactaatgccgagtttagtttttgctgctattttttctaaattgctaaaatctttaaccaccttgccaacggcacttgcgtttttaatcgctagtcctaaaataacaccaattccaatacttccagcattttccatattcaaccctttttaagcgattgtattttaaaatctttactatgaaagttttaaaatttattaacgatgatataatttcacatattgccttattattaacaacgctcatacctgctttttacataagctatcaaagtgcaagtgatggtttttttaatacaatggctatttttattttttcttattttataagcattatcataactgctattttagtgatgattatgccacccattgctttattgcttattttacccacttggctaattgtaataagtttagattttattctttttgctattttaaaaatttattttttgaaaaataaaacaatcaaaaactcttagcctttaaaaattcttttgaaatttccaaagcttcttcaaactcatctaagcttaaatctaaaacttcatttaatccccaatgcaaagtatgacttataagagctatagcctctaagctataactcctgcttctaccaaaaaatctttaagagcgtcctgtaaagctttaaaatctttaagattcaaatcttcaatttcactttcttgcttattggtaagtgcagctatcatacaaatagtttgctccatttctttttcacttttattagtggcgtttttgagtacacgcacatttggctctctcatttttaattcttcgccattttcaagtttgattattttttctttcatttttctttcctttttatccttctttatggcggaagtaattccgcctgagaagcaactaaaggcttccccacccattgctacgcaatgcccaaaaagccaaactttaatcctaaaatcccagtattgttaattaaactccgattaatcagtgtttaaagggttaaattgcttcttacatcactcatcatatccaccccatttatcattaaaatagtgtttttatgatcgtaggtaatgattggaatgttattgcggcgttgcatgtaaaaatgaactgccattttaatttcagcttccacctcttttccactttcatgatcactttcacttatgcttataaactctcctaaaaactcagcactaataccatagttttttccacctttgtgaacactttctctaaaaagcaaaggagctttaatctcgctaaaagtagtatgaaagaaagccgcataaagcactggatcaacaacggctaatttaaagctaatttctaaaggctttaaaaccccgctactataatttgctcctaaaactcctttggtttcaatcatctcttgttctatatcaggcaattttaaatttctaaccactccaagataaccttgaccatttatataaatattaccttcctgtataacttcgccaattattcttttcatttttattttctccttgtaaaaatttattaactatccgcactaatagttttaatcaaatcactcgcccatttatcagagtagatgaactctaaagtgatttgtttaacgattggattattcatcatttttatatttagataaaacttaccagcactcacattggcatctgtgtttctttcttcatcccagcttacctcataaccaattaaaaccttagctccttttaaatctcttagcaattcttcaatgctgatttttataaaatataattcacttgcttttttatcaatagccttaaaagctgctttttgtcctgctagggctatacgatcaaaagttcttacacgagctaaatcttgccaaatcgtatcttcatggctagtctccccaccccaagagcgataaccttcacttaaaatacaagttgaaatgtgagcatttcttaatctttctgcatcacaatcaaagccattgataaactctataaaatactctgtaccagtaaccccattcatcactctatttgagtaagaatcactaaagccatattctttatccccatctgtatgggctataagccctgcaataaatggactttgtggaacataagcgtattttccttgtgtgtttaagatttgaacctgtggccaagtggcaattaatcttttagagctaaaagcctccattgtattaatagcttcgccaacatttgtagcgtaaagatccacaatagctgtgatattcatagaacttgccacactttcaagcttagcctttactcctgcttcatgtgagtaataaggagtaatgattaaatcaggactaaagcctgttttatgtttggcttttttaaaggcttctatggcattaacaatattggttaaagtgttttcactttcctcgctttcttcaaaaaagctgacgattataacattgtttacattttgtaaattgatacattctaaagtatctaaaagtctaaaatcttgtaagttattttctttgattaaatcgtttacaaattcttttgctttatttacatttgaaaaggcaaagattggcatagcttccacgctttcataaccagcctttgtgtaaatcatttctttacttgcaccttttaag

SEQ ID NO: 3834 - DNA, 14437 bp, synthetic construct
  misc_feature 1..14437: note = Synthetic
  source 1..14437: mol_type = other DNA
aaattaagtgatgaatttttagttaaattgatattaaatatgaaaaaattataaatattaatactttttcaaattaatagtaaatatagagggtttgattttttcacaaaagatttggatagaacttgcaaaaaactttcttcaatatttatacttttaaattttgatgcaaatcctattcaatatagcattggcaaaataaactaaaaagcttaaaatagctatactcaaaagaattccaaaccatgcaaaatttcctgttccaagatttgaaaccgcgttagtaaggatattaactccaccaagtgctttaatgcctttagcgcatactccagcggcgatgattatgcttacgactgagataaaaatttcagccatagtcttttaaaatcaccatcatatcttcgcctaattttctagcatttctgtgtcttgcaaattcaacaagaaaaactaaagaaattcttacaaaatttgctatcacaacatcgagcttgatagtaaaaaaatacgctataaataaaaatataacaggtaaccaaggaaagagtatgtaaaaagtaggacatttaggatcaatgatttgcggaatttcaacttcatcatttaaaacacctttttctttatctcttttatcaatccaagcaaaataaaaaggaatcaagatggcaataattacaacataggtaatcacactataaatttggtaatttaaaaaaagccctacgacattatcactttgtcctaccatatctgccatattgattgaatttccatcttttggatcataatcaagtgcaattaaagaaagcgcacatacggctgtaataggacggattttaagtgagattaaaacaggataaatacatgctaacaaaagcaaaagcaatccagcatagctagaaatgacgatttttaaagccattccaacaacaaaagttccacttaaaatcaagtatttatttttgatttttcctaagggtttatttgctaaaaaagcaagttttgctgaagcattaatatgtttcatataagcagcaaaacctgccacactcatgataataagtcctactccagaaagctgacttttaaaagtcgctgtgataaaagcataactatcaagtaaaacatttaaaagcttgtatactctctgcttggagcttttggtataggtgttcctgtgatataaaaagcaaaaataagcaagataatatttgaaagaaaaatacaaaaatgggatcgtatttttttgagtatatcataaaaattagcatagggtctcttgaatttacaataaattggattttatctaaatttttaaataaaaaatatttttttatttaaaaattacttgttttttgtattataaaattaacatatatagtttggttactgaaaagtttatgtttgtttaaaaaatgatttttgtattataattatacacaaatcataaatattaaaaaggatctagtgtggcaagaattttggcatttgatataggaataagctctattggctgggcatttagtgaaaatgatgagttaaaagattgtggagttaggatttttacaaaggctgaaaatcccaaaacaggagaatccttagccttgccaagacgccttgcaagaagtgctagaaaacgccttgctagacgcaaagcaaggctaaatcacttaaaacatttaatcgcaaatgaatttaagttaaattacgaagattatcaaagctttgatgaaagtttagccaaggcttataaaggatctttaattagcccttatgagttaagatttagagctttaaacgagcttttaagtaagcaagattttgcaagagtgattttacatattgcaaaaaggcgtggctatgatgatattaaaaatagtgatgataaagaaaaaggtgcgattttaaaagctatcaagcaaaatgaagaaaaactagcaaattatcaaagtgtgggcgagtatctttataaagagtattttcaaaaattcaaagaaaattccaaagaatttacaaatgttagaaataaaaaagaaagttatgaacgctgcatagcgcaaagttttttaaaagatgaattaaagcttatttttaaaaaacaaagagaatttggcttttctttttcaaaaaaatttgaagaagaggtgcttagtgtagcattttataaaagggctttaaaagatttttctcatttggtgggaaattgtagttttttttaccgatgaaaaaagagcgccaaaaaattcgcccttagcttttatgtttgtagcacttacaagaattatcaatcttttaaacaatcttaaaaatactgaaggaattttatatacaaaagatgatttaaacacgcttttgaatgaagttttaaaaaacggcactctaacttataaacaaacaaaaaagcttttgggtttaagtgatgattatgaatttaaaggagaaaaaggaacttattttattgagtttaaaaaatataaagaatttataaaagccctaggtgatcatagtttaagccaagatgatttaaatgaaatagcaaaagatattacccttataaaagatgagattaagcttaaaaaggctttagcaaaatatgatttaaatcaaaatcaaattgatagtttaagcaaattggaatttaaagaccatttaaatataagttttaaagccttaaaacttatcactcctttaatgcttgaaggtaaaaaatacgatgaagcttgtaatgagcttaatttaaaagtagcaatcaatgaagataaaaaagattttttacccgcatttaatgaaacttattataaagatgaggtaactaatcctgtggttttaagggcgattaaagaatacagaaaggtcttaaatgctttacttaaaaaatacggcaaagtgcataaaataaacattgaattagcaagagaagtaggtaaaaattatagccaaagagctaaaatagaaaaagagcaaaatgaaaactacaaggccaaaaaagacgccgaacttgaatgtgaaaaactaggcttaaaaataaatagtaaaaatattttaaaattaagattatttaaagaacaaaaagaattttgtgtttatagtggggaaaagattaaaattagtgatttgcaagatgaaaaaatgcttgaaattgaccatatttacccttattctagaagttttgatgattcttatatgaataaggttttagtttttaccaagcaaaatcaagaaaagcttaataaaaccccatttgaagcctttggcaatgatagtacaaaatggcagaaaattgaagttttggcaaaaaatttacctgaaaaaaagcaaaaaagaattttagataaaaactataaagacaaagagcaaaaagactttaaagatagaaatctaaacgatactcgctacatcgcaaggcttgttttaaactatactaaagattatttagattttttacctttaagcgatgatgaaaatacaaagttaaacgacacacaaaaaggctcaaaagtgcatgtagaagcaaaaagcggtatgctaacatcggctttaagacacacttggggctttagcactaaggatagaaataatcatcttcatcacgctattgatgcagtaattattgcttatgcaaacaactctatcgtaaaggctttttctgattttaaaaaagagcaagaaagcaacagtgcagaactttatgcaaaaaaaattagtgaattagattataaaaacaaaaggaagttttttgagccttttagtggttttaggcaaaaggttttagataaaattgatgaaatttttgtctcaaaacctgagagaaaaaagccaagcggagccttacatgaagaaacatttagaaaagaagaagaattctatcaatcatacggcggaaaagaaggagttttaaaagccctagagcttggtaaaatccgcaaagtaaatggtaaaattgttaaaaatggcgatatgtttagagtggatatttttaaacacaaaaagacaaataaattttatgctgtgccaatttatactatggattttgctttaaaagtattaccaaataaagctgtagcacgaagtaaaaaaggtgagataaaagactggattttaatggatgaaaattatgagttttgcttttctttatacaaagatagtttgattttaattcaaactaaagatatgcaagagccagaacttgtttattttaatgcttttacaagctctactgttagtttgattgtttcaaaacacgataataaatttgaaacgctaagcaaaaatcaaaaaatattgtttaaaaatgcaaatgaaaaagaagtaatcgcaaaaagcataggaattcaaaatctaaaagtatttgaaaaatacatagtttcagcacttggagaagtgacaaaggctgagtttagacaaagagaagattttaaaaatgagttacgatgaagcttttaaaacactgcttattagctctaatgccaagctaaatttagagctaaatcatcttgtgattaagcaagatgaaaatatagccaaattgtttttaaaagatataaatatcatcgttttagaaagcttacaagcaagccttagttccgcactttttaacgcttttgcaaagcataaaatcatcttgctaacctgcgatgaaactcatagtataaatggtatttttgctccttttttagggcattttcaaagtgcaaaaatcgcaaaagaacaaataaatgtaagtgctcaaaaaaaggctattttatggcaaaaaatcattaaaaataaaatcctaaatcaagcctttgttttgaaaaaacacaataaaatagagcaaagcaatgagcttataaatttggctaaaaaagtaagtctaaatgatagtaaaaatatcgaagctgttgcagcggcgctttattttaaaactttgtttgggacttctttttcaagagatgagctttgctttgaaaattctgctttaaattatggctatgcaatcattagggcttgtattattagagcagtttgtataagtgggcttttgccttggcttggcattaagcacgataatatttataattcttttgcgctttgtgatgatttgatagaagtgtttagggctagtgttgatgattgtgttttaaagcttaagggtgaaagtgagtttttaagcaaagatgacaaaagagcgttgattggcaatttacaaagcaaaatcaattttgatgggcaaaattatcctttaaacagagcgataaatcattatgtggcgaattttaaaaatgctttattgtatgaagatgaactaaagatagtgaaatttgatgattgaagataaatttatgcgcgtgcttttgatgtttgatgtacctactaaaagtaaaaaagagcaaaaactagcaagtaaatttagaaacaatcttataaaattaggttattttatgctgcaatttagcgtttatatgcgtatttgcaagggtttaagttctgcaaaaagttctattgaaaatgtaaaaaagattttgccaccttatggaaatgtaagggctttaatcatcactgaaaagcaatttgataaaatggagcttttgcttggtggcatagtttttaatgaaaaagttaataacgaaaccaatttaacactttttgatatagatagtcatggagaatttaaatacaaaaattcaaataatgaagaaatacaactaaacaaaaaacaagaaaaatatcatcagcaaaatttatttgaattttaaaagcggttttaagggattgtaaccccgcagagtcccgcaaactctttattttagtccctttttaaatttcttatgagattatagcataatttttgctatttttcatcaaaaaacccctaaattttcattatctggtaaatatctattttaccataaagaaatttaaaaagggactaaaactaccatatcgcaccctgtggctctactgttattttaccataaagaaatttaaaaagggactaaaactacttgattatcgttatactctaaaggttcattttaccataaagaaatttaaaaagggactaaaaccctagtggattgaaactctgctagggctaattactccactaaaaggaggttgcaaatttgaaacttattgaaatttagggttgattaaaatcgaaataaaattatttaaataattttaaggcataaagataatatccactaagctttcattttctaacatttcacattcttttggtaccaccataagggcagctttattgttaagattgtttataatcgcactagagccttctttcttaccttcaagattggctaaaatgcgtccatttttaaactctatattgcaagcgacaaattccaaataaggtgtttttttcttgtaacttccttgtaaaaaggctttgcaaatatagtctttaggttgaagtaaccaagagtttaaaatctctcttgcgtaaagattaaacattaccatagccgagtaaggaaaacctggtaaggcgatgatgaatttttcattagccttagctattttgatatgtctgcctggttttatgtcggctttatcgatgatgatttcatattctttgacggctttttttaaaaagtcaaaatctcccatagaaactccgcccgttgtaatcaaaatatcacaactttgcaaagcactttcaagggtagaaaaagtggctttttcatcatcttttaaaagaggaaaaacccttgtatcgcaatttaaatttttagctaaattagctatggcgatatgatttgaagagcggatttgagcgggattttctaaggcttctcctagatctttgatctcgcttccactacttaaaacccctacaataggctttataaacacactaatgtgaaaaaatccaagttcagccaaaagagctatctcactataatttaaccttgtgccttttttgagtaaaatttcatcttttttatagttttctcctaccgcacgcacagcaaaagcttggggaacttttttttctataaaaagagtatcattttctacgcgtacattttcaacagggactaaagtatcgcttccttcgctcatgagtgagcctgtaaaggtttttacacatgtgccattttgtacgctaaattgtggcatagtgcccgcaggtgtgaggcctaaaatttttaaaggcttgtcttgatcttcaaatttgatcgcataaccatccatagccgaggttggaaattcaggctgatttttaggggcttttatatcttgagctaaaatgcgtcctaaacactctgtaagagctattttttcaatcttttcataggttttgatatgagaatgtaaaatttttaaactttcttcataagacattagcatctttattccttcatactgatataaatttgagtcttgtttgttgtataaaattcaaaatctgtgtcaaattttctttggagacttgaatttttaaaaaattcattgatattttgccaaagttttggggcaatgatttcaggttttccaaaaccttcaaaaagcatgtatttgccaccttttatacaaattttttcgcctttttcgtgaggatttttcacgcccacacaaattttatactctagcttgtgagtgtttttataatcataatacacgctataaatttcatcgggcgcaccaaagatgctatgaaattttttccacaaaggaaaaatcaaagaactatttaaatcgctctcaagttcctcatcagttttaacgcttactccataaatactaaattcttctatttcttgtatcattttaaaagtcctgcaccgcaaagtttggttgatctttctttggcataaattctttctttgtttatcacatcatacttccaaatgggcgcacttgctttaaaatcttcaacaaattcattaagaagtttaagtcctaattttctttgtttgcttaaaattcctgcaaaatacgagctttcatgtatcgctacatcgcctatagagtgagcaaaaagcaagctaataccatcaaaatctactcttttttgccactcatcaaaccatttttttaaaagcggttcataaatatcaaaactaagtgcctcaatacctccttcttcacgcacaataccacaaaaagtcagtaaagcaccgcagtttttatccttggaaaattcataccattggctataaattttaggaatatctaaagagccttgataaagtgtaaaatgttccatttaacccccgcaaactggcggtaaaagtgctattttatcaccatcttttaacttggtgttttcatcaaaaatgatttcatcatttaaagatacagcacaaagttctagccattcttttaaactctcatctttttgcaaaatttcttttaattcttttaaattttttacttcaagttctaaattttctttatttatagggcctaaaaattccacttttaccattttattcctttacttctaaatttcccatcattcctaaatcttcatgttctaaaatatggcaatgatacattctaagtcctttaaaatcttgtttcattctaagtcttaactcttcattaggacgcacatttatagtatctctgaaggctctaaattcggctttttgaactttgccattgagttttgatgagatgagttcaaattgcgtgccgtgtatgtggaaaggatgatccatgtgagatttatttatcactatccagtcttcaactactccaagcttggagcttaaatcaatgcgttttaaatcatagcttttgccattgattaaaaacatagacgcaagagcgatttttaattcgctttcactttttcccatcataccatgcatttgcatatgatcttcactcatgattatttctttaaattccttaggctcttctaaaggtttgaaaatttttaaattttttggaagttctaatttttctttttttaggctaatactagctaaaaatagggtattaggttcttcttttaccatcattttatccctatcataataagcactttctagtctaaattccccatcttttggagcatcgattaaaacttctacgcgagaagcaggacttaagaaaagttcttctttataaatagctttttctataagtccgccatcagtaccaacaagtataaatttagccccttgtatgcgtaaatttaaatatcttgccgcagtagcattataaattcgtatgcgttcgtttgtggcgagtttgattttaggtttaaattgtccattgatgagtacaaattctccttctctaccattaagccaatcatttaggttgttgtttggaatttgagcgttttcatcaagacgcaaatcgctaatcatcaaatctctttcttttaaatgacttaaagcatcttttttcgctttgatcacaaaagcccccgccaaacccataaagacttgtttagaagtggtataatgaggatgcggatgataccagtaagttcctgcgctatcttgaggaatttcaaaacgatatattctttcttcccctgctaagataggatcatgtgggcttccatcttgatcaggtggtacaggaacgccatgccaatgtatagttgtagcttctttgagtttatttttgactaaaatttcaagtttatctccttcaaaaacttctatttttggagcaggtactaggccgttgtaagtataaaataaggtttttttacctttgataagttctatatgattttctttgatttctagggtagcacgaaaaatatttttttctttactttcatttttgagcaaaggtaaggcttttaaaatttctccttgggggaattgttttggatctaaaagttttaaattttttggagcaaagtttataaaagaagtatctaagtcatgatttatagaatgatttttatgcatggagtgcatatcgtgcataggatttgcataggctacacccatacttgctagagtaagtgcattaaattttaaaaaatttcttctattcattagtttttccttttgcttgattttttgtattatagtcattatttttttagttttagtaaatatttattttgaaaatttggtttaattttgttatgattttagcaatttaatcaaggaaaaataatgttttatgaaaatattcaaaccccagcttatattttagaagaagataaattaagaaaaaattgcgagcttttagcaagtgttggcgaaaaaagtggtgctaaagtgcttttagctttaaaaggttttgctttttcaggagcgatgaaaattgttggagaatacttaaaaggttgtacttgtagcggactttgggaagcaaaatttgctaaagaatacatggataaagaaattcatacttattcgcctgcttttaaagaagatgaaatcgatgaaatagccagcttatctcatcatatagtgtttaactctttagctcaatttcataaatttcaagctaaaacacaaaaaaattccttaggtcttcgttgtaatgttgaattttctctagccccaaaagaactttacaatccttgtggaagatactcaagacttggaattcgtgctaaagattttgaaaatgtggatttaagtaccatagaaggacttcattttcacgcactttgtgaagaaagtgctgatgctttagaagctgttttaaaggtttttgaagagaaatttggcaaatggatagggcaaatgaaatgggtgaattttggaggagggcatcacatcaccaaaaaaggctatgatgttgaaaagcttattgctttgtgtaaaaatttcagtgataaatatagcgtgcaagtttatcttgaaccaggtgaagcggtaggttggcaaacaggaaatttagtggctagtgtagtagatatcatagaaaatgaaaagcaaattgctattttagacacttcaagcgaagcgcatatgccagatactattatcatgccttatacaagtgaagttttaaatgctagaattttagccacaagagaaaatgaaaaaatttcagacttaaaagaaagcgaattttcctatttgcttactggaaatacttgtttagcaggtgatgtaatgggagaatacgcctttgataaaaagcttaaaatcggcgataaaattgtttttttagatcaaattcattacaccattgtgaaaaacacaacttttaatggcataagacttccaaatctcatgcttttaaatgcaaaaaatgaacttcaaatgataagagaattttcttataaggattattctttaagaaattagtattatttataatttgcataaaatgttaattttactcggaagagaatcaaagatgtaaattttatgcaaagtattttattttttcaaatataaaatcaactcaaatatctaattttcaatactttggtatgattttttaatattttaaatccttgtggaattttattgaaattcagtgatttttaaatcaaatagtattaagataaatcgatttaaaaatcggctttaaaatgaatattaggtatattttgcataatattcattcaagcaaaatttaaagctatttttgaaaattttgaatgcatgggggctttaatggatttggaaaaattaagattagctagaagtctttattatcaatgtctaggagagctttttgttttttcattttctgaagaaagattgtcaaaattacaagagtatttaaagacaatgcaagaatgtttatttgatgaaaatttaaaatcaaattttgatatcttgcttaagcatttagatgatgaaaattctatacaagcattttttaaagaatatgatttgctttttttaagtcttaaaaatagcattccaacgactttttcttacatagaagaaggttttgaaaattcaaatcctttactttgcgtgcgtcaaattttagtcaaaagtaaaataagacgcaatgaaaaattttttaaagaaagtgaagatagtgttggattttgtttattgttgatgagtgaatttttaaggcaaaatgaagatgatttagccaaagagctttttgaaaaagtgatcaataaaaacatcgatgagtttttaggcgatgttttcatgaataaaaatgcgaatttatataaggaaattgcaagtattgcattggcttttatggaatttgaaagactttgctttgaagtggaaaaacctgcaaaaataaattctaaaaaagtgcaaaacgatctatcgcgttcagaatttttaagaagagaagcaaataaacaaaggaggactcgtgaaaaatcgcagggaatttcttaaaaaatccgcttttgccttaggggctgctggagtgcttggtagcacaactttagctctagctaaagatgaagaaagaaaagatttagttaaaggtaaaagtaagaaaaaagaagtgctttttcaaagaagtgctaattgggaaaattattatataaaggctgagtaatgtcaagtgtaggtgaaaatatcaagcttacgcgtcgttcttttcttaaaatggcagcactttcaagcctagcaacaccgttgcttgctagaagtgaaactttaagagaagcgagtgctgatgagcttaaagaagcgtacgaaggtagtaaaaaagtaaaaacagtttgtacagcctgttctgtaggctgtgggattattgcagaagtgcaaaatggtgtttgggtgcgtcaagaaatcgctcaagatcatcctgtgagttcaggtggacattgctgcaagggatctgatatgatcgatatggtgcgttcacatgtgcgtttaaaatatcctatgaaaaaagaaaatggagaatggaaacgcataagttatgagcaagctttaagtgagatcggagaaaaactagctgcttatcgtaaagaaaatcctgaaagtgttatgtttttaggttctgcaaaacttaataatgaacaagcttattatataagaaaatttgcagcattttttggaacgaacaatgtagatcatcaagctagaatttgacacagcgcaacagtcgccggtgtggcgaatacatttggttatggcgctatgacaaaccatcttggagacattcaaagaagtaaatgtatcattatcattggggcaaatccagcggtaaatcatcctgtgggttttagacatttcttaaaagcaaaagaaaaaggtgcaaagcttatcgttgtagatcctagatttacaaaaagtgcggcaaaagcggatatttatgcaagaattcgtccaggaactgacattgctttcatgtatggaatgttaaaaatcatctttgatgaaggcttagaagatacaaaatatcttgatgaaagagtttttggaatcgataaaattcgtgaagaagcagcaaaatggacagctgaagaggtggaaaatgttacagggatctctaaagaacttttggtgcaaatcactcacgaagtagctaaaaacaaaccaactacgcttatttgggctatgggtttaactcaacatactgtaggaacttcaaatacacgtttagcacctattgtacaaatggtacttggaaatataggtaaatttggcggcggagttaatatcttacgcggacacgataatgttcaaggtgcttcagatatggcttgtttaagcgaaaatttgccaggttattatcctttaaatgaagcgacttggagatactatgccaaaatttggggtgtggattatgagtggcttttaggaaattttgtaagtaaagattggatgcataaaactggactttcacttgctagatggtgggcagcggctttaaatggaaaagatggaaatgatgctatcgataatgcaggaacgcctttaaaagctttagtagttatgggaaatggtatcacttcaactgcacaacaagtaaaagttaaagaaggtttggaagctttagagcttttagttttagccgatccttttgtaaatgaagcagggattatcgcagaaagaaaagatggaatttatcttttacctgcagcaacacagtttgaaacaagtggaagtgtaacagctacaaatcgtagtgggcaatggagatttaaagttgtagatccactttatgaaagtatggaagatcaagaaattttatttgagcttgctaaaaaattaggcttttatgaagactttaccaagactttacgcgatgaaaaaggtgagatcgtttggcctgaaaatgcaacaagggaaattgcaaaagcagttagaagtataggacttaatggttggagtcctgaaaggcttaaaaagcatactttatactgggataaatttgatgaggtaactttagaaggaaaagacgaggttgctggtgagtattatgggcttccttggccttgttggagtgataagcatccaggttctcctgtgctttataataccgatattgaagttgcaaaaggtggtatgggctttagaaataattttggactcgagtatgaaggaga

SEQ ID NO: 3835 - DNA, 14208 bp, synthetic construct
  misc_feature 1..14208: note = Synthetic
  source 1..14208: mol_type = other DNA
tgataacaaccgataaatgatatgataaaaccaaaaaaaggtgcttttaaaatcccaacccaaaaatgtttgatattcaccatttctaagaatctttcgataaactgcccataatcgataccaagttgtaattggctaatcaatatggctcctaaaagcccaaatatatcagcgataaaaaccaccaaaggaagagctatgcaaagtgctagaatgcgaggtaaaaccaaaaaaaccataggattgaagcccatagttttcatcgcatcaatttcttgagtagcacgcatcataccaatttctgcgctaaaggcagaggcactgcgtccagcaatgataattgctgtaataataggcgccatttcgcgcaaagttagtatagaactcatctctacgattaaaatactagcaccaaattgttctaattggatagaaccttgataggctataacaatcccgattaaaaaacaagccaaacttacaatgccaatggctttgattaatgattcttgtatatggtataaagtcgcctttaatcggatgtttttaaagtttattaaacctaacgtataaagaatctctcccataaaccctaaaacaaagattagattaggcaatagatttggcacattcttcatcccatttattttaggaggatttttagataaagcattgttttggggttgattgtcttggaggattgtaaggatttttttgctttttggattctctaaaagttggttttgagtgattttttggtgtttttgtagccaaatattaagaatctctcctccgcaaaaatctaagttaaagtcttcttttaaaagaatgatgatgggtttatttgtagggattttatcaagtttagagaggatggatttggggattttataattccaatctccccctaatgttatggatatactctcttctatcaagacttctaaagaagttggaatatacattatctttcttcaaagataaaggggactccgcggattattccactatcaaagatttttttagtattggctgtaatttgtgaataatccgtttttaattgctggttgcttagttcaaaatcttgataatactttcttaggatgctgatttttgtttgggtgttggcattaggaagttttgcaatttcttgcaacgcaagttgggatttaataaaggcttttttgtcatgtacgggagcaaaaattagcttcagattagattcttctaagtctttttctatattttttaaatgttctctgcaataggggcaatcagggtctgttacgacaaactttgttggtaggttttcaccattccctgcaagatagacaaaatcctttaccttaaagtctttaaagagtttatttaaggctaaagtatcttgctcttctttgactaaggtcgctttgtcgatttcttctttaatcattatagaatctacttggtttaggtttaagacattgcttaaaccaatgaagtagtttccgtctttattgacaattacagggaaaatatccccccctttggttttgccaattacaaaaaacgatgaggggaagcttgttagctcttttttgaattgcacttgcacatcaatattggttaaatctttaatgcttttcttgaaattactttcaaaattagcatttgccagtgtaagaatgagggttaataggctaatggtctttttcaatttggatcctttttaaaatgagagattgtaatatgtttttcttcaaacattatttaaagacaagaggatttttagcattagaggggataaaatcttctaagaattcttcttggagatgtgattgtatttctagcgtaaaatttcctagaaaagcctcttgcaagacgataataggggaggtaaagaatccatagggatagagtctgtgtcgtaaatcgctttgtttgtaagtatctaatccttcttttagaagttggttaaaactttctttagtaagatagtcttttaaaggttcaaattctaaaaacaagattccttctttattggcatagccaatcccattattccaaaactctatttttgcttttgtctttttagggagtatggagtaattacaaataaaactaggaataactttagaatctctagttaataaaccttgaataagttggtaatgcaatacttttcttttaatgctttggtaggatttattggaattttctagctcctctcgagtttggaatatttttaaacgcaatgcagggaggttgcttgaaagctttggagtatttaggctagagagtagttctaggggaattttattcgcagattctctttgtttttggagggcaaagatacaaccacaataattttggcggtaaagattggcttctttggcgagttggttttgtatttgtgtgcctccattgcccctaacatcaattgggaggaaatctaagtgatatttttgtgctatggattgtccttgtgaaaatagttcattttgagatttcataggacttgcaagcaaggttgtagtaaattctgtgcaatgggtttgctgggcgatttttgcacttttttctaggcgataatcaaagcagtaactgcatcgctctcctttttctggctcatcttctaatcctttagcaccatttagccattcttgcaaatcatattctccttcaatgagtgggatttctagcatatcacagcttctttgcacatcttttagtcgcataaggtattcttcataggggtggatattgggattataaaaatatccacaaaatgctttttgggggtattttgctttgagttgggtaaggaagtgatggctatctacactacaacaaatatggaccaaagttgtattttgttggctaaaatcataaggaatttttgacatttatcaaccttttttgctgatattataaaccttaaactctaaaagggaactttttatcagctcaaagcttaagtgaaaaactttaataaaagagatttttagggaggcattagctttaaaatttctaattcattgaacttttgattatcaataagatttattaaagtagcaagagaggatgctccacaagattcttcataagtttgtcttactaccctttggtttttaatttcttgataagattgcacgataaattcagcatttgtaaaatttgcaaataagcaaactatgaggcaaattttattgaaagtttttattgtatgcctccttttatcagagctacagctcattaccttttgttatgcactatagcttgtttgatgcaagaaacttgttgttcttttgtgtaaatcttgagtatagttatgaatatcttgttggctaatagtccaattattatgcactgctttggtaaattgcatcgtaaaatcaatttgttgggtatgagaatctaagctagagcgataatgtctaagctgtgtaaaggcataaatatccatcgtaacacctccaaaatttgtagcaatctcattaggtgcaaaaatcttagattttcctaaaagttccatagaatcttgtaatttaaacttgatgagttcttttagcttctctgggctttgtaaggcttgttttcttaggttgatttcttctggggatatttttccattattttctctaatatattcaaccctttgctgttctctgtggttttttacattctccctaaattgtgttttccctccacctaaaaccctagcatcttgtgagtttaaaaagcttacaaacaaggattcttgagagaaatttgtatctttttgtggataaaagtttaaattttcatctcttttacagagaaattaagttcatatattcttagagtaagaccaatgctttgtaattgagagcttaaaactttagcttccttaaaagtttcttgattataaatattagtaactttaaagtcctctaaactttccataatgctgaatgctttcatcatttcagtatcttctaacatagattcatttgccatatatcttctatcactaaatcctctgggtagtttttcaatctcctctgcagaataagattctttgatttctggcataatttgtgtaaagacattatagtattggttaatggtgttggctatatctatgtgtttgaatacttcttcattagatatgggtgcttcattgaatatattatgccattccccataattttcttgcccgtttttaatgatttcctaaggtgcttttgtgtagcttaaatccgcttggaagtccagcagcaatgttaaaatcctctcccatataatctttttcatctatgttatagccataaaattgattttgtgtgagtttctcttgtttttgatttgtcttggcatttcttatgaataattcatcttttaatagctctgctacaagatctgtttttttattttctgtggtagttaaattattgggtgtatattggatgtcgaatatggaatgctttatagcaagattcttagtatctatggggtatgaagaatctaaaacttcttgggtattaatattttgtttgggagtcttagattctgtattaggaatcttatatatagcattagaattgaaattagaatttgaaactttcattttttcctcctttatccttaaatgattaatatagcctcattgtttgaaagtctttattgttgtttttttgttaaaaattaaatctaaagaaaggaattccacctagcccacctttaataaattatttaaaaaagtctgcattttttcttgtttagtcttagcctcatagggtttagaatctttggaatcttgtttgatttgtgtattttggtaaaaccctcctttgtttaactcttgaagtttttgtgcgttaagagaatgagaatctaaaatttcttgaaagacttttagaaatgcagataaatcattagaaaatttatctttgtcttcgctccagttaatcgttccattatgggtatagcctaaatctattaatttttgtaaatgggattgcacagaaattttaccatttaataaatcccaaaatctttggtctatatcataattaatcacataggtattaggaaactcctttgttttttgcatttgagcgtcaagaatcttttcgtatttttccgtttcatagaaaaattccgaacgttctccaacgatctcatccccaaataaagacattattaataacccactcattgagattttatctccctcaaagtaacgttcttctatgtagaatctaggatcttgtctctcttggagtatcttatcaatatctattaagctattatgaatagagaatggcacagaaacaccggtttttccaattttatcccacgattccatcaattttctgctttcttgtagatttaattgcataatgaggtttctattttctgcactagagtcccaagtatagatatgtctatgaggtaacgccctcacttcatcagggctaagcatcgcattgctttgacttaaatcaccaacgaaatcttgaaaaaatgcaaacgcattcttgactgtttttgccatatcgatttctttatagtaggaattccaatgactggttttatcataataaaattcgcctaaatctttataaacaatcttataatctagtggaagtccagcagcaatgttaaagtcctctcccataaagccattttcatctatgctgtatttcccaaaggctttaccttgcaataaatcaatctgcatactaagctgtgtaatctcaaaattctgtctaattccttcttttatgcttgtttcttctggaatttttcttcttctattttctctttttaacgcttctaattgctttttaagttcgtcgattttttctttatcaattgcgtcttcttgtgtctcatttatagtatcctcattgtttttaatcggattaaaaagggataaagtgggatttgaatctccttttaagtagagatttgagcttttctctagcatttttgcaaaggaatcattagaattgtcgctttggactgcattgtttgtcaaataatttaaatggtttgtcctattttctacacgcatagggtctctcctagtatcttttagaatctaaggcgtgcttagctctgaattatcaatgtttaactcatcacttgcgaagaagtgggtagatattgctaaaagcataagaaaatttctttattattactcctttgaaatgttacaaattataagcaaagaatattccatattagcactaaataagtcgagaatttctgttagaatataatacattggtgctacaagagagctttattgggattaaagaagttttaaattatattaattttggtataaaactatctcaagtcatctaaagatagattgaggttagcgatattctaatgagtggtgttaattgttttaaagaaaaagacttcaaggcgacaaaacttttacttaagctttaaagcatagattaaatgagagtaaaattaggattagactagagtaaagctagagttgagctaacaaaactagctaagatgtattatcagcttattatatggtgatttctttatagtcatagcaagttattttttataggcataatacaaaaatgcccccattcctatgataaagacaagagttagaaaaataattaaaataatatctaaactactcatatcctctccttctctctaagttgcccacaagcagcacttatatctaagcctttggattctctaatagtgcataaaagtcccttttggagaagatattccctaaaagcctccactttttctttgctgggtcttttataagggcttccttgatgaggattgaaataaataagattgactttggctttgattttattaagtaaggctacaagttttttagcactttttaaatcatcgttgagattgtcaatcattaggtattcaaacattattcgctttctgctatcaagagggaagtttgaaatttcttgaatgatagattggatattataggctttattaattggcataagttctgtccgcaaatcatcatcaacagcgtgtaaagagattgcgagttggattcctagattgagaactcctaattttttgatttttggtgcgattccactagtagagattgtttggcgacgaggagagatgtttaagccttcaaactcggataatatttggacgcattttgaaacattttccagattatctaaaggttctcccatacccatatagacgatgttaatagctttgtttggtggaatattttggtcttttttgatagcaaaaacctgataaaccatttctcctgattctaggttgcggacgaatcctcctttggctgtgagacaaaaactgcaacctactttgcaaccaatttgggaagaaaggcatagtgtgaatttatattctttcatctttagtagcaccgattcatagctatgattgtcataggttttaaagagatatttgatgctgccatctttactttcttcttttttgattaaggttgtgagagtgcttgtatatctttgcgctagaaactctcttaagtctttgggtagattaaccattttatcaaagcagttttcataatgcacataaagccaatgaaaaatctgtttagctctgaattttggaaaattcttttcaagggattgggcaaattcctctaaagtgtatccaaaaatataggatttatccattttgctttgctttgatataagattctatttttctcatcgctattttgtgattagctagaaattctttatgagcgtctttgtggatatgattagtggagcaaaatatcccaaatgcaggtaaattaaaatattttgccacctgtaagacgctaaaaaattccatattttcataagcaatcccaagttttaatagattttttgttaattgagtatctgtgctaatgtaattgctagagttaatgattttatgaggagttaattttgatagcgtttcatgtgaaacattttcttctagggtaatgaaattatccaaaggtgtataagattgttgctgtaaaaaggataattcgatattactagcacttctggattcaaaaatttctaaaatattttttgaatcatcatagcaaccacaagttccaataaaaataatctcattaggcttgtctctgtaaatagaataagttagctgaatgctgctttgtattaatcctacaccaataggctttgcaaacgtgaaagtttctatgtcccctgcacaataaaacacaattactccttaatttggtttttgaagttctttgtaataaagaggagattcttcttttttgatggttttttgggagggaatttgtaagacttcaaagagtcttgatttttccaaataagtaatttcaataacatctccgattttcacattgcgacttgctttaacagggactccagcgatttttataaccttattctctatcatatcttgagcaatggcgcgtcgttttgttatattgactgcattgagaaatttatcaatccgcatttgattccttgtttttgcgtaattgtagccaaaagaatattaatttatcgttcgtgatataattataaaaatttttaaggagtgaaaatgaagcaatcaattaaaaaagtagttttagcctatagcggaggacttgatacaagcgtaatactcaaatggctacaagatacttatcaatgcgaggttataacctttactgctgatattggtcaaggcgaagaagtagaacctgcaagagcaaaagcacaaaaattaggaatcaagaatgaaaatatttttattgaagatttaaaagaggagtttattagagattttgtttttccgatgtttagggcaaatactatttatgagggtgaatatcttttaggtacgagcattgctcgtcctttgatagcaaagaaattggtagaaattgcacaaaaagtgggtgcagatgctatctcacacggagcgacaggcaagggtaatgatcaagttcgctttgaaatcggcgcttatgccttgaatccggatattaagattatcgctccttggagggaatgggatttaaatagtcgtgagaaattactagattatgcgcaaaaagcaaacatacccattgaaaaaaagaaaaaccaatctccttattcgatggatgcaaatttattgcatattagttatgaagggcagattttagaagaccctaatgtagctcctaatgaggatatgtggcgttggagtgtttcgccaaaggatgctccagacaccccaactattattacgattagttttaaaaatggggatggggtggctattaatggagaaactttaagtccagcaaatttttgggctaaactcaatgagttgggtggaagtaatggcataggcaggttagatctagtagaaaatcgttatgtggggatgaaatctaggggttgttatgaaacaccgggtggaactatttatcttaaagcccatcgcgctatcgaatccctttgccttgatagagaagaggcgcatttaaaagatgaaataatgccaaagtatgcgagtttgatttataatggttattggtttagtccagagagagaagccttgcaggctttgattaataaaacacaagaaaaagtcgagggagaagtgcgattagagctttataagggaaatgttacgattcttgggagaaattctgaaaaatctctttttaacgcagcttatagcacttttgaagaggattctgtatataaccaaaaggatgcagcaggatttattaaactaaacgctttgagatttattatcgctgggaaagcaaagaaatagaatctagctttttagagttttatcgtggaattgggagtaaatatttagatttgaaataatctaggcaagattaaagaatggcataccaattttaagttgctctccataatgtttaatattatggatgagttttggcacaaggggaggtttataggtgaaaatttttgcttttgacatcggcattgcgagcattggttgggcgtatgtggaaaatgaggagcttaaaaattgtggggtacgtatttttacgaaggcagagaatccaaaaaaaggtaaatctcttgcattgccacgcagggaagcgcgcagcgcaaggcggaggctagcgcgtaggaaggcaaggctgggttcattaaagaggctcatttgcaaagagtttggtttgaatcttggtgattaccttgcacaagatggggttttacctaaggcttatgagacaaccaaagagactaaaagtccctatgagttacgtgctctggctcttgaaaaaaagctagattccaaagacttagcgcgtgtgattttgcatatcgccaaacatcgggggtatgggaacaaacacgcaaaaacaggaagcgataaagattctggtaaggtgctaagtgcgattaaaacaaatataaaagctatggaagataaatcttatcgtagtgttggggagtatttgtatcaagaatttttccaaaaagaaagaacgcaaagtgagaaaaaaggtagcattcatacaaaagaatttaaaaatgtgcggaataaaggcgagaattatgagcattgcgtctcacaagagcaagtaaagcaagagttggagcttatttttgaaaagcaaaaaggctttggtgcgaagtttagcgaagagtttgaaaagaaaattatcgaaatcgccttttttcaaagagatttgaaaagctttgaggataaagttggcgaatgtatctttttaaaaggagagaaacgtgctgccaaagattcgctaagtgctatggaatttgttgcgcttacgagcattatcaatttacttttgaatcttgcaaaacgcattaatccaaattacaaagacgatgatttgaaaaacaataatttgatagacaaaatctttggcaaagataaaattcaagagattctaaatcttgtgctggataaaggcgagatgagctataagaaactgcgagagattctaaatcttgatgaacgcatttggtttgcagattctaagctggattatgcaaaaggggtgcaaaaggctgaaggggctaaaggggtaaagtttattaagtttgaaaatcttaaagcttttaaaaaggcaatgggaggaagttttgaatcttttaatagaaaagagctagatttgatagccacagatattgccctcattaaaagcaaagaaaacttagcaaaaaaactaaaagactatccctctcttagcgatgagcaaaaagaagctctaagtgagcttaattttgcaaagcatattgatttaagctttaaagctttggagaagattttgccttttatgaataagggattgcgctatgatgaagcggtgcaaaaggcgggattgcaagagcatagaaaacatacaaaaaaagaggattttttaatgccattgaaagactatgagccttatcttgcaaaccctgttgtcgcaagggctttaagtgaataccgcaaggtattaaatgcgttgcttaaaaaatatggtaaagtgcataagattcatttagaatttacgcgtgaggcgaaattgagctcaaaagaaagaaaggactatgaaggagagcaaagaaagcgttttgaggcaaatcaaaatgctcaaaaacaatgtgagattctaggattacaccttaatggtgcaaatattcttaaaataaagctttggatagagcagggcgagctctgtgcttatagtgggaaaaaaattacatcggaacatttaaaagattctacaatgctacaaattgatcatatctatccttactctcgcagttttgatgatagccaaaataataaagtacttgtttttacgaaagaaaatcaaaataagttaaataaaacaccttttgaggcttttggtgaggataaggagaaatgggaaaaaatcttaagttggcgtaacaagcttcctaaatcgaaatatcgcagaatctccaacacaaattttaaagataaagaggcgggatttcttgcaagaaatattgttgatacaggctatatcgctagacttgccagtcaatggacaaaggattgtttggagtttttacccttaagtgaagatgaagtaacgattgaaggaaaaaaggatagcaagaagcatgtggaggtagtgaatgggggcttaaccgcaatgcttagacattattggggacttggaagcaaaaatcgagataatcacctgcatcacgcagttgatgcggtgaatattggttttacaaacgcaagcattatcaaagcattttcagattttagaaagcttcaagaacagaataaggcgaaattctatgccaaagagattgcagaatcggattataaaaccaaaagagcattttttgagccttgcaaaaactttaggcaaatggtgctagacaaagtggattctatctttgtctccaaacctccgcgcaaaagagcaaggggagcgttgcacgaggagacattttatgcttttgatgataagaatcttttaaaaagttatggtggtgaaaaggggatacaaaaggcgatagagcttggtaaaatccgacagattggcacaaagattgtaagcaatggcgcaatggttcgggtggatatttttaaagataaaaaaggcaaattctatggcgtacctatttacacaatggactttgcgcttggaatcttgcctaacaaagcagttgttactggaaaagacaaagaggttatcaaggattggctagagatggatgtaaattatgaattttgctttagcctctttaaagatgatttgattttggtgcagaaaaaggaaatggaaaaagctgagctatgttactacacagaatttaaatctagcacagcaggaataaattttgaaaaacacaataatctatatgtaaatttaagcgaaaatgaatgcaagttatttaccagcaaagaacctgttaaggggggaaagaaaaatgcatggaaagataaaacacctgaagaaatagaacagctagaaaaaaatagaaaaattataggtggatttgtaactatagaagaattggtagtttttgaaaaataccaagtctcgccacttggcgaggtgcaaaaggcagaatttacaccacgtcaacccatttctttgaaatctagccctaaaaataagaagaaatagtgtttgattctgcctttagaacgctattcttgagcacacccgcgaaactcaagcttgcagataagcatctttgcattcttcaagaagacaaagaagcagtaaagattccgctctctgatattttatgtgtgattgcggaatctcatcaaatcacattcacaaatgcgctgcttgatgcctttgcttcgagcaagattgtcctttatacatgcgatagttcccatttacctagcggtgtgtttatgccatttttgggacactttaagagtttaagtattttgcaaaatcaaatcaaactcaaaaaacaaaccaaatccattctttggcaacaaatcataaaagcaaaaattagcaatcaagcctcaatgctaaaaatgcttggtaaagaggagttttgccatttacaatctctagcaaagtctgtcaatctagcagatagcacaaacaatgaagcaaaagcagcctctatctattttaaggctctttttgggagtggttttagtcgcaagattgattgcttgagggatgagagaattggaacgataaatgctgcacttaattatggttatgcgattgtgcgaggaattattacaagaagtctttgtgcaagtgggcttaatccgacacttggaatcaatcataaaaatcaatttaatgcgtttaatctcgctgatgatatgatagagccttatcggatttttgtcgattctcttgtaatgcgaatgtatgaaaatggagaattgcaagaatttctaagcctagaaaatcgtgtccagttggtagaaatcttaaatgtgtcagtgatgatagaaaataaactttatccgctaagtcgtgcggttatagtgagtgtgcaaagtttggtgcgttgctttgaaatagagaatctcaagcttaaaacacctctcttttgcgaggagaaatccaatggaagagaaatttatgagggtgctagtgatgtttgatatgccaacttttagtaaggaagataggaagaattgcacgaaattccgtaaatctcttattaaaaatggttttatgatgttgcaatatagtgtttttatatttatattttttca

SEQ ID NO: 3836 - DNA, 14159 bp, synthetic construct
  source 1..14159: mol_type = other DNA
  misc_feature 1..14159: note = Synthetic
gggttggattacaggacatacttatgtagtttatgggcctttagcatgtggggcaacgactataatgcatgaaggaactcctacttatccaaattctgggcgttggtggagaatgatagaagagtatcaaataagcaaattctacacttcgccaactgccataagaatgcttcatgctgatgcacctaatgagccaagaaaatatgatttaagtacgcttgaagtgcttggaacggttggagagcctatcaatcctagtgcttggaagtggttttatgatgaaatagggggaactaaaagtcctatagtcgatacttggtggcaaacagaaacaggtgggcatatgatcacgcctttaccaggcgccactcctttaaaaccaggttgtgccaccttgcctttgccagggatttttgcggaagttattgatgaagaaggcaataaaaaagatgaaggtgaagatgggttgctttgtataactaaccttggccttcgatgattcgtggaatttggggcaatgatgaacgctatatagaaagttatttttctcaagctaaaaaagatggaaaagctgtatattttagtggcgatggtgctttttatgataaaaatggttatattaccatcacaggaagaacagatgatgtggttaatgttgcaggacatcgtataggaacggctgaaattgaaagcgctattgctaaacatccaagtgtagcagaatcagctgtagtgagtattttggatacgattaagggcgagtcattgtttgcttttgtggttttaagtcctgcatccagttgtgatcttggcggagctatagaaactttaaaagaacttaatgacattttaagagtagaaataggacctatagctaaaatagaaaaaattctttatactccaggtttgccaaaaactagaagtggtaaaataatgagaagaattttaagaactatagcaagaggcgaagaaatcaaacaggatatttcaacacttgaagattctaaagtagtagaaaccattgttaaattagctaaggcagagtttgaataacaaggcaaaaagaactttgccttgttgcatgaaaattcataaaaataagctataatgataaaaaaataaaaggaaatttttatgcttcaaacttgtattttccctgcggcaggttatgggacgagatttttacctgcaacaaaaactttacctaaagagatgttacctatcttaaccaagcctttgatccattatggagttgatgaagctttagaagcaggaatggaaaatatgggatttgtcacagggcgtggaaaaagagctttggaggattattttgatatttcttatgaacttgaacatcaaatttcaggtacaaaaaaagaatacttacttgatgaaattcgctctttgatcaatcgttgtacctttacttttacaagacaaaatcaaatgaaaggcttaggtgatgcggttttaaaaggtagacctttggttggcgatgaagcttttggcgtaattttggctgatgatttgtgtgttaatgaagaaggcttaaatgttatggctcaaatggtaaaaatttatgaaaaatatcgctgcaccatcatagctgtgatggaagtaccaaaagagcaagtttcaaactatggagtaatttctggaaattttgtagaagaaaatcttatcatggttaattctatgatagaaaaaccaagtcctgatgaagctccaagtaatcttgctatcataggaagatatattttaactcctgatatttttggaattttagaaaatactaaagcaggaaaaaatggtgaaattcaacttaccgacgcgcttttaactcaagcaaccaatggtatggttttagcttataaatttcaagggaaacgctttgattgtggaagtgtagaaggctttgtagaggcgacaaattatttttacgagaaaagtaaatgttaaacaatacgcttttttttaaacaaagtgaaattcacactataagttcttatgcaaatcgtattaatgatgaggtaaaaagtggagatatagggtattatcatcttattgacacaagtttgaatttaatcgatgagagcttgcaatttattcaagataaagagtatgtaaaaaatatcgttttagtgggaatgggaggttcaagttgtggtgtaaaagccttgcgtgatatgctttttaatgaaaaaagcaaccaaagagagctttttatactcgataacacaagctcgcattcttttaataagactttagaaaaaatcaagcttgaagaaagtttgtttttaatcatcagcaaaacaggtagtactatagaagttgtatcgctttttaaacttcttattgaacattttaaacttgatatgcaagaattaaaaaaatactttgtttttattaccgataaggattcaaaacttcatcaagaaggtgaaaatttaggtattaaatgcttttttatccctgcaaatgtaggaggtcgttttagcatactttcagccgtaggtatagttccactttgtttttgtggctataatgccaaagctcttttagaaggagctaaagcttgttttgaagatttttttactcacaaaaaagatgaaattttacaaaaagcctatcattattgtacacacaaaaatgccaatatcaatgtacttttttcatatagcgatgcttttaaaggctttaatgaatggtatatccagcttattgctgaaagtttaggtaaaaagcaaggctataaacgcataggtttaactcctattgcactcattggcgcaagagatcaacatagttttttacaactcatcatggatggacctaaaaataaaactgtaacttttttaaaaatcaaagacgctcaaaaagcacctattatccctgatattcattttaaatttttagattctttaagtaataaagtcaatcttcacgaacttttaaacgctcaatgtgatgcaactatgcacgctttaatcgctgaaaatttgagtgttgatgtgatagaacttgaaaaacttgacgcttggcatgcgggatatttgatgtattattatgaactttttacttcaacttgcggtgttatgctagggattaacacttatgatcaacctggtgtggaagttggaaagttgatcttaaaaaatatattaaattcttaatcaaaattcattaaaaaagagtataatgattttaagttaaaattataataaaaatttttaattaataataataattattatttaagaattttatgttataattttaaaaattaaaaaaaggagtcaatcatgtcagttacaaaacaattattacaaatgcaagcagatgctcatcatttatgggttaaatttcataattatcactggaatgtaaaaggtttgcaatttttttctatacacgagtacacagaaaaagcttatgaagaaatggcagaactttttgatagttgtgctgaaagagttttacaacttggcgaaaaagctatcacttgccaaaaagttttaatggaaaatgcaaaaagtccaaaagttgcaaaagattgctttactccgcttgaagtcatagaactgatcaaacaagattatgaatatcttttagcagaatttaaaaaactcaatgaagcagcagaaaaagaaagtgatactacaacagctgcttttgcacaagaaaatatcgcaaaatatgaaaaaagtctttggatgataggcgctactttacaaggtgcttgcaaaatgtaatttaaggggctttatgccccaattatacaaactaggttataatatccttttttaaaggataaaattgaaagtacttaattttttttatgaaaaccaccctaaatttgaagtaagttatgaaagaaaaaatcaaatttcaaaaccaaatattatcataaaaggcccacgattttgtggtaaaaaaacacttatttttaattttttatctcaatttaaagcaagtgaaattttgtttttagatttatatgatacacgctttgaaaaacaaagtttagaaagacttgctgattttctgaatgaaaatttacaaattaaaattctttgcctttataatttggattttatccctaatttagaaaaaattaacattcccatcatcttaagtacaaatataaaagatttaaatgtaaatgggtttgaagagcttgaacttgattattttgattttgaagaatttattagtgtaagtaagaaaaatttacctataaataatttagtaggtctttttttgcaaagtggacgcagtaaatttggagaaaaaaacatacttctaagacaaagcttcactcttttagaattagaaattttaaagtatttagctttaaatttgggtcagcaaatcagtatttctaagatatttatagaactcaaaaaaagattaaaaacttcaaaagatagtgtttatcaagctataaaaaaattagaaaatacttatgtgatttataccttaaaacatgatgaaaaaaaacttcaaaagatttattttaaagattttggcctaagaaataatctttgtatttcaaaggatttttcacatttatttgaaaatttagttttaagcgagttgtttaaatttaaagaagaatttttttataacaaatactttaacttttatagccaaatatctaaaattgcttatatttcaagtccaactttagatattgatttgatcaagctacgtgctaagaaaattttaccaaaggctttagaacttggaatttttcatgtgatttttatcactctttcaagcgaggataatttttttgaacaaggggttaaatttgaagtcatatcttttgataaattttcacttggattttaggtgttgtttgagtttgtatcgtatttttcaaggttgtatcgtttgatgatttttgtaataagattgatataatatcccttgcgttcagaataagaatctaaagttttaatagcctctagccctgttatctctttgccttcgctttcaaatttagctcttgcatcgcgaaacttttcataagcaaaatgacgatttaaatttaaaacataagagtcaacactatcttgcagactatcaaaaattttaattttgtgttttttatctggatgtcttaaatcaggaattaaacctttctcaccccaagtccattctccaaaaagattgtttgcttctcttgcgaagcgactggtacctgtagcactttcaactaaagcttgggctatacccatggattttggaattttttgaatacgttttttatattctgcaaaatcataaagattttcaatgcgatatttgttttttatcgtgataagtttttcaagatttatttggtttgaagtcctaaagcctgttttgtaagcatctttaaaaaaggcttcgataaaagcttctttcttgttcaatttttttaaagctttgatcaaacatttcattcatttttataaaaaaaatttgtcttttttgatctatatcaagtttgtaatattcttctccaaatccactctttagatcatcagcaaaaagtgggattagaaaaagactaaaaaaaattataattggcttcaaaacaatactttacctttccttcaaaaaacaattcttcatttttatatgcaaaccctacctcttcaccacttttaggagttattttaactttattttgtacttttttatttaaaaatgccagataaaaacaagcccccattcctgtgccacaagctaaggtttcatcttcaactccgcgttcataggtgcgaacttttaaatgattttcatctaaaatttttacaaaattaacattggcattatatttttgtctcattttttgacaaagcattgtatcaaattcatctaaattttgacaaaaatgtactagatgtggaactccagtgttgcaaagttgccaagtttttcctaattcttcaaaagtattttgcacgctttttattttgcctaaagatacttcaactttatcttgatttacctttgcttttattactcctgcaccggttaaaaaactcatgttaggatttattttgttaatatgatgtgcaaaatgtgccgcagcccttgagccattgccacacatagcagcccttgagccatcgttattataaaattcccattcaaagtcgtatttttcatgaggcaatatcacgataaagccatccgcacctataccctcataacgattacaaagttctttagctaaagcacttctatcttcttttctatcagcatttgttatgacaaaatcattcccacttgcacaatatttataaaatttcacatttttcctttagaaatttcttgtattactttaacacattcttgcctaaaatcggcataagaattagtatttttaatgataaaatctgcttttttaagtttttcttcaatatctatttgagaatcaagtcttgcttttgcagcttctaagctgagcttatctctttgcatgattcttttaaggcttaattctttaggtgtgtaaattacaatgactttgcctaaattttcataagcaccgctttcaaaaaaaagaggaatttctacaaaaaaagctttattttctttatctagaatttgtatttgttctaaaattttagctcgaattttaggatgagtgaaattttctaagatttttttagcttctttattgttaaaaacaatttttccaaggatttttctatcgattttcttttcttttgtgagtaaattttttaaactaaagggagaaaaaatcttttcaagttctaaagcattttcatctaaaattttatgagcgattttgtctgcgctaatgcttttaaagtctaaagaattcgctatttctataaaagtgcttttaccacaagcaattgaagcggttacaaaaaaagcatttttcatcttatgccttattaaaacttttttcgttaaaatacctttttagttcttaaaggaaaataaatgaaaatttcatatgaagatgcaggcgtaagtatagataatggaaatacctttgtagaggctataaaacctttggttaaagaaacttttaatgataatgttgtaggtggaattggttcttttgctggtgcttttagaatgccaagtggttttaaaaagcctgtgattttaggtgcaacagatggggttggtaccaagcttcgcttggcaattgatgctaaaaaatatgatactatagggcaagatttagtagcaatgtgcgtgaatgatttgatttgtaattttgctacgcctttgtttttcctagattattatgctacagccaagctcgaagtagaagtagcaaaggctgttgtatcaggcattgccaagggatgtaagatggcaaattgtgcattaattggcggagaaactgctgaaatgcctggaatgtatgcaaaagatgattttgatcttgcgggttttgcagtgggtatggctgaagaagatgagattgatagaagtaaatttgttaaaaatggtgatattttattggcactttctagttcaggacttcattcaaatggttattctttagctagaaaagtactttttgaaagtttaaaattaaaatttgatgacaagatagagggtaaaaatttaattgatattttgttagaacctacaaggatttatgtgcgtgattttcttacactaaagccttatatcagtgctctagctcatattacagggggtggtttagtagaaaatttaccacgcgttttacctcgtggtatgggtgcaactatacgcaaacatcatcttaaaactcctgaaattttttatactataggacaggctgtagaagaaagcgaaatgtatagaagctttaacatgggagtgggtttagtaatggttgtagatccttctaatgtaagtaaggttttagaaaattcagatgcctttattatcggcgaaatttgcattaatgaaggtattgttttagaatgaaaataaagcgttaatacgctttatttttgtattttaagttctatttttgtagtgttttgttcttttggcaaaggattggtttgtgctagataaaaggctacaagcacatttacaagcatagcgataagtaaaagaggagtggttcgttttataatatccattggagctacttttgcaaatccagctaaagctatgatttcgcctgctattggtgaagctgcacgacctaaacaagatgcaatttctataggtaaaactagagtaataggtgcaacgcctaattttgtagctatatcaggagctagttttccaaaagtattaaaagcggcaattccacttcccataatcactgtggcaaaataaactaaaaagcttaaaatagctatactcaaaagaattccaaaccatgcaaaatttcctgttccaagatttgaaaccgcgttagcaaggatattaactccaccaagtgctttaatgccttcagcaaatactccagcggcgatgattatgcttacgactgagataaaaatttcagccatagccttttaaaatcaccatcatatcttcgcctaattttctagcatttctgtgtcttgcaaattcaacaagaaaaactaaagaaattcttacaaaatttgctatcacaacatcgagcttgatagtaaaaaaatacgctataaataaaaatacaacaggtaaccaaggaaagagtatgtaaaaagtagggcatttaggatcaatgatttgcggaatttcaacttcatcatttaaaacacctttttctttatctcttttatcaatccaagcaaaataaaaaggaatcaagatggcaataattacaacataggtaatcacactataaatttggtaatttaaaaaaagccttacgacattatcactttgtcctaccatatctgccatattgattgaatttccatcttttggatcataatcaagtgcaattaaagaaagcgcacatacagttgtaataggacggattttaagtgagattaaaacaggataaatatatgctaacaaaagcaaaagcaattcagcatagctagaaatgacgatttttaaagccattccaacaacaaaagttccacttaaaattaagtatttattttttgatttttcctgagggtttatttgctaaaaaagcaagttttgccgaagcattgatatgtttcatgtaagcagtaaagcctgccacactcatgataataagccctgctccagaaagctgacttttaaaagtcgctgtgataaaagataactatcaggtaaaacatttaaaagcttgtatactctctgcttggagtttttggtataggtgttcctgtgatataaaaagcaaaaataagcaagataatacctgaaagaaaaaatacaaaaataggattgtattttttaagtatataataagcaacaacaattaccgctaaaagtgtagaacatatcataaaaattggcatgatttctcctaaagttattattagcttttattttattttagctaaaatttaactaataaatatttttcatttaaaattttacttattttttgcattataaaattaataatatgtatagtttggttactgaaaagtttatgtttgtttaaaaaaatgatttttgtattataattatacacaaatcataaatattaaaaaggatctagtgtggcaagaattttggcatttgatataggaataagctctattggctgggcatttagtgaaaatgatgagttaaaagattgtggagttaggatttttacaaaggctgaaaatcccaaaacaggagaatccttagccttgccaagacgccttgcaagaagtgccagaaaacgccttgctagacgcaaagcaaggctaaatcacttaaaacatttaatcgcaaatgaatttaagttaaattatgaagattatcaaagctttgatgaaagtttagctaaggcttataaaggctctttaattagccttatgagttaagatttagagctttaaacgagcttttaagtaagcaagattttgcaagagtgattttacatattgcaaaaaggcgtggctatgatgatattaaaaataatggtgatgaagaaaagagcgagattttaaaagctatcaagcaaaatgaagaaaaactagtaaattatcaaagtgtgggagagtatctttataaagagtattttcaaaaattcaaagaaaattccaaagaatttataaatgttagaaataaaaaagaaagttatgaacgctgcatagcgcaaagttttttaaaagatgaattaaagcttatttttcaaaaacaaagagaatttggcttttctttttcaaagaaatttgaagaagaagtgcttagtgtagcattttataaaagggctttaaaagatttttctcatttagtgggaaattgtagtttttttactgatgaaaaaagagcgccaaaaaattcgcctttagcttttatgtttgtagcacttacaagaattatcaatcttttaaacaatcttaaaaatactgaaggaattttatatacaaaagatgatttaaacacccttttaaatgaagttttaaaaaacggcactctaacttataaacaaacaaaaaagcttttgggcttaagcgatgattatgaatttaaaggagaaaaaggaacttattttattgagtttaaaaaatacaaagaatttataaaagccctaggtgagcataatttaagccaagataatttaaatgaaatagcaaaagatattactcttataaaagatgagattaaacttaaaaaggctttagcaaaatatgatttaaatcaaaatcaaattgatagtttaagcaaattggaatttaaagaccatttaaatataagttttaaagccttaaaacttatcactcctttaatgcttgaaggtaaaaaatacgatgaagcttacaatgagcttaatttaaaagtagcaatcaatgaagataaaaaagactttttacccgcatttaatgaaacttattacaaagatgaagtaactaatcctgtggttttaagggcgattaaagaatatagaaaggtcttaaatgccttacttaaaaaatacggtaaagtgcataaaataaacattgaattagcaagagaagtaggtaaaaatcacagccaaagagctaaaatagaaaaagagcaaaacgaaaactacaaggccaaaaaagacgccgaacttgaatgtgaaaaactaggcttaaaaataaatagcaaaaatattttaaaattaagattatttaaagaacaaaaagaattttgtgcttatagtggagaaaagattaaaattagtgatttgcaagatgaaaaaatgcttgaaattgatcacatttacccttattctagaagttttgatgattcttatatgaataaagttttagtttttaccaagcaaaatcaagaaaaacttaatcaaaccccctttgaagcctttggcaatgatagtgcaaaatggcagaaaattgaagttttagcaaaaaatttacctactaaaaagcaaaaaagaattttagataaaaattacaaagacaaagagcaaaaagactttaaagatagaaatctaaacgatactcgctacatcgcaaggcttgttttaaactacactaaagattatttagattttttacctttaagcgatgatgaaaatacaaagttaaacgacacacaaaaaggctcaaaagtgcatgtagaagcaaaaagcggtatgcttacatcggctttaagacacacttggggctttagcgctaaggatagaaataaccatcttcatcacgccatcgatgcagtaattattgcttatgcaaacaactctatcgtaaaggctttttcagattttaaaaaagagcaagaaagcaacagtgcagaactttatgcaaaaaaaattagtgaattagattataaaaacaaaaggaagttttttgagccttttagtggttttaggcaaaaggttttagataaaattgatgaaatttttgtctcaaaacctgagagaaaaaagccaagtggagctttacatgaagaaacatttagaaaagaagaagaattctatcaatcatacggcggaaaagaaggagttttaaaagcctagagcttggtaaaatccgcaaagtaaatggtaaaatagttaaaaatggcgatatgtttagagtggatatttttaaacacaaaaagacaaataaattttatgccgtgccaatttatactatggattttgctttaaaagtattaccaaataaagccgtggtgcaaggtaaagataaaaagtcaggtcttataaaagattggattttaatggatgaaaattatgagttttgcttttctttatacaaagatagtttgattttaattcaaactaaagatatgcaagagccagaacttgtttattttaatgcttttacaagctctactgttagtttgattgtttcaaaacacgataataaatttgaaacgctaagcaaaaatcaaaaaatattgtttaaaaatgcaaatgaaaaagaagtaatcgcaaaaagcataggaattcaaaatctaaaagtatttgaaaaatacatagtttcagcacttggagaagtgacaaaggctgagtttagacaaagagaagattttaaaaaatgagttacgatgaagcttttaaaacactgcttattagctctaatgccaagctaaatttagagttaaatcatcttgtgattaagcaagatgaaaatatagccaaattgtttttaaaagatataaatatcatcgttttagaaagcttacaagtaagcctgagttccgcactttttaacgcttttgcaaggcataaaatcatcttactaacctgcgatgaaactcatagtataaatggtgtttttactccttttttagggcattttcaaagtgcaaaaatcgcaaaagagcaaatgaatgtaagtgctcaaaaaaaggctattttatggcaaaaaatcattaaaaataaaatcctaaatcaagcctttgttttgaaaaaacacaataaaatagagcaaagcaatgagcttataaatttggctaaaaaagtaagcttaaatgatagtaaaaatatcgaagctgttgcggcggcgctttattttaaaactttgtttggcgtttctttttcaagagatgagctttgctttgaaaattctgctttaaattatggctatgcaatcattagagcttgtattattagagcagtttgtataagtgggcttttgccttggcttggcataaagcacgataatatttataattcttttgcgctttgcgatgatttgatagaagtgtttagggctagtgttgatgattgtgttttaaagcttaagggtgaaagtgagtttttaagcaaagatgataaaagagcgttgattggcaatttacaaagcaaaatcaattttgatgggcaaaattatcctttaaacagagcgataaatcattatgtggcaaattttaaaaatgctttattgtatgaagatgagctaaagatagtaaaatttgatgattgaagataaatttatgcgtgtgcttttgatgtttgatgtgccaactaaaagtaaaaaagaacaaaaactagcaagtaaatttagaaacaatcttataaaattgggttattttatgctacaatttagcgtttatatgcgtatttgcaagggtttaagttctgcaaaaagttctattgaaaatgtaaaaaagattttgccaccttatggaaatgtaagggctttaatcatcactgaaaagcagtttgataaaatggagcttttgcttggtggcatagtttttaacgaaaaagttaataacgaaaccaatgtaacgctttttgatatagatagtcatggagaatttaaatacaaaaattcaaataatgaagaaattcaaataaacaaaaaacaaagaaaaatatcatcagcaaaatttatttgaattttaaaagcggttttaggggattgtaaccccgcagagtcccgcaaactctttattttagtccctttttaaatttcttatgagattatagcatgatttttgctatttttatcaaaaaaccccgaaattttcattatctggtaaatatctattttaccataaagaaatttaaaaagggactaaaacttcactccacccctgcttaagcattccaacattttaccataaagaaatttaaaaagggactaaaa

SEQ ID NO: 3837 - DNA, 13460 bp, synthetic construct
  source 1..13460: mol_type = other DNA
  misc_feature 1..13460: note = Synthetic
aaagatactgctatttttgtagtgttttgttcttttggcaaaggattggtttgtgctagataaaaggctacaagcacatttacaagcatagcgataagtaaaagaggagtggttcgttttataatatccattggagctacttttgcaaatccagctaaagctatgattccgcctgctattggtgaagctgcacgacctaaacaagatgcaatttctataggtaaaacaaaagtgataggggcaacgcctaattttgtagctatatcaggagctaatttcccaaaagcattaaaagcagcaatcccacttcccataatcactgtagcaaaataaactaaaaagcttaaaatagctatactcaaaagaattccaaaccatgcaaaatttcctgttccaagatttgaaaccgcgttagtaaggatattaactccaccaagtgctttaatgcctttagcgcatactccagtggcgatgattatgcttacgactgagaaaaaatttcagccatagcttttaaaatcaccatcatatcttcgcctaattttctagcatttctgtgtcttgcaaattcaacaagaaaaactaaagaaatgcttacaaaatttgctgttacaacatcgagcttgatagtaaaaaaatacgctataaataaaaatacaacaggtaaccaaggaaagagtatgtaaaaagtaggacatttagaatcaatgatttgcggaatttcaacttcatcatttaaaacacctttttctttatctcttttatcaatccaagcaaaataaaaaggaatcaagatggcaataactacaacataggcaatcacactataaatttggtaatttaaaaaaagccctacgacattatcactttgtcctaccatatctgccatattgattgaatttccatcttttggaccataatcaagtgcaattaaagaaagcgcacatacggctgtaataggacggattttaagtgagattaaaacaggataaatacatgctaacaaaagcaaaagcaatccagcatagctagaaatgacgatttttaaagccattccaacaacaaaagttccacttaaaatcaagtatttatttttgatttttcctaagggtttatttgctaaaaaagcaagttttgctgaagcattaatatgtttcatataagcagcaaaacctgccacactcatgataataagtcctactccagaaagctgacttttaaaagtcgctgtgataaaagcataactatcaagtaaaacatttaaaagcttgtatactctctgcttggagcttttggtataggtgttcctgtgatataaaaagcaaaaataagcaagataatatttgaaagaaaaatacaaaaatgggatcgtatttttttgagtgtatcataaaaattagcatagggtctattgaatttacaataaattggattttatctaaatttttaaataaaaaatattttttatttaaaaattacttgttttttgtattataaaattaacatatatagtttggttactgaaaagtttatgtttgtttaaaaaatgatttttgtattataattatacacaaatcataaatattaaaaaggatctagtgtggcaagaattttggcatttgatataggaataagctctattggctgggcatttagtgaaaatgatgagttaaaagattgtggagttaggatttttacaaaggctgaaaatcccaaaacaggagaatccttagccttgccaagacgccttgcaagaagtgctagaaaacgccttgctagacgcaaagcaaggctaaatcacttaaaacatttaatcgcaaatgaatttaagttaaattacgaagattatcaaagctttgatgaaagtttagccaaggcttataaaggatctttaattagcccttatgagttaagatttagagctttaaacgagcttttaagtaagcaagattttgcaagagtgattttacatattgcaaaaaggcgtggctatgatgatattaaaaatagcgataatgaagaaaaaggtgcgattttaaaggctatcaagcaaaatgaagaaaaactagcaaattatcaaagtgtgggcgagtatctttataaagagtattttcaaaaattcaaagaaaattccaaagaatttacaaatgttagaaataaaaaagaaagttatgaacgctgcatagcgcaaagttttttaaaagatgaattaaagcttatttttaaaaaacaaagagaatttggcttttctttttcaaaaaaatttgaagaagaggtgcttagtgtagcattttataaaagggctttaaaagatttttctcatttggtgggaaattgtagtttttttaccgatgaaaaaagagcgccaaaaaattcgcccttagcctttatgtttgtagcacttacaagaattatcaatcttttaaacaatcttaaaaatactgaaggaattttatatacaaaagatgatttaaacacgcttttgaatgaagttttaaaaaacggcactctaacttataaacaaacaaaaaagcttttgggtttaagtgatgattatgaatttaaaggagaaaaaggaacttattttattgagtttaaaaaatacaaagaatttataaaagccctaggtgagcataatttaagccaagatgatttaaatgaaatagcaaaagatatcactcttataaaagatgagattaaacttaaaaaggctttagcaaaatacgatttaaatcaaaatcaaattgatagcttaagcaaattggaatttaaagaccatttaaatataagttttaaagccttaaaacttatcactcctttaatgcttgaaggtaaaaaatacgatgaagcttgcaatgagcttaatttaaaagtagcaatcaatgaagataaaaaagactttttacccgcatttaatgaaacttattacaaagatgaagtaactaatcctgtggttttaagggcgattaaagaatatagaaaaatcttaaatgccttacttaaaaaatacggtaaagtgcataaaataaacattgaattagcaagagaagtaggtaaaaatcacagccaaagagctaaaatagaaaaagagcaaaacgaaaactacaaggccaaaaaagacgccgaaattgaatgtgaaaaactaggcttaaaaataaatagcaaaaatattttaaaattaagattatttaaagaacaaaaagaattttgtgcttatagtggagaaaagattaaacttagtgatttgcaagatgaaaaaatgcttgaaattgaccatatttacccttattctagaagttttgatgattcttatatgaataaagttttagtttttaccaagcaaaatcaagaaaagcttaataaaaccccctttgaagcctttggcaatgatagtacaaaatggcagaaaattgaagttttggcaaaaaatttacctgaaaaaagcaaaaaagaattttagataaaaattacaaagacaaagagcaaaaagactttaaagatagaaatctaaacgatactcgctacatcgcaaggcttgttttaaactacactaaagattatttagattttttacctttaagcgatgatgaaaatacaaaattaaacgatacgcaaaaaggctcaaaagtgcatgtagaagcaaaaagcggtatgctaacatcggctttaaggcacacttggggctttagcgctaaggatagaaacaaccatcttcatcacgccatcgatgcagcaattattgcttatgcaaacaattctatcgtaaaggctttttcagattttaaaaaagagcaagaaagcaacagtgtagaactttatgcaaaaaaaattagtgaattagattataaaaacaaaaggaagttttttgagccttttagtggttttaggcaaaaggttttagataaaattgatgaaatttttgtctcaaaacctgagagaaaaaagccaagtggagctttacatgaagaaacatttagaaaagaagaagaattctatcaatcatacggcggaaaagaaggagttttaaaagccctagagcttggtaaaatccgcaaagtaaatggtaaaattgttaaaaatggcgatatgtttagagtggatatttttaaacacaaaaagacaaataaattttatgctgtgccaatttatactatggattttgctttaaaagtattaccaaataaagctgtagcgcgaagtaaaaaaggtgagataaaagactggattttaatggatgaaaattatgagttttgcttttctttatacaaagatagtttgattttaattcaaactaaagatatgcaagagccagaacttgtttattttaatgcttttacaagctctactgttagtttgattgtttcaaaacacgataataaatttgaaacgctaagcaaaaatcaaaaaatattgtttaaaaatgcaaatgaaaaagaagtaatcgcaaaaagcataggaattcaaaatctaaaagtatttgaaaaatacatagtttcagcacttggagaagtgacaaaggctgagtttagacaaagagaagattttaaaaaatgagttacgatgaagcttttaaaacactgcttattagctctaatgccaagctaaatttagagctaaatcatcttgtgattaagcaagatgaaaatatagccaaattgtttttaaaggatataaacatcatcgttttagaaagcttacaagtaagccttagttccgcactttttaacgcttttgcaaggcataaaattatcttattaacctgcgatgaaactcatagtataaatggtgtttttactccttttttagggcattttcaaagtgcaaaaatcgcaaaagagcaaatgaatgtaagtgctcaaaaaaaggctattttatggcaaaaaatcattaaaaacaaaatcctaaatcaagcctttgttttgaaaaaacacaataaaatagggcaaagcaatgagcttataaatttggctaaaaaagtaagcttaaatgatagtaaaaatatcgaagctgttgcagcggcgctttattttaaaactttgtttggcgtttctttttcaagagatgagctttgctttgaaaattctgctttaaattatggctatgcaatcattagggcttgtattattagagcagtttgtataagtgggcttttgccttggcttggcataaagcacgataatatttataattcttttgcactttgtgatgatttgatagaagtgtttagggctagtgttgatgattgtgttttaaagcttaagggtgaaagtgagtttttaagcaaagatgacaaaagagcgttgattggcaatttacaaagcaaaatcaattttgatgggcaaaattatcctttaaacagagcgataaatcattatgtggcgaattttaaaaatgctttattgtatgaagatgagctaaagatagtgaaatttgatgattgaagataaatttatgcgcgtgcttttgatgtttgatgtacctactaaaagtaaaaaagagcaaaaactagcaagtaaatttagaaacaatcttataaaattaggttattttatgctgcaatttagcgtttatatgcgtatttgcaagggtttaagttctgcaaaaagttctattgaaaatgtaaaaaagattttgccaccttatggaaatgtaagggctttaatcatcactgaaaagcaatttgataaaatggagcttttgcttggtggcatagtttttaatgaaaaagttaataacgaaactaatttaacgctttttgatatagatagtcatggagaatttaaatacaaaaattcaaataatgaagaaatacaactaaacaaaaaacaagaaaaatatcatcagcaaaatttatttgaattttaaaagcggttttaggggattgtaaccccgcagagtcccgcaaactctttattttagtccctttttaaatttcttattgagattatagcataatttttgctatttttcatgaaaaaaccccgaaattttcattatctggtaaatatctattttaccataaagaaatttaaaaagggactaaaacaattagattaataacttcgatatcattattattttaccataaagaaatttaaaaagggactaaaaaccctagtggattgaaactctgctagggctaattacttcactaaaaggaggtgcaaatttgaaacttattgaaatttagggttgattaaaatcgaaataaaattatttaaataattttaaggcataaagataatatctactaaactttcattttctaaaatttcacattcttttggtactaccataagggcagctttattgttaagattgtttataatcgcactagagccttctttcttaccttcaagattggctaaaatgcgtccatttttaaattccacattacaagcgacaaattccaaataaggtgtttttttcttgtagcttccttgtaaaaaggctttgcaaatatagtctttaggctgaagtaaccaagagtttaaaatctctcttgcgtaaagattaaacattaccatagccgagtaaggaaaacctggtaaggcgatgatgaatttttcattagccttggctattttgatatgtctacctggttttatgtcggctttatcgatgatgatttcgtattcttttacagctttttttaaaaagtcaaaatctcccatagaaactccgcctgttgtaatcaaaatatcacaactttgcaaagcactttcaagggtagaaaaagtggctttttcatcatcttttaaaagtggaaaaacccttgtatcgcaatttaaatttttagctaaattagctatggcgatatgatttgaagagcggatttgagcaggattttccaaggcttctcctagatctttgatctcacttccactacttaaaacccctacaataggctttataaacacactaatgtgaaaaaatccaagttcagccaaaagagctatctcactataatttaaccttgtgccttttttgagtaaaatttcatcttttttatagttttctcctactgcacgcacggcaaaagcttggggaacttttttttctataaaaagagtatcattttctacgcgtacattttcaacagggactaaagtatcacttccttcactcataagtgaacctgtaaaggtttttacacaagtaccattttgcacgctaaattgtggcatagtgcctgcaggtgtgaggcctaaaatttttaaaggcttatcttgatcttcaaatttgatcgcataaccatccatagccgaagttggaaattcaggctgatttttaggggcttttatgtcttgagctaaaatgcgtcctaaacactctgtaagagctattttttcaatcttttcataagttttgatatgagagtgtaaaatttttaaactttcttcataagacattaacattttttatccttttaaaagtcctgcaccgcaaagtttggttgatctttctttggcataaattctttctttgtttatcacatcatacttccaaataggtgcacttgctttaaaatcttcaacaaattcattaagaagtttaagtcctaattttctttgtttgcttaaaattcctgcaaaataagagctttcatgaaccgccacatcgcctatagagtgagcaaaaagcaagctaatatcatcaaaatctactcttttttgccactcatcaaaccatttttttaaaagcggttcataaatatcaaaactaagtgcctcaatgcctccttcttcacgcacaataccacaaaaagtcagcaaagcaccgcagtttttatccttggcaaattcataccattggctataaattttaggaatatctaaagaaccttgatagagtgtaaaatgtttcatttaacccccacaaactggcggtaaaagtgctattttatcaccatcttttaacttagtgttttcatcaaaaatgatttcatcgtttaaagatacggcacaaagttctagccattcttttaaactctcatctttttgcaaaatttcttttaattcttttaaattttttacctcaagctctaaattttctttatttatggggcctaaaaattccacttttaccattttattcctttacttctaaatttcccatcattcctaaatcttcatgttctaaaatatgacaatgatacattctaagtcctttaaaatcttgtttcattctaagtcttaactcttcattaggacgcacatttatagtatctcttaaggctctaaattcggctttttgaactttgccattgagttttgatgagatgagttcaaattgcgtgccgtgtatgtggaaaggatgatccatgtgagatttgtttatcactatccagtcttcaactactccaagtttggagcttaaatcaatgcgttttaaatcatagcttttgccattgattaaaaacatagacgcaagagcgatttttaattcgctttcactttttcccatcataccatgcatttgcatatgatcttcactcatgattatttctttaaattccttaggttcttctgaaggtttgaaaatttttaaattttttggaagttctacattttctttttttagactaatattagctaaaaatagggtattaggttcttcttttaccatcattttatccctatcataataagcactttctagtctaaattccccatcttttggagcatcgattaaaacttctacgcgagaagcaggacttaagaaaagttcttctttataaatagctttttctataagtccgccatcagtaccaacaagtataaatttagccccttgtatgcgtaaatttaaatatcttgccgcagtagcattataaatgcgtatgcgttcgtttgtggcgagtttgattttaggtttaaattgtccattgatgagtacaaattctccttctctaccattaagccaatcatttaggttgttgtttggaatttgagcgttttcatcaagacgcaaatcgctaatcatcaaatctctttcttttaaatgacttaaagcatcttttttcgctttgatcacaaaagcccccgccaaacccataaagacttgtttagaagtggtataatgaggatgcggatgataccagtaagttcctgcgctatcttgaggaatttcaaaacgatatattctttcttcccctgctaagataggatcatgtgggcttccatcttgatcaggtggtacaggaacgccatgccaatgtatagttgtagcttctttgagtttatttttgactaaaatttcaagtttatctccttcaaaaacttctatttttggagcaggtactaggccgttgtaagtataaaataaggtttttttgcctttgataagttctatatgattttctttgatttctatggtagcacgaaaaatatttttttctttactttcatttttgagcaaaggtaaggcttttaaaatttctccttgggggaattgttttggatctaaaagttttaaattttttggagcaaagtttataaaagaagtatctaagtcatgatttatagaatgatttttatgcatggagtgcatatcgtgcataggatttgcataggctacacccatacttgctagagtaagtgcattaaattttaaaaaatttcttctattcattagtttttccttttgcttgattttttgtattatagtcattatttttttagttttagtaaatatttattttgaaaatttggtttaattttgttatgattttagcaatttaatcaaggaaaaataatgttttatgaaaatattcaaaccccagcttatattttagaagaagataaattaagaaaaaattgcgagcttttagcaagtgttggcgaaaaaagtggtgctaaagtgcttttagctttaaaaggttttgctttttcaggagcgatgaaaattgttggagaatacttaaaaggttgtacttgtagcggactttgggaagcaaaatttgctaaagaatacatggataaagaaattcatacttattcgcctgcttttaaagaagatgaaatcgatgaaatagccagcttatctcatcatatagtgtttaactctttagctcaatttcataaatttcaagctaaaacacaaaaaaattccttaggtcttcgttgtaatgttgaattttctctagccccaaaagaactttacaatccttgtggaagatactcaagacttggaattcgtgctaaagattttgaaaatgtggatttaagtaccatagaaggacttcattttcacgcactttgtgaagaaagtgctgatgctttagaagctgttttaaaggtttttgaagagaaatttggcaaatggatagggcaaatgaaatgggtgaattttggaggagggcatcacatcaccaaaaaaggctatgatgttgaaaagcttattgctttgtgtaaaaatttcagtgataaatatagcgtgcaagtttatcttgaaccaggtgaagcggtaggttggcaaacaggaaatttagtggctagtgtagtagatatcatagaaaatgaaaagcaaattgctattttagacacttcaagcgaagcgcatatgccagatactattatcatgccttatacaagtgaagttttaaatgctagaattttagccacaagagaaaatgaaaaaatttcagacttaaaagaaagcgaattttcctatttgcttactggaaatacttgtttagcaggtgatgtaatgggagaatacgcctttgataaaaagcttaaaatcggcgataaaattgtttttttagatcaaattcattacaccattgtgaaaaacacaacttttaatggcataagacttccaaatctcatgcttttaaatgcaaaaaatgaacttcaaatgataagagaattttcttataaggattattctttaagaaattagtattatttataatttgtataaaatgttaattttactcggaagagaatcaaagatgtaaattttatgcaaagtattttattttttcaaatataaaatcaactcaaatatctaattttcaatactttggtatgattttttaatattttaaatccttgtggaattttattgaaattcagtgatttttaaatcaaatagtattaagataaatcgatttaaaaatcggctttaaaatgaatattaggtatattttgcataatattcattcaagcaaaatttaaagctatttttgaaaattttgaatgcatgggagctttaatggatttggaaaaattaagattagctagaagtctttattatcaatgtctaggagagctttttgttttttcattttctgaagaaagattgtcaaaattacaagagtatttaaagacaatgcaagaatgtttatttgatgaaaatttaaaatcaaattttgatatcttgcttaagcatttagatgatgaaaattctatacaagcattttttaaagaatatgatttgctttttttaagtcttaaaaatagcattccaacgactttttcttacatagaagaaggttttgaaaattcaaatcctttactttgtgtgcgtcaaattttagtcaaaagtaaaataagacgcaatgaaaaattttttaaagaaagtgaagatagtgttggattttgtttattgttgatgagtgaatttttaaggcaaaatgaagatgatttagccaaagagctttttgaaaaagtgatcaataaaagcattgatgagtttttaggtgatgttttcatgaataaaaatgcgaatttatacaaggaaatttcaagtattgcattggcttttatggaatttgaaagactttgctttgaagtagaaaaacctgtaaaaataaattctaaaaaagtgcaaaacgatctatcgcgttcagaatttttaagaagagaagcaaataaacaaaggaggactcgtgaaaaatcgcagggaatttcttaaaaaatccgcttttgccttaggggctgctggagtgcttggtagcacgactttagctctagctaaagatgaagaaagaaaagatttggttaaaggtaaaagtaagaaaaaagaagtgctttttcaaagaagtgctaattgggaaaattattatataaaggctgagtaatgtcaagtgtaggtgaaaatatcaagcttacgcgtcgttcttttcttaaaatggcagcactttcaagcctagcaacaccgttgcttgctagaagtgaaactttaagagaagcgagtgctgatgagcttaaagaagcgtacgaaggtagtaaaaaagtaaaaacagtttgtacagcctgttctgtaggctgtgggattattgcagaagtgcaaaatggtgtttgggtgcgtcaagaaatcgctcaagatcatcctgtgagttcaggtggacattgctgcaagggatctgatatgatcgatatggtgcgttcacatgtgcgtttaaaatatcctatgaaaaaagaaaatggagaatggaaacgcataagttatgagcaagctttaagtgagatcggagaaaaactagctgcttatcgtaaagaaaatcctgaaagtgttatgtttttaggttctgcaaaacttaataatgaacaagcttattatataagaaaatttgcagcattttttggaacgaacaatgtagatcatcaagctagaatttgacacagcgcaacagtcgccggtgtggcgaatacatttggttatggcgctatgacaaaccatcttggagacattcaaagaagtaaatgtatcattatcattggggcaaatccagcggtaaatcaccctgtgggttttagacatttcttaaaagcaaaagaaaaaggcgcaaagcttatcgttgtagatcctagatttacaaaaagtgcagctaaggcagatatttatgcaagaattcgtccgggaactgacattgctttcatgtatggaatgctaaaaattatctttgatgaaggtttagaagatacaaaatatctcgatgaaagagtttttggaatcgataaaattcgtgaagaagcagcaaaatggacagctgaagaagtagaaaatgttacgggaatttctaaagaacttttggtgcaaatcactcatgaagtagctaaaaacaaaccaactacgcttatttgggctatgggtttaactcaacatactgtaggaacttcaaatacacgtttagcacctattgtacaaatggtacttggaaatataggtaaatttggcggcggagttaatatcttacgcggacacgataatgttcaaggtgcttcggatatggcttgtttaagcgaaaatttacctggttattatcctttaaatgaagcgacttggagatactatgccaaaatttggggtgtggattatgagtggcttttaggaaattttgtaagtaaagattggatgcataaaacaggactttcgcttgctagatggtgggcagcagctttaaatggaaaagatggcaatgatgctatcgataatgcaggaacgccttt

SEQ ID NO: 3838 - DNA, 10846 bp, synthetic construct
  misc_feature 1..10846: note = Synthetic
  source 1..10846: mol_type = other DNA
aaaatttttaattaataataataattattatttaagaattttatgttataattttaaaaattaaaaaaaaggagtcaatcatgtcagttacaaaacaattattacaaatgcaagcagatgctcatcatctatgggttaaatttcataattatcactggaatgtaaaaggtttgcaatttttttctatacacgagtacacagaaaaagcttatgaagaaatggcagaactttttgatagttgtgctgaaagagttttacaacttggcgaaaaagctatcacttgccaaaaagttttaatggaaaatgcaaaaagtccaaaagttgcaaaagattgctttactccgcttgaagtcatagaactgatcaaacaagattatgaatatcttttagcagaatttaaaaaactcaatgaagcagcagaaaaagaaagtgatactacaacagctgcttttgcacaagaaaatatcgcaaaatatgaaaaaagtctttggatgataggcgctactttacaaggtgcttgcaaaatgtaatttaaggggctttatgccccaattatacaaactaggttataatatccttttttaaaggataaaattgaaagtacttaattttttttatgaaaaccaccctaaatttgaagtaagttatgaaagaaaaaatcaaatttcaaaaccaaatattatcataaaaggcccacgattttgtggtaaaaaaacacttatttttaattttttatctcaatttaaagcaagtgaaattttgtttttagatttatatgatacacgctttgaaaaacaaagtttagaaagacttgctgattttctgaatgaaaatttacaaattaaaattctttgcctttataatttggattttatccctaatttagaaaaaattaacattcccatcatcttaagtacaaatataaaagatttaaatgtaaatgggtttgaagagcttgaacttgattattttgattttgaagaatttattagtgtaagtaagaaaaatttacctataaataatttagtaggtctttttttgcaaagtggacgcagtaaatttggagaaaaaaacatacttctaagacaaagctttactcttttagaattagaaattttaaagtatttagctttaaatttgggtcagcaaatcagtatttctaagatatttatagaactcaaaaaaagattaaaaacttcaaaagatagtgtttatcaagctatcaaaaaattagaaaatacttatgtgatttataccttaaaacatgatgaaaaaaaacttcaaaagatttattttaaagattttggcctaagaaataatctttgtatttcaaaggatttttcacatttatttgaaaatttagttttaagcgagttgtttaaatttaaagaagaatttttttataacaaatactttaacttttatagccaaatatctaaaattgcttatatttcaagtccaactttagatattgatttgattaaattacgtgctaagaaaattttaccaaaggctttagaacttggaatttttcatgtgatttttatcactctttcaagcgaggatagtttttttgagcaaggggttaaatttgaagtcatatcttttgataaattttcacttggattttaggtgttgtttgagtttgtatcgtatttttcaaggttgtatcgtttgatgatttttgtaataagattgatataatatcccttgcgttcagaataagaatctaaagttttaatagcctctagtcctgttatctctttgccttcgcttgcaaatttagctcttgcatcgcgaaacttttcataagcaaaatgacgatttaaatttaaaacataagagtaaacactatcttgcagactatcaaaaatcttaattttatgttttttatctggatgtcttaaatcaggaattaaacctttctcaccccaagtccattctccaaaaagattgtttgcttctcttgcgaagcgactggtacctgtagcactttcaactaaagcttgggctatacccatggattttggaattttttgaatacgttttttatattctgcaaaatcataaagattttcaatacgatatttgttttttatcatgataagtttttcaagatttatttggtttgaagtcctaaagcctgttttgtaagcatctttaaaaaaggcttcgataaaagctctttcttgttcaatttttttaaagctttgatcaaacatttcattcatttttataaaaaaaatttgtcttttttgatctatatcaagtttgtaatattcttctccaaatccactctttagatcatcagcaaaaagtgggattagaaaaagactaagaaaaattataattggcttcaaaacaatactttacctttccttcaaaaaacaattcttcatttttatatgcaaaccctacctcttcaccacttttaggagttattttaactttattttgtacttttttatttaaaaatgccagataaaaacaagcccccattcctgtgccgcaagctaaggtttcatcttcaactccgcgttcataggtgcgaacttttaaatgattttcatctaaaatttttacaaaattaacattggcattatatttttgtctcattttttgacaaagcattgtatcaaattcatctaaattttgacaaaaatgtactagatgtggaactccagtgttgcaaagttgccaagtttttcctaattcttcaaaagtattttgcacgctttttattttgcctaaagatacttcaactttatcttgatttacctttgcttttattactcctgcaccggttaaaaaactcatgttaggatttattttgttaatatgatgtgcaaaatgtgccgcagcccttgagccatttccacacatagcagcccttgagccatcgttattataaaattcccattcaaagtcgtatttttcatgaggcaatatcacgataaagccatccgcacctataccctcataacgattacaaagttctttagctaaagcacttctatcttcttttctatcagcatttgttatgacaaaatcattcccacttgcacaatatttataaaatttcacatttttcctttagaaatttcttgtattactttaacacattcttgcctaaaatcggcataagaattagtatttttaatgataaaatctgcttttttaagtttttcttcaatatctatttgagaatcaagtcttgcttttgcagcttctaagctgagcttatctctttgcatgattcttttaaggcttaattctttaggtgtgtaaattacaatgactttgcctaaattttcataagcaccgctttcaaaaaaaagaggaatttctacaaaaaaagctttattttccttatctagaatttgcatttgttctaaaattttagctcgaattttaggatgagtgaaattttctaaggtttttttagcttctttgttgttaaaaacaatttttccaaggatttttctatcgattttcttttcttttgtgagtaaattttttaagctaaagggagaaaaaatcttttcaagttctaaagcattttcatctaaaatttcatgagcgattttatctgcactaatgcttttaaagcctaaagaattcgctatttctataaaggtgcttttaccacaagcaattgaagcggttacaaaaaaagcatttttcatcttatgccttattaaaacttttttcgttaaaatacctttttagttcttaaaggaaaataaatgaaaatttcatatgaagatgcaggcgtaagtatagataatggaaatgcctttgtagaggctataaaacctttggttaaagaaacttttaatgataatgttgtaggtggaattggttcttttgctggtgcttttagaatgccaagtggttttaaaaagcctgtgattttaggtgcaacagatggggttggtaccaagcttcgcttggcaattgatgctaaaaaatatgatactatagggcaagatttagtagcaatgtgtgtgaatgatttgatttgtaattttgctacgcctttgtttttcctagattattatgctacagccaagctcgaagtagaagtagcaaaggctgttgtatcaggcattgccaagggatgtaagatggcaaattgtgcattaattggcggagaaactgctgaaatgcctggaatgtatgcaaaagatgattttgatcttgcgggttttgcagtgggtatggctgaagaagatgagattgatagaagtaaatttgttaaaaatggtgatattttattggcacttcctagttcaggacttcattcaaatggttattctttagctagaaaagtactttttgaaagtttaaaattaaaatttgatgacaagatagagggtaaaaatttaattgatattttattagaacctacaaggatttatgtgcgtgattttcttacactaaagccttatatcagtgctctagcacatattacagggggtggtttagtagaaaatttaccacgcgttttacctcgtggtatgggtgcaactatacgcaaacatcatcttaaaactcctgaaattttttatactataggacaggctgtagaagaaagcgaaatgtatagaagctttaacatgggagtgggtttagtaatggttgtagatccttctaatgtaagtaaggttttagaaaattcagatgcctttattattggcgaaatttgcattaatgaaggtattgttttagagtgaaaataaagcgtcaatacgctttatttttgtattttaagttctatttttgtagtgttttgttcttttggcaaaggattggtttgtgctagataaaaggctacgagtacatttacaagcatagcgataagtaaaagaggagtggttcgttttataatatccattggagctacttttgcaaatccagctaaagctatgattccgcctgctattggtgaagctgcacgacctaaacaagatgcaatttctataggtaaaactagagtaataggtgcaacgtctaattttgtagctatatcaggagctagtttgccaaaagcattaaaagcagcaattccacttcccataatcactgtggcaaaataaactaaaaagcttaaaatagctatactcaaaagaattccaaaccatgcaaaatttcctgttccaagatttgaaaccgcgttagcaaggatattaactccaccaagtgctttaatgccttcagcaaatactccagcggcgatgattatgcttacgactgagataaaaatttcagccatagcttttaaaatcaccatcatatcttcgcctaattttctagcatttctatgtcttgcaaattcaacaagaaaaactaaagaaatgcttacaaaatttgctgttacaacatcgagcttgatagtaaaaaaatacgctgtaaataaaaatacaacaggtaaccaaggaaagagtatgtaaaaagtagggcatttaggatcaatgatttgcggaatttcaacttcatcatttaaaacacctttttctttatctcttttatcaatccaagcaaaataaaaaggaatcaagatggcaataactacaacataggcaatcacactataaatttggtaatttaaaaaaagccctacgacattatcactttgtcctaccatatctgccatattgattgaatttccatcttttggaccataatcaagcgcaattaaagaaagcacacatacagctgtaataggacggattttaagtgagattaaaacaggataaatacatgctaacaaaagcaaaagcaatccagcatagctagaaatgacgatttttaaagccattccaacaacaaaagttccacttaaaatcaagtatttatttttgatttttcctaagggtttatttgctaaaaaagcaagttttgctgaagcattgatatgtttcatataagcagcaaaacctgccacactcatgataataagtcctactccagaaagctgacttttaaaaatcgctgtgataaaagataactatcaagtaaaacatttaaaaagcttgtatgctctctgcttggggcttttggtataggtgttcctgtgatgtaaaaagcaaaaataagcaagataatatttgaaagaaaaatacaaaaatgagattatattttagtatataataagcaacgacaattaccgctaaaagtgtagaacatatcataaaaattggcatgatttctcctaaagttattattagcttttattttagctaaaatttaactaataaatatttttcatttaaaattttacttattttttgcattataaaattaataatatgtatagtttggttactgaaaagtttatgtttgtttaaaaaaatgatttttgtattataattatacacaaatcataaatattaaaaaggatctagtgtggcaagaattttggcatttgatataggaataagctctattggctgggcatttagtgaaaatgatgagttaaaagattgtggagttaggatttttacaaaggttgaaaatcccaaaacaggagaatccttagccttgccaagacgccttgcaagaagtgctagaaaacgccttgctagacgcaaagcaaggctaaatcacttaaaacatttaatcgcaaatgaatttaagttaaattacgaagattatcaaagctttgatgaaagtttagccaaggcttataaaggatctttaattagcccttatgagttaagatttagagctttaaacgagcttttaagtaagcaagattttgcaagagtgattttacatattgcaaaaaggcgtggctatgatgatattaaaaatagtgatgataaagaaaaaggtgcgattttaaaagctatcaagcaaaatgaagaaaaactagcaaattatcaaagtgtgggcgagtatctttataaagagtattttcaaaaattcaaagaaaattccaaagaatttacaaatgttagaaataaaaaagaaagttatgaacgctgcatagcgcaaagttttttaaaagatgaattaaagcttatttttaaaaaacaaagagaatttggcttttcttttttaaaaaaatttgaagaagaggtgcttagtgtagcattttataaaagggctttaaaagatttttctcatttggtgggaaattgtagtttttttaccgatgaaaaaagagcgccaaaaaattcgcccttagcttttatgtttgtagcacttacaagaattatcaatcttttaaacaatcttaaaaatactgaaggaattttatatacaaaagatgatttaaacgcccttttaaatgaagttttaaaaaacggcactctaacttataaacaaacaaaaaagcttttgggcttaagcgatgattatgaatttaaaggagaaaaaaggaacttattttattgagtttaaaaaatacaaagaatttataaaagccctaggtgagcataatttaagccaagatgatttaaatgaaatagcaaaagatattacccttataaaagatgagattaaacttaaaaaggctttagcaaaatatgatttaaatcaaaatcaaattgatagtttaagcaaattggaatttaaagaccatttaaatataagttttaaagccttaaaacttatcactcctttaatgcttgaaggtaaaaaatacgatgaagcttacaatgagcttaatttaaaagtagcaatcaatgaagataaaaaagactttttacccgcatttaatgaaacttattacaaagatgaagtaactaatcctgtggttttaagggcgattaaagaatatagaaaggtcttaaatgccttacttaaaaaatacggtaaagtgcataaaataaacattgaattagcaagagaagtaggtaaaaatcacagccaaagagctaaaatagaaaaagagcaaaacgaaaactacaaggccaaaaaagacgccgaacttgaatgtgaaaaactaggcttaaaaataaatagcaaaaatattttaaaattaagattatttaaagaacaaaaagaattttgtgcttatagtggagaaaagattaaaattagtgatttgcaagatgaaaaaatgcttgaaattgatcacatttacccttattctagaagttttgatgattcttatatgaataaagttttagtttttaccaagcaaaatcaagaaaaacttaatcaaactccctttgaagcctttggcaatgatagtgcaaaatggcagaaaattgaagttttagcaaaaaatttacctactaaaaagcaaaaaagaattttagataaaaattacaaagacaaagagcaaaaagactttaaagatagaaatctaaacgatactcgctacatcgcaaggcttgttttaaactacactaaagattatttagattttttacctttaagcgatgatgaaaatacaaagttaaacgacacacaaaaaggctcaaaagtgcatgtagaagcaaaaagcggtatgcttacatcggctttaagacacacttggggctttagcgctaaggatagaaataaccatcttcatcacgccatcgatgcagtaattattgcttatgcaaacaactctatcgtaaaggctttttcagattttaaaaaagagcaagaaagcaacagtgcagaactttatgcaaaaaaaattagtgaattagattataaaaacaaaaggaagttttttgagccttttagtggttttaggcaaaaggttttagataaaattgatgaaatttttgtctcaaaacctgagagaaaaaagccaagtggagctttacatgaagaaacatttagaaaagaagaagaattctatcaatcatacggcggaaaagaaggagttttaaaagccctagagcttggtaaaattcgcaaagtaaatggtaaaatagttaaaaatggcgatatgtttagagtggatatttttaaacacaaaaagacaaataaattttatgctgtgccaatttatactatggattttgctttaaaagtattaccaaataaagctgtagcacgaagtaaaaaaggtgagataaaagactggattttaatggatgaaaattatgagttttgcttttctttatacaaagatagtttgattttaattcaaactaaagatatgcaagagccagaatttgtttattataatgcttttacaagctctactgttagtttgattgtttcaaaacacgataataaatttgaaacgctaagcaaaaatcaaaaaatattgtttaaaaatgcaaatgaaaaagaagtaatcgcaaaaagcataggaattcaaaatctaaaagtatttgaaaaatacatagtttcagcacttggggaagttacaaaggctgagtttagacaaagagaagattttaaaaaatgagttacgatgaagcttttaaaacactgcttattagctctaatgccaagctaaatttagagctaaatcatcttgtgattaagcaagatgaaaatatagccaaattgtttttaaaagatataaacatcatcgttttagaaagcttacaagtaagcctgagttccgcactttttaacgcttttgcaaggcataaaatcatcttactaacctgcgatgaaactcatagtataaatggtgtttttactccttttttagggcattttcaaagtgcaaaaatcgcaaaagagcaaatgaatgtaagtgctcaaaaaaaggctattttatggcaaaaaatcattaaaaataaaatcctaaatcaagcctttgttttgaaaaaacacaataaaatagagcaaagcaatgagcttataaatttggctaaaaaagtaagcttaaatgatagtaaaaatatcgaagctgttgcggcggcgctttattttaaaactttgtttggcgtttctttttcaagagatgagctttgctttgaaaattctgctttaaattatggctatgcaatcattagagcttgtattattagagcagtttgtataagtgggcttttgccttggcttggcataaagcacgataatatttataattcttttgcgctttgcgatgatttgatagaagtgtttagggctagtgttgatgattgtgttttaaagcttaagggtgaaagtgagtttttaagcaaagatgacaaaagagcgttaattagcaatttacaaagcaaaatcaattttgatgggcaaaattatcctttaaatagagcgataaatcattatgtggcaaattttaaaaatgctttattgtatgaagatgaactaaagatagtaaaatttgatgattgaagataaatttatgcgtgtgcttttgatgtttgatgtgccaactaaaagtaaaaaagagcaaaaactagcaagtaaatttagaaacaatcttataaaattgggttattttatgctacaatttagcgtttatatgcgtatttgcaagggtttaagttctgcaaaaagttctattgaaaatgtaaaaaagattttgccaccttatggaaatgtaagggctttaatcatcactgaaaagcagtttgataaaatggagcttttgcttggtggcatagtttttaatgaaaaagttaataacgaaactaatttaacgctttttgatatagatagtcatggagaatttaaatacaaaaattcaaataatgaagaaatacaactaaacaaaaaacaagaaaaatatcatcagcaaaatttatttgaattttaaaagcggttttaggggattgtaaccccgcagagtcccgcaaactctttattttagtccctttttaaatttcttattgagattatagcataatttttgctatttttcatcaaaaaaccccgaaattttcattatctggtaaatatctattttaccataaagaaatttaaaaag

SEQ ID NO: 3839 - DNA, 9213 bp, synthetic construct
  misc_feature 1..9213: note = Synthetic
  source 1..9213: mol_type = other DNA
cttaaaaatgtcttagacgcaaataaaaagtatttcttaaaagatgtccccaaatattacaatatgttgcaaggttgggcagaagctggaatctatgatgtgcctgcgcaagtggcggaagtaatgtttgaaagcttagaagataaagatgaccctttatatttgccattgcttaagagtatggcggtgtggtttgataaagcggggaatctcaaaaaagcacaccaatattatcaactcttacttaaagaaacagaaaacgatacagaacgacgcgaagtgcaaaatttagatgataatttgttattaaatttcaatgaagagaatgcaacgaaaagattagagcattatgattatgtaatgcaaaattatcaaggcaaggaagaagccaaaatggcattagagaaaaaggctcaaaccttgtatgaattgggaaaatatcaagaaatctttgctataagagacgagctagaaaaagaattaggagagaatcccgaagctttaatgaacgctttgagtgcgttagttagagattctcttaaaaatcaaaattgtaaagaagttgcgtattatggtagtttgtatggggagagaatcccgctagaaagcaaggaaagattgcaagaggttgattgtttgatagaaaataaacaatatagtgccgcacaaaaaattgctcaaatagaatcgcaaaatgctaaagtgccaatggataaagaggattggctctatcgtttggcgtgggtgcaatacgaaatgcaagattatcctaaagcagctcttgccgcacgcgatactttgagtttgttaagcaatcctacgcacaatgatagtgcttgggtgttatttatggctctaagtaagcaaggaagagacgaagaggcattcaagattctacctactttagaggagaaattaaaagacgataacaaaatgatagaagtttataaagagatattgcaaaatgcgcttacaaaaaaagatgataccgctatcaaggtatatgccaataagctaatgacgcttcaaaagcagcacgaacgttttgaatattccccttgggttgaattaggtatggtagaggctctgaatcgtgagggcaaattccaagaatctttagatttattaaagagcgcagaatcgcatattagttcagggaatgagcagattcaaatttattatttgcaaggatatttgaatgataaactaggcaataaagacgcagcaatagaatcttacagtcaatgtgaagcagtccaagcaaaatcaccttggaaaaatttatgtatagatgcaaaaagattgttagaaactcaaagtgcaacccaagcgcaaggacaataatgagagaaaaaaaagaaaagacacaacaagtatctaagagtcaagaaattggttttgaagattatcttggtataatttcgcaatgtttagaaaaattagaggaggaaaatctcacacttaatgaggggctggcactctataaagagggtatggaaaacttacagaaagcgcaaaaaattttagaaaatgcgcagttacaatgtgaggagcttaaaatgcaatacaaaaaggaaaaccaatgaaaatcgctgctttacaactctcaaacactaaaagtcaagacgacatagaatcttatcttaaaaccgcagtggaagcgaaagccaaagtcattctttttggagaatatttactcaatccatttttcaaaaatttggaatccaaaagaaacaaaaaaacacaatggctagcgcaaatcaatcaagaaaacgaaaacctattgcaactttctgtcaaatatggaatcattattgtaacgcctataatagaggttgtttctcgcaaactctataaaacaatcttgattattaataagggcaaggcaatccattatagggcgcagaagcttatgccttatgaacattggaatgaagcgaagttttttgccaatacttcaccaaagactcttagaaccccgccgacttttaatgtgggagggattaagttttctgtgctttttggctatgaattgcattttgatgaattttggctaaagtttaaaaatgaaaatgtagattgtgtgctattgccgagtgcctctacctttgattcttctttgcgttggcgtagcattatcaaaatgcgggcattcttgaatagttgctatgtcttgcgtgcgaatagaatcgggcaatatgaggatatgcccacgaaaactttatggaatttctatggagattctctctttgtttgccccaatggcgaggtaatagattgcctaggagaccgcgaggaattattgattgccgaagtggataaaaaatacttaaaggaaatcaaagaatgttggagattccgtccttaaaggttagttttttaagaggtttttaaattttacaaaagagttaggatttatcattaattttaagcttaaatttattaattttagatataatccaaaactttcctttagcttaaaaatagtttaagttttatctacttttggagttgtctatgtccgcaaaaaatgttaatcaacaactagatgaattatttcaaaacgaatccaaatatgtttcttatgaaaaagttgcacaggttttgggcaaactccctaccgctgcgcaggctaaaagagtaagtgagcttgcaaaaaaacacaaaagaaaactaatgtccgcttctgaagtggcaaagattctcaatcaagatgaagcaagaaagataaaagaagacaaaaaacgtcttttagacgaggagctagaagatgaatttgactttatgaaagagcgcgaattgcttgaatggagtcgtagtgatagcccggtgagaatgtatctgcgagaaatgggacagattccacttttgacgcgtgaagatgaagtagagcttagcaaaaacattgaattaggcgaaaatattattttagacgcgatttgctctgtgccttatttgattgattttattttggattataaagaagccttgattaatcgtgaaagacgcgtgaaagaactctttaaaagctttgatgatgaagaggaagagggcgaggaagaagaggaagaggagaatgaagaaaatgaaagcgaagagagtgaggaatccaaaaagcccattagtaaaaaagaccaaaaacgtgtagaaaaagtgctcataagtttcaaagcgttagaaaaagccaaaaaagattggctaaagacttgggaaaaagaaaaagacaatgaaaattgcgaggatatgctctatttgctcactctagcacacaaaaaacagcttttgaaagaaaaattattagacttaggacccacaagcaaattgattaatgagcttgtcaaggcaatggaaaatacgattaaaagtgatgagggatttgaaaaggaattaaaacgtttagaatatcgtttgcctttatttaatgatattttattggcgaatcataaaaagattttggataatatcacagaaatgagcaagacagatattacttctgcagtgccagaagcgacaatggtttctacttatatggaaatcaaaaaactattccaaaccaaagccgcaagtgagggaagctttgatttagaaccagagaaattaaagcagattttggagcagattaagagagggaaggacattgccgataaagcaaaaaccaaaatggcaaaatccaatttgcgccttgttgttagcattgctaaacgttatacgaatcgcggattgccttttttggatttgattcaagagggcaatatcggattgatgaaagccgtagataagtttgaatataaaaagggttataaattctctacttatgcgacttggtggattcgtcaagcaatttctcgtgcaattgcagaccaagcacgcacgattcgaattccaatccatatgattgagacgattaatcgtattaataaaattatgcgcaaatttttgcaagaagagggcaaagagccggatttggagaaaatcgcggagggtgtgggattgcctgtggataaggtgaaaaatgttatcaaaatcacaaaagaacctattagcttagaagcacctattggcaatggggaagatggcaaatttggagattttgtagaggataaaacctctattggaccaatggaccatattttgaaagaggatttgaaaagtcaaattgatgatgtattagaccaactcaatgagcgcgaaaaagccgtgattcgtatgcgttttggattgcttgatgatgaatcggataggactttagaggaaattggcaaggaacttaatgtaacgcgcgaacgtgtgcgacaaatagaatctagcgcaattaaaaagctcaaacacccaaaagtaggacgcaagcttaaaaattatattgaggaataattgtttccttaataaagcaataaaataatacaatactcctcaagatttattggataattatcaaggatatattatgaaagtcttaggatttgatataggaatcacgagtattggttgggcttatatcgaagatgatgtgctcaaggattgcggcgtgagaatctttacgaaggcggagaatccaaaaaatggcgattcgcttgctgcgccacgcagggaggcgcggagcgcgagaaggaggctggcgcgcagaaaggcaaggctctatgcgctcaagaagttgatttgcaaagagtttggtttgaaacttggcgattatctcgcgcctgatggcgagctgccaaaggcttattgtatccaaaagtgtaaagtttcaaaagatgaacgcaaacaaaagcgtcaaactgaaaaaggcaaacaggagcttgaaaaactaaacaacaatccatataggcttcgcaaagaagggctagaacgcaaattaaatgttgatgaacttgcacgcgtgattttgcatattgccaaacatcgaggatatggaaataagcatgctaaagatgcagatgatagcgaaagtggcaaagtcaaaaaggcgattaaagagaatgaaaagttgttgcttgaaaaagactatcaaagtgctgggcaatatctttatagcgaattttttgaaaagccacgtgattttgatgtggagcaaaagtctttaaagaacatacagggcacgcaagaatttagaaatgttaggaacaaggcagaatcttatacgcgttgtttaaatcaaagtgaattgcaaaaagagttagggttgatttttgaaaaacagcgtgagtttggctttaattttagcgataaaaaatataagattatcgatgaaaatggtaaattaaaagagctagactttgaatctgctattatggaaatagcgtttttgcaacgtccacttaaaagctttgaggataaggttggcaaatgcacattttatgccgatgagcctcgtgccccaaaagattcgcctagtgcaatagaatttgttgcgctcacaaaaatcatcaacattctagcaaatatcactaaacgtagcggcgaagtgtatagtgcggataaactgcatgaaattcgtgatatggtattggaaaagggcgaaatcagttacaaaaaattacgcaaaattattaacctcgatgagagaatccaatttccgaaagattccaaacttgactatactaaaaaagatgccgaaaatgcaaaggtcatagaatttaaaaagctaaaaagttttaataaggcttttggtgataagggctttgatgggcttaccagaaatgagcttgataggattgcaaatgatattgcgctgattaaaagcaaagcagagctaaaggacaagttaacacattatccaaacatcaatgaaaagcaaatagagaatctaagcgaattgaattttgataaatttattgatttgagcttcagagcattagagcagattctgccctttatgcgtaagggattgcgttatgatgaagcagtcaaggaagcaggattgcaagagcataagaaacatcaacaaaaggataattttctctcgccgctcaaagagtatgaaccctatctcgcaaatcctgtcgtggcaagggcattgagtgaataccgcaaagtatgcaatgcgttacttagaaaacatggacaggtgcacaaaattcatttagagtttacacgtgaagcgggcaaaaattatgatgagcgcaagaaaattgaaaaagaacaaagggagcattttgaggcaaatcaaaatgcgcagaaacaatgtgaaaatttagaattacctcttaatggagcaaatatccttaagataaaactttggatagaacaaggtgagcgttgtgcttatagtggagaaaaaatcacactagaacatttaaaagattccacaatgctacaaattgaccatatctatccctactcacgtagttttgatgatagtcaaaacaacaaagtgcttgtttttacgaaagaaaatcagaataagctcaataagacaccctttgaagcttttggcacagacaaggaaaaatgggacaagattcttagtcgtgcaagcaagcttcctaaacccaaataccgcagaatctccaacacacaatttacggataaagaagcgggttttctcgcaagaaacttgaatgatacaagttatattgcaaggttagcgagtcaatggactaaagattgtttggaatttttacccttaagtgaaaatgaagcaacaattgctggcgagaaaggtagcaaggtgcatgtggaggtaatgaacgggagcttgacggcgatgcttaggcattattgggggcttgggagtaaaaatcgcgacaatcacttgcaccacgcagtcgatgcggtgattattggtttcacaaacgcaagcgtcatcaaggcattttcagattttagaaagcttcaagaacaaaataaagcgaaattctatgctaaacaaattgcagaatcggaatataaggataaaagggcattctttgagccctgtaaaaactttaggcaaatggtgctagataaagtggattctatctttgtctccaaacccccgcgcaaaagggcaagaggggcattgcacgaggcgacattctattcttttgaaaaattgtgtaaagatgaggaatatgctaaaaaggaaaaaatggactatggaggacaaaaggggatagaaagagcggtaaaacttggcaagattcgccaaataggcacaaagattgtgagcaatggcgcaatggtgcgtgtggatattttcaagcacaaacaaagtggcaaattctatggtgtgcccatttacacaatggactttgcgcttggaatcttgcccaataaagcagttgtgggaggcaaagacaaagagggtgttatcaaggattggctagaaatggattctaattatggcttttgctttagcctatttaaggacgatttgattttggtgcagaaaaaggaaatggagaaagcggaattgtgttattttaaaagatttaaaacttctggtgcttcaatagaaattgtcaagcacgataataaggcagataatttaagtggcaatcaagaaaaaatattcaaggtgaaatgtgaagataatcaaaaaatattagatgaaagtttaatatcaatccaaaatctcaaaacctttgaaaaataccaagtctcaccacttggcgaaatccaaaaggcagaatctatgccgcgtcaagccatttctttaaagtctagccccaaaaacaagaataaataatgtttaatgccgcctttcgcacgctttttctaagcactcccgtgaggcttagtttgcttgataggcatttgtgcattgcccaaaaagacaaagaaagcgtaaagattccactttctgatattctttgtattattttagaatctccacaaatcacgcttacaaatgcactgcttaatgcgttagcgcaatataaaatcgtttgttacacttgtgatagctcgcatttgcctagtggtgtgtttatgccatttttgggacactttaagagtttaagtattttgcaaaatcaaatcaaactcaaaaaacaaaccaaagcagtgctttggcagcaaatggttaaagcgaaaataagcaatcaagcggctttgttgcaaatgtgtagcaaagcagaatggtatcaattagaatctttagcaaagtctgtcaatctaggagatagcacaaataacgaagccaaagcggctgcaatctatttcaaggcactttttggtgtgggctttagtcgcaaaatccaaatttttgaagaggaaaaaattggaacgataaatgctgcactcaattatggttacgcgattgtgcgaggaattattgtaagaagtctttgtgcaagtgggcttaatccagcacttggaatcaatcacaaaaatcaattcaatgcgttcaatctcgctgatgatatgatagaaccttatcggatttttgtcgattcccttgtaatgcgaatgtgcgagaatggagagttacaagaatccctaagcctagaaaatcgcgtccagttggtagaaatcttaaatgtgtcagtgatgatagaaaagaaactctatccgcttagtcgggcagttatagtgagtgtgcaaagtttggtgcgttgccttgaggtggagaatctcaagctcaaaacacctctcttttgcgaggagaaatccaatggaagagaaatttatgagggtgttagtaatgtttgatatgccaacttttactaaagaggacaggaagaattgcacgaaattccgcaagtctcttattaaagatggctttatgatgctgcaatatagtgtttatatgaggatttgcaagggtatagcaagtgccaataattatttggataaggtaggtttgattgttccgccaaaagggcatattagggcattagttcttactgaaaagcaatttgacaatatgcgattattacttggaaaaagaagtgaaaatgaaaaggcaaacaaacctagacaacttacgcttttttagactattaaaagtatattaatagatttcaaaagatttgagaattaaaaagatatagattcggttttaagggattgtaaccctgcggagaccgaaaactccttattttagccgctttttaaattctttggtaggaattatatctttctttatcttaaaatcacttattttaagatattttggaacttttaaaattcccaaacccttttatatacgatgttctagtaaagtatattttaccataaaagaatttaagaagcggctaaaacttaattccagtatttagaaaatttgctgac

SEQ ID NO: 3840 - DNA, 8941 bp, synthetic construct
  misc_feature 1..8941: note = Synthetic
  source 1..8941: mol_type = other DNA
ttgcatactaatatttgtagcgctggagttgctataaaagcctcctatacctatgctggcgtgttcgctcacacctaaactctctagagccaatagaggcagtaccaatagtcgttttaacatgtattttccttatattaaagatgacagagagagcgcatagcttagagctatgcaagcagatttagaatttaaatttccaccagccttgcgagatacaatatcaatgcaatctccgtgtgcaaatactgcaatgaagattgctgccgatattgtattgatataaggattcttgcaagaaaatcttatatgtagaatgcgagaatcctgatgtgatatatatcaaaatatcgcaagaatggaacatgggcttatttggattcttggaggtgtggcttgaaaatcattggttttgacataggtattgcgagcattggttgggcgtatatggaggataatgagctcaaagattgcggggtgagaatcttcaccaaagcagaaaatcccaaaacaaaagcgtccttagccttgccaagacgaaaggcacgaagcgcaaggaggagattagcacggagaagaggcaggctttatgccctaaaacagctgatatgcaaggaatttggattctatctaggcgattatgtaagcgatgatggagacttgccaaaggcgtatatccacaccaaagacaccaagagcccctatgaattacgcactttagcccttacccaaaagctagagcataaagatttagctagagcaatactgcacatcgccaaacatcgcggctatgggaataagcacgcaagagaggcagaggacacagaagagcaaaacgaaacgggcaaaattaaggctgccataaaagaaaatgaaaagattctgcaagaaaagggctacaaaaccataggcgaatatctctacaaaacattttaccagcaagagcgaagcgatagtgagaaaaaaggcaataaaaatagcaaagaatttcaaaatgtgcgtaataaagccggaaattatgagcattgtatggcacaagataaactcaaagcagaattagagctgattttgcaagttcaaaataaattaggagcgaatctaaaagattccttttgtcaaaaagtcatcgatattgccttttatcagcgcgaactcaaagattttagcgataaggtaggcaaatgtatctatgatgaaaatagcccccgtgcgagcaaagattcattaagtgcgatggagtttatcgccctcacgcgcattctcaacgccctgcaatctatcagcaagcaaagtggcgaggtctatggcaaagatatgattgcgcagatttcacacatcgtgcttgaaaaaggagagataaattataaagcattgcgtgagatattgcgactacctgaatctatacgatttcctaaagattcaaaacttgattacacaaaggagcaaaaagtcgcagaaaaggcagcgtttattgagtttaagaatcttaaagcttttaaaaaggctttgggcgggagctttgcagggctttcacgcaaggagcttgacgcaatagccacacatatcacactcacaaaggataaaatacattttcagcaaaagttagaatcctatgcccttgatgacaatcaaaaagaggctttgagcaaattatcattttcccatcacattcatcttggctttgaggcgctgaatcagattctgccctttatgcgagagggcttaagatacgatgaggcggtgcagcaggcgggattgaaagaatggagaaaaataacgcaaaaagaaaatctcttatcgccgcttcataaatatgagccctatttagctaatcctgtcgtggcaagggcgatgagtgagtatcgcaaggtgctaaatagcctgctaaagacatatgggcaggtgcataagattcacatcgaatttacgcgtgaagtggggagaaatgcgaaagatagaagcaagatagaaaaggagcagagagacaaattagccaaaaatgaggcagcaaagaagcaatgtgagaatctaaggttgccccttagtgatagcaatatcctcaaaatgaagctatggatagagcagggggaattttgcatatatagtgggaagaaaattacttgtgatgatttgcagaatcctcaaaagctgcagattgaccatatttacccttattcacgaagctttgatgatagctatgcaaataaggttttggttttcacaaaagaaaatcaaaataagcgtaataagacgccttttgaagcatttggagaagacacaaagaagtgggagaagattctaagtcgggcaagcacgctgcctaaagcgaaataccgcagaatctctaatataaaatttgaagataaagaagcgggatttatccctagaaacatcaatgacacaagctatattgcaaggctttgtgcgaattggacgaaggattgtttgagcttcttacctttaagcgaaaatgaagtaacgattagtggagaaaaaggcagcaaagtgcatgtagagacaataagcgggaatctcacggcgactttgcggcattattggggactaggagagaaaaatcgcaataatcatctgcaccacgcaattgatgcgattatcatcgtctttagcaatgcaaaaacgattaaagcatttagcgactttaaaaagcagcgagagctgaataaggcgagattctatgctaaagagttggcggaggctgactataaacagcagaaagtattttttgagcctatggaggattttaggcaaaaaatcttagcaaaagtagattctatctttgtttctaagcctccacgcaagagggctagaggggcattgcacgaggagacattttatgcttttgatgataaggatttgatgaagaaatatggcggacaagagggcgtagaaaaggcagtagcactgggcaaaatccgccgcattggcacaaagatcgtgaataatggggcaatggtgcgtgtggatatttttcagcacaagcaaagtggcaaattctatggcgtgcctatctatacgatggattttgcattaggaatcttgccgaataaggcagtgatagccgggaaagataaacaaggagtgattaaagattggcttgaaatggatagctcttatgaattttgctttagtctttttaaagatgatttgattttgctgcagaaaaaggatatggaaaaggcggagttgtgctactttgtgagttttggtattgctacggcaaccatacaggttgaaaaacataacaataaatttgaagatttaagtgaaaatgaaaaactactctatacgaatgcgacagcaaaagaagttgtagctaaaagtatagggattcaaaaccttaaaatatttgaaaaataccatgtctcaccattaggcgaagtcaaaaaggcagagtttgcagagcgtcaaaatattgcattgccatcaagcccaaagcataaaaaagcataaaagatgtttgattctgcttttaggacgctttttttgagcactcctgcaagacttagcctctatcaaaaacatctttgtgtcgcacaggaggctaaagatgcgctcaaaattcctcttgatgatattttgtgcctcattttagaatcccctcaaatcaccttgacaaacgtgctccttgacgctctcgcacaggctaaaatcatttgctacacttgtgatagctctcacttgcctagcggtatttttatgccatttttggggcattttaaaagtcttgcaatcctgcagcagcaaatgcagctcaaaaagcaggcaaaggcgatattatggcagcacatcatcaaatcaaagattcacaatcaagccttgctcctacaaatgcagcaaagagaagagtttgaagtattagaatctctggctaagggagtgaaactcgccgatagcacgaataatgaggcaaaagcagccgctttgtattttaaggcactttttgggaaagactttagccgcaaaacacaaatctttgaggatatgcggatagggcttatcaatgcggcactgaattatggctatgcgattgtgaggggagcgattgtgcgtagcctctgtgcgagcgggctaaatcctgcattgggaatcaaccataaaaaccaattcaacgcctttaatctcgctgatgatgtgatagagccttatcggacttttgtggattcactcgtggtgcaaatgcttgaaaatggggattttaaagaatccttaagtcttgaaaatcgcgtaaaattaacagagattttaggcacagcggtgatgatagaagacaaaagatacccgctttatcgtgcgagcatagcgagcgtgcagagccttgcttatgctattcaaaaaaacacatttgccttaaaacttccaatattttgtaaggatatatccaatggaagagatatttatgagagtgctagtgatgtttgacatgcctacaagcaacaaaagagagaggaagctgtatgcgaaatttcgcaaatacctgatacaagatggctttatgatgctccaatacagcgtgtatatgagaatctgcaagggtgtcgcaagcgccaatcgtcatttggacaaaataagccttatcgtgccgccaaaggggcatattcgaggattaatcctcacagaaaagcaatttgacaatatgcggcttttgcttggcaaaccaagcgataatgaaaaagcccatgcacccaaacagctcacacttttttgatatctttgtagggtttgtgtgttttagaatcttagtttatgaagctttttgagtattttgataaaaaataagacggagagatattatttgctctaaaattgcaaatgcttgcagaaaaatataatgcaattgaggaaaatctgtgggtagttttatgtagaataagggtttttaggtatcgaaaacctgcggggaccccttaaaccccttattttagccgcttactcaattctctaggaagaattatgcttcctttttgcttaaaatatgattttttggatattttaagcctatcacaccgctcaactaccgctctatacgatgttttggcgaggtatattttagcgtaagagaatttaataagcggctaaaactcgttaaaacacagggcgataagattcttgattttagcgtaagagaatttaataagcggctaaaaccaaggccgcaaggctcgccgtcgcgttattattttagcgtaagagaatttaataagcggctaaaaccagaaaaccacctacatctacctttagtcaattttagcgtaagagaatttaataagcggctaaaactcaaactcgctggggcctccatacaaaccgattttagcgtaagagaatttaataagcggctaaaacttttttcgatattcaatagaatctcgatttattttagcgtaagagaatttaataagcggctaaaactaagttcggtggtgtggtcgcggtgtggtgattttagcgtaagagaatttaataagcggctaaaactcaaaaatctcgtttacattctttggcttgattttagcgtaagagaatttaataagcggctaaaacaacaagggacgtataaagacgaataaaatcattttagcgtaagagaatttaataagcggctaaaacgaaggttcaaacactggcgtcggtacaatgattttagcgtaagagaatttaataagcggctaaaacttatgggtatagcgctaggccttgtgatggattttagcgtaagagaatttaataagcggctaaaacgcaaaccagccttttaattgataaaattaaattttagcgtaagagaatttaataagcggctaaaacgccactgggtggcagattcactaaccatcaattttagcgtaagagaatttaataagcggctaaaactcaaagttaaatcgctcggctaatggttgaattttagcgtaagagaatttaataagcggctaaaacatagcaagtcgtttatacactcttgtataaattttagcgtaagagaatttaataagcggctaaaactcacaatttaaggataaaaaatgaaaaaaaattttagcgtaagagaatttaataagcggctaaaacctctatctctttacatatctttattgctgcattttagcgtaagagaatttaataagcggctaaaacaaaagtttgatacaattgcaacggctaaggattttagcgtaagagaatttaataagcggctaaaactatataataggcttctaaggtttagctcttattttagcgtaagagaatttaataagcggctaaaacaacatgccatgaagccaaaaacccagaaaaattttagcgtaagagaatttaataagcggctaaaaccccatgcaagattatatcaactatgcagaaattttagcgtaagagaatttaataagcggctaaaacataggaaagcaattaagcttatttgactttattttagcgtaagagaatttaataagcggctaaaacatttttgccaattaaaaaccacttaaaataattttagcgtaagagaatttaataagcggctaaaaccaaatacaccgcttgtttttaagctatgtaattttagcgtaagagaatttaataagcggctaaaacctaaaacaagcccaaagcatagcccaaataattttagcgtaagagaatttaataagcggctaaaactgcagagagtgtcaacattgctatgcttgcattttagcgtaagagaatttaataagcggctaaaacaaaatttaaaactttgttttgtaaggattgattttagcgtaagagaatttaataagcggctaaaacaatttacgcgctgtgagcaatgccctttgtattttagcgtaagagaatttaataagcggctaaaacaccgagggcattatgattttcacacgctttattttagcgtaagagaatttaataagcggctaaaactagattctgtagaggtctttgtggtgtttgaattttagcgtaagagaatttaataagcggctaaaacgcacgcatttaaacaagcacgcacgccaatattttagcgtaagagaatttaataagcggctaaaactatggcagactgcaaaagatgagagggttaattttagcgtaagagaatttaataagcggctaaaacttaaaaaatgctggaaattcgggattatcgattttagcgtaagagaatttaataagcggctaaaacacaatcgtaacgcattaaaaagcactataaattttagcgtaagagaatttaataagcggctaaaacctggttttggatgttactaaatttgattttattttagcgtaagagaatttaataagcggctaaaacacaatagaatgataggagtcacatatgatgattttagcgtaagagaatttaataagcggctaaaacttaaaaagtgctggaagttcggaattatcgaattttagcgtaagagaatttaataagcggctaaaacttaactctactcacactctatccttaattaattttagcgtaagagaatttaataagcggctaaaactcctgatatgatgtactgatttcattttaaattttagcgtaagagaatttaataagcggctaaaacaaggattgttggtgaagtgctttaatccttattttagcgtaagagaatttaataagcggctaaaactacaaaccgcttctattgcgcccgcccataattttagcgtaagagaatttaataagcggctaaaactagcatttctgtctcctttagaaaaatttgattttagcgtaagagaatttaataagcggctaaaacgcaaagagcgagctattagaagctaaaaagattttagcgtaagagaatttaataagcggctaaaacacaaagaggttctcagatttcagtacctatattttagcgtaagagaatttaataagcggctaaaacattgctgtattgcagcccccaccttttggcattttagcgtaagagaatttaataagcggctaaaacagattcgatgataacgcacgcgagttttatattttagcgtaagagaatttaataagcggctaaaacttaaagcgatacggataatctttaatatcgattttagcgtaagagaatttaataagcggctaaaaccgaatgttcgatgattcagatagacaatggattttagcgtaagagaatttaataagcggctaaaacttaaggtttagaacagccgttataaaaactattttagcgtaagagaatttaataagcggctaaaacactatacccccctctttgtcccgactgattattttagcgtaagagaatttaataagcggctaaaactcgatagcaaacccattagcaacgctctcgattttagcgtaagagaatttaataagcggctaaaaccataaaagcgagtatgttaatccaaagtggattttagcgtaagagaatttaataagcggctaaaacagttcgttgtttttctgctttatgttttgcattttagcgtaagagaatttaataagcggctaaaacacaggcgaactattagcattgcaatataagattttagcgtaagagaatttaataagcggctaaaacaatattttgcgttacctgcacattgttattattttagcgtaagagaatttaataagcggctaaaacaggggggttatttctacaacatggcatttaattttagcgtaagagaatttaataagcggctaaaacgggattatattaccagtgctagtgcagaagattttagcgtaagagaatttaataagcggctaaaactaaaatctttagaatctattccttttaagatatcgtctcgtgcgagcatctcatctatgcttatggacttcgccccaagagagcttaccaatacaagtacacaagagcgtttagaatccaattcccacctctagcatagcgct

SEQ ID NO: 3841 - DNA, 4428 bp, synthetic construct
  source 1..4428: mol_type = other DNA
  misc_feature 1..4428: note = Synthetic
taatctcataaaataatatacaataatgagattgtatattagaatcttggctaaaaggaacattaatgaaggtcttaggatttgatatagggattacaagcattggttgggcgtatgtagagggtaatgagttgcaagattgcggagtgagaatcttcacccaagcagaaaatccaaaaacaggagcacctttagcattgccaagacgggaggcacgaagcacaagacggagattagcacgtagaaaaggcagactttatgccttaaaacagctgatatgcaaggaatttggcttgaatgtggatgattatttaagcgatgatggagatttaccaaaggcttatatcaataccaaagacaccaaaagcccttatgaattgcgcactttagccctcacacaaagactagaacacaaagatttggctagagtgatattgcatatcgctaaacaccgcggctatgggaacaaacacgcaagggaaatggataatgctaagcaaagtgaaaatggcaagattaaggctgccattgaagcaaacaaacgtattttggacgaaaaaggctacaaaagtgtgggtgaatatctctataaaacattttatcagcaacccaggcagagccggcttccaaagttccttggaacgaagtgatagtgagaaaaaaggtagcacaaatagtaaagaatttcaaaatgtgcgtaatagaggcgaaggttattatcaacgttgtgtggcacaaagtgagctcaaagcagaactagaactgattttgcatacacaaaatacattgggtgtgagactagctgagaatttttgccaaaaaattatagatattgccttttatcagcgtgagttaaaggattttagcgataaggtaggtaaatgtgtgttttatgaggaggaaaatcgtgcagctaaaaatactctaagtgcgatggagtttatcgtccttacacgcattattaacaccttgcaatctatcagtaagcaaagtggtgaagtctatggtaaagatatgattacacaaattttacacatcgtgcttgaaaaaggagagataaactataaggcattgcgtgagatattgcaattgcctgaatctatgcgatttcctaaagattctaaacttgattatactaaagagttaagcgtggcagaaaaggcggcatttattgagtttaagaattttaaagcattcaaaaaggctttgagtgggagctttgatgggcttttacgtatggatttagatgagatagctacatatatcacgctcattaaggataagatcaagctaaaaagcgccctagagcgatatgctctcgctgatacacaaaaagaatctttaagcacactaagctttgcagggcatattaaccttaaggcattagagcagattctgccttttatgcgggaggggttaaaatacgatgaggctgtgcgacaagcgggactaaaagaatggagaaagagggcgcaaaaagataatctattatcaccgctcaatgaatatgaaccttatttggcaaatcccgttgtggcaagggcgatgagtgagtatcgcaaggtgctaaatagcttacttaagaaatatgggcagatgcataagattcatattgaatttacacgtgaggtaggcaggagttttaaagagcgaaacaatattataaaggagcaaagggaacaatttgctaaaaatgagaaggcaaaaaagcaatgtgagattctagggctgccccttagtgcgataaatattcttaaagtgaagctatggctagagcagggggagttttgcgtgtatagtggggagaaaattactagagcgcatttacttaactctcaaatactgcaaattgaccatatttacccttattcgcgtagttttgatgatagctatttgaataaggtgctttgctttacgaaggaaaatcaaaataagcacaacaagacgccttttgaagcctttgggggagatacaaagaaatgggagcaaatcaaaagctactcgctgaagctccccaagccaaagcagcgcagaatctgcaatgaacattttgtagaaaaagagagtggctttatccctaggaatctcaatgacacaagctatattgcaaggctttgtgcgaattggacgaaggattgcttagaatttttgcctttaagtgaaagtgaagtaaccatctccggagaaaagggcagcaaagtgcatatagaggtagtaagtgggaatctcacggcgatgctaaggcattattggggattgggggaaaaagatagggataatcacctccaccacgcatttgatgcgattattattgcctttagtaatgcaaaaatgattaaagcttttagcgattttaaaaagcagcgagagctgaatagagcgagattctacgccaaagaaatggcagaggctgactacaaaaagcaaaaagtattttttgagcctatggcgtattttagggaaagggtattggcaaaggtggattctatctttgtttctaagcctccgcgaaaacgtgctagaagggcattgcacgaggagacattttattcttttggtgataaggctttaatgaaacaatatggcggacaaaagggtatagaaaaggcaatagcactgggcaaaatccgccgcattggcacaaaaatcgttaaaaatggcaatatggtgcgtgtagatattttcaaacataagcaaaatggcaagttctatggtgtgcctatctatacaatggactttgcattaggaatcttgcctaataaagcggtagtaagcgggaaagacaaggaggaagtcattaaagattggctagagatggataattcctacgaattttgctttagcctctttaaagatgatttaatcttagtgcagaaaaaggatatggaaaaggcagaattatgctactttgtaagctttgattctgctttagcacagattcaagttgaaaagcataataataaacttgagggcttaagcgacaatgaaaagctgctttataccaatgcgacaaaggaaaaagtcgtgggaaaaagcatagggattcaaaaccttaaaatttttgaaaaatatcaagtatcctctttgggtgaagtgcaaaaggcagattttactccgcgccaaaatatcgcgcttaaattaagtccaaaatataagaaaaggggctagaatgtttgattctgcctttaggacacttttcttaagcactcctgcaaggcttagcctctatcaaaaacacctttgtatcgcacaggagggtaaagatgaggtcaaaatccctcttaatgatattttgtgccttattttagaatctcatcaaattaccttgacaaatgcgctccttgacgctcttgcacaggcaaaaatcatttgctacacttgtgatagctctcacttgcctagcggtatctttatgccatttttgggacattttaaaagcctcactatcttacagcaccaaattcagcttagcaaacaagctaaggcaatactttggcagcacatcatcaaatcaaagattcataatcaagccttgctcctacaaatgcaacaaagagaagagtttaaagcattagaatctctagccaagggagtgaaactcgcagatagcactcataacgaagcaaaagcagcctctctatactttaaggcactttttgggaaagactttagccgcaaggtgcaaatctttgaggatacgcagatagggcttataaatgctgcgcttaattatggctatgcgattgtgaggggtatgattgtgcgaagtctttgtgcgagcgggctaaatcctgcattagggattaatcataaaaatcaatttaacgcatttaatcttgctgatgatctgatagagccttatcgtgtttttgtagattcacttgtagtagagatgtatcaaggtggggagcttgacacaaccttgagtcttgaaaatcgtgtaaggttagcaggggtcttaagtgcagcagtgatggtagaaggcaagtgctatccgcttaatcgtgggagtgtgatgagtgtgcagagccttgcatctgctattcaaaaaagcacatttaccttaaggctaccaatattttgcaaggacaaatccaatggaagatatatttatgagagtgctagtgatgtttgatatgccaacatacaccaagaaagagaggaagctttatgctaagtttcgcaaatatcttatacaagatggttttataatgcttcaatacagcgtatatatgagaatctgtaaaggtgttataagcgctaatcatcatttagataagataagtcttatcgtacctcccaaggggcacattcggggtttaatcctcacagaaaagcaatttgataatatgcggcttttacttggcaaaccaaatgataaccaaaaagccaatgaacctaaacagctcacgcttttttgatatgtct

SEQ ID NO: 3842 - DNA, 23882 bp, synthetic construct
  misc_feature 1..23882: note = Synthetic
  source 1..23882: mol_type = other DNA
gaagtcccgaaagtacaaagagcatacaaagcagctggtgtcccttcaattgttgtgggtgaccataattacggtgaaggttcttctcgcgagcatgcagctatggaacctcgtttcttaggggtgaaagcagttttagtgaaatcttttgcacgtattcacgaaacgaatttgaaaaaacaaggaatgttagccttaacttttgctaacgaagcggattacgataaaattcaagaagatgataccattaacttcttagatttaaccgaatttgctccaggaaaaccactaacattagagtttgtgcatgctgatggttcaaaagacattatcatggcaaatcatacgtataatgatagtcaaattggttggtttgtagctggttcagctttaaacttaattgcagctggtaaagcttaatagcaataactaaatagtaaaaatgcgtttgtgataagcaaacgcattttttttgaaaataacttaacgatatatttccaattggttttagaaattacatattcaaaattcagcttttcagtttcaccatgataggcaacattaatttctctaacttttattgctcctaatcgctccattgcaatttgcgaacgtatattttctgtaccaacgtgaaaatatacatgatcaataaattgaaaagcataatctaacatcattttctttatcattggattgtactttgagccccaatagtttctcccgtagaaagtatagccaattagaacacttttttcgtcaggattccaatcgtaaaaacgcgtacttccaatgattgcattggtttctttatccacaataataaaagctcctttagaaagtaaagcaccattaaaaaagttttgaaaaacagctttttggtagcggtttttattgggatgttgttcccaaatcaaaggatcagacgccacatcatacagcgcttcaaaatcggaagcttgcaaaggaataagttggatggtatcgttttctaaaaaaggttgtaagttcatgattggctttttgtaaaaatacaaaatccgtctcaattgctcaagacggatttgttaaatgctatttttatgactactagtagtacatatatcttcttacttttgcaatgtattttgccaaacgaattacttggtggctataaccatattcgttatcataccaaacatacataaccacgtttttaccatcggcagaaacgattgttgcattgctgtcaaaaattgctggagctgatgttccaacaatatctgaagaaaccaattcgttgtttaaagaatatttgatttgctctactaaattaccttccaatgcatattttttcatgattgcattcaattcttctctagtggtagttttgttaacttctaaattcaaaaccactaatgaaccatttggaactggaacacgaattgcgttagaagttaattttccagctaaacttggtaaggctttagcaacggcacttcccgcaccagtttcggtgattaccatattcaaagcagctgctctaccacgacggtattttttgtgcatgttatctaccaagttttggtcgttggtatatgcatgtattgtttctaaatgtcctttaacaacacctaaagtttcttccattgccgctaaaacgggtgtaatagcattggtcgtacatgaagctgccgagaaaatatttacattatctgggttgtaatcgccgtgattaactccgtaaacgatatttggaactcctttcccaggtgctgttaataatactttcgaagctccttttgatgttaggtggcgacttaaagcttcttctgttgtaaatgctcctgtgttatcaattaccaaagcatcttcaataccatattgcgtgtaatcgatttcttctggaccatttgctgtaacaatgtaaactgttgttccgttgataattaaagcattattttctggatctgcatgaaccgaaccttcaaaatcaccatgaaccgaatcataacgcaatagagacgctcttttttctaataaaaccgcatcacttttatctctagttacaatcgctcttaaacgtaattgttgacctttaccaattttactcatcatttcacgagccaataaacgaccaattctaccaaaaccataaagcactacatcttttggtttgatttccgaatattcttttgcatgctttaatttgtcgattacaaaagcagtagcatcattgtatttatcgtcttctaaatggaattcataagttaattttccaatatcaattcttgctggcggcaaatccaaactctgaatagcttgtgcaatttctaccgaatcgaatacattgattggtttttgaacaaattcaccagcatattcatgtaaattgatgatatcactcacacttctgtcgattaattgatttctaaaaaggatcaattcgatagatttgtcgtaccataaatcactgatgattttaataaattccacgcaagctttccttctatctgcttgaaaagcaagttctttctcgtataaaacagtgttactcatgaagtagtttgtataaagtgttgtttgaaggtgcaaaagtaaagatttataatgttttagggaaattttttgcataaaaaaaccagtcgcatcggactggtttttgtggttttaacgtttttacatgataatactgtagcgttgtccattttgtgtaataatttgataacgcgctttcgtattttcttttcttgacaaataattggaaatcgtttcaacatctttagcctttacaccatctacgctaagaataatagctccttccaaagattctgcatattcaatataatccggattattcaattttttgattttaattccttcttttaaattgaatcgctttttatcgtcggtatcaatgtcttcaaattcaattccgttgaattcgtaattcaaaaattcttttttggttagttgtaccgaaatgtttttggtttttccttttcttaaaatggtaacttcaacaaaatcgtttggtcttttagtattcaaatgcatcgttaagtctgaaaaactagaaactttcttgttgtcaacggcaataattacatcacctttttcaattcctgctttttctgctcccgaatttttagtcacattacccacataaaatccttgggtttcattgatgccaatttctttcgagaaagcactgttcaattcgcgaccttcaacacccaaaacgccgcgttgtacgtttccaaattccattaaatcttcaataatttttcgagtcacattggaagggacagcaaaagaataaccagcataacttcctgttggagaagaaatcatcgtgttaattccaattaattcgccacgagtgttgaccaatgcgccaccactatttccgggattcacagcagcatccgtttgaataaaagattgtaagccttgattgcttaaatctctggccttggcagaaacaattcctgcagtaacggttgagtttaaattgtatggattaccaacggctaaaacccattccccaactttgatgttatctgagtctccaaaaataatataaggtaatttttcatcagcatctactttcaataaggcaatgtccattttggaatctgtaccaatgagttttgctttgtatgatttgttgttgttcatcgttatttctaactctgttgcattttgaatcacatgattattagttacaatataaccatcttccgaaatgattactcccgaacctgttccaatttgcgtttgctcttgattgcctcggtaaccataaaaatattccaatattggattcgatggcattcgagaaactgttacgtttttaacgtgaactaccgtgtgaaccgtgttttcagctgccgatgtaaaatcgattgcttccgctccaagattcacatttcttgaataattaggagcaaccgtggtgatgccattggtagtttttggctcaaaaaataacttataggctcctaaagtaattccgccacttaaaagcgaaataaaaaataaacttcctaacttcttcatattttttcgtttttactaatgataaaattacacactaaaatttaacaaaaaatcactttaacgctcgattaacaatgtttaacatcttattaatattcgtacttttgtgctagaatttgcaattatgaaacttaccttttacaaataccaaggcactggaaacgattttgttatgattgataaccgacaaaatattttccccaaaaataataccaaactcatcgcgcagttgtgcgacagaaaatttggcattggtgctgacggtttaattttattagaaaaccatccacaatacgattttaaaatggtatattacaattccgatggtaatgaaagttcgatgtgtggcaatggcggtcgttgtttggtagctttcgcaaagcaattggatgtaatttcagaaaaagccaaatttgaagccgttgacggttatcatttcgcaaccattgattctaaaaatatagtttcattgcaaatgattacagttgataaaattcaagtgaatcctgagtattcgtttttgaatacgggttctccgcatcatgtagcattggtagaaaacctaaaaacatttgatgtaaaaaccgagggagccaaaatccgttattccgatttatacggaaaagcgggaagtaacgtgaattttgtaaaccaattaaccactgacaaatttgcagttcgcacttatgaaagaggcgttgaagatgaaaccttgtcttgtggaactggagcaacagcagtagctatagcgatgcataaaaccaataaaacagcagcaaaaactatccaaattcaagtagaaggcggcgagttagcagtaagttttgatgaagaaaacggtgtgtattccaatgtgtttttgattggaccagctacttttgtgtttgaaggaacaattgatgtttaggattttcggatgttctgatttcggatgtttgatttttttgccacgaagacgcaaagtcgcaaagatttttttaattttttaatttcttaaatctgtgttccaaaaaatgagattttatattaagttgttggaatttggaatttaagatattggaatttataaatttgatttttttgccacgaagacgcaaaggcgcaaagatttttttaattttttaatttcttaaatctgtgttccaaaaaataagattttatattaagttgttggaatttggaatttaagatattggaatttataaatttgatttttttggaacacagatttgtgaaatttcagaaatagttaaaatcttatatgaacttttaacagcaatcaaatgtttcttaaaaaaaaacttttatgccttatatggtttaatattttgaacttgaacttgatttttttgctcgcaaagacgcaatccgaaaattttaatcaactttttgggactttgtgttaaactttgtgatactttgtgaaacaatacttgaacttgaaaatgaaaacactaacaggaaataccatctacttaagagcactcgaacccgaagatttggagtttatctacaacatagaaaacgacgaatctatttgggaaatcagtcatacccaaacaccatataatcggtttttaattaagcagtatttagaaaatgcgcatcaagatatttacgaggccaagcaattacgcttggtaatttgtgaaaaagaaacgcaaagtactttaggattgattgatttgtttgattttgatcctaaaaatcttcgtgctggcattggaattttacttcaaaatcccgaaagtcgtcaaaaaggttttggttctgaggctttggatcttgtaattgcttatgccttcacacatttgcagttgcaccaactcttcgcaaatattagcacagaaaatgaagttagtttggcactttttgctaaatttggcttcgaaactattggaattaaaaaacaatggaataaagttggaaattcctataaagacgagttgctagtgcaattaattaacccaaattcttaaattttgaacgcaaaaaaaatcttcactttagtagcggtttcaggcgtatttgttgccttggctatttccgcttatttgtattacatggcatttactgccaataccagcttcagtcaaaatgaagtctatgtgtatattccaacggatgctacttacgaaatggttttagaagaagtaaaaccgtttgtgactgatattgataagtttgattttgtagctcaaaaaagaaattacaccccaaaaccaggaaaatatttgctaaaaaaaggaagcaattcgtttgctttagttcgtgctatgtatgccaatattcctgtgaaagtggctttcaataatcaagaaaccattaatgatttagctgttcgtctttccgctcaattagaaccaagtgttgcaagttttgaaactgcttttactgattctacgtttttagcaaacaataatttgaacaaagaagccgctttagcgctttttattcctaatacgtatgagttttattggaatacatctgctcaaaaagtagcggataaattagcgaaagaataccaaaaattctggaatcacgaacgtttagctaaagccgaagccaaaggtttaacgccagttcaagtagcaattttagctgctatcgttcataaagaaaccgcaaaagtcagcgaaagaccaacagtggctggtgtttatttgaaccgtttagctaccggaatgccgttacaagcagatccaacagtgatttttgccatcaaaaaagaatcaggaaatttcgaccaaattatcaaacgtgttttttataacgacttgaaaatcaattcgccatacaatacgtatttgaatacaggtttgccaccaggattaatcgcaatgcctgatatttctgctattgatgccgttttaaatgcgccaaaacacgattatttgtatttctgcgctagtccagaacgcccgggttatcacgaatttgcagcaaattatgcccaacaccaaatcaacgctaaaaaatacagcgaatgggtaaataaattaggaattgaacgctaattttttgaaacgaatcgtcagtgtgtgtcagcaatccctattcctgctgtccgttacaattttttgtaaaatggtaacatttcacaaaaagatttccactaccatcagggttatggggctgactattggattattgggaagcttttgggctaatgcacaatccgatagtctttctacttcttttttcaaaccgtcagatacactcaataaaccacgtagaaatgcagtgtatattggagaatcagtagttttgggagctacattagtgggtttgcatcaaatttggtacaaagattatccccaatccaatttccatgtcatcaacgacaacaaccaatggaaacaaatggataaaatgggacatttttattccacgtatcatttaggaagagcaggagcggagttgttgcaatggagcggtgccagtcaaaaagagcgattagtttatggtgctggaataggattcacatttctaactgccgtagaagtcttcgatggattttcacaagaatggggtttctcttggggcgacatgctagctaacgcatcaggaaccggattatatattggacaagaattactttggaacgaacaacgcattattccaaaattctcttttaaccaaacgaaatttgcagcacaacgcccagaaacattgggaagttcgtttcaagaacaaattctaaaagactacaacggacaaacgtattggttgtcgtttaatttgcatgcattcactaaaagtgatttttttcctaagtggttaaatctagccattggtcacagcgctaatggaatgctttacggaaataccaccgaagccaatttgaatggctacaagcaaaaagcctatcgtcaattcttgttgagtttggatgttgatttgacgaaaattgaaaccaactcccattttttgaagacactttttagtgtttttaacaccattaaggtacctgctccagcacttcaactcgatgagtttaacggacttagagggcactttatctacttttagaaaaaattaacacactgtaaatcaatactataatatttttcgtatctttgcctcgctaatttcagatgggtgacagacgctgagaaaacaaaaaatatgataaaaaaaagttcttattttttaggaattggaattcttgttttagtagtttcatcgggttttaactcgtttaaaattgaaaaattagaaggatttcatttggaagatggagagacaatcgtttaccatgttccttccgaagaagaagaagttgaggaaacagttgaaaatacaattgctgttccttacgtaggtaagacatatgcaggttttaaacaagcaatggcttatagagaatcaagaggaattttacatttagtaaatccttatggttacatgggaaaataccaatttggaagaagtacattacgaaccattggtatttatgattttcaggagttcttaagaaatgccgagtggcaagataaagcgttcagagctttattagaaaaaaacaaatgggagcttcgtaaagaaatcgaaaagtattctggtaaagtaatcaatggtgttcaaattacagaatcaggattattagcagcagcgcatttagcgggagctggttcagttaaaaagtacttaagaagtaatggttctaacggatttaaagacggttttggaactagtttaagaagttacattaaattatttaaaggctatgacgtttcgcacatagaagcggatgccaatgcaaaagtgcttttagactaaaaattacacgagttgtaattaaaatttatggataataaaaatgcaaggtcgcttatgtaagtcgaccttgttttttttccaatcgtttaccgttagcgtttttatgaattctgtgggtaaggtgatatcacaagccacacaaatatgggtgttgggctgaagtgttgccaacatatcttcaaaaattttattgtttcgatacggtgtttcaataaacaattgcgactgatttttttcaaaagaaatgcgttccaattgttttaaggtgcttttcttttcgctagcatcaatgggtaaataaccgttaaaagtaaaactttgaccattcataccgctagccattatggctaataaaatagaacttggtcctactaatggcaccacttgaatccctttttcatgagctaattttacaataacagcgccaggatcagctatacctgggcagccggcttcactcattaaccctatatttcttccttctaaaagaggttgaatcatattttgataatcggcaacctcagtgtgtttgttgagtaaagaaagtcttaattcggcttgttttttatcgggagcaatgctctttatgaattttcttgcggttttgtcgttttccacaatgtaatcatcaatgaaatcgatacttcttttaatagtttgcggcattacatcttcaggattcatttcgcctaaagtggttggaataagatataatttgcctaaaaaagtgatgggtttcatgggattttatttattgcaaaaatacaaataaaaaaagtcccaccgaagcaggactaaagattttcatctacggcatatagccttattgtgataagattaaagatttgaaagtttaatctgttgcaaattaaatacatttattgttaatttgcaaattaagataaacaattcgagagtgtttggacttttgttaatgatacaaaatctaattacttttcaactaggatattttttctagtcattttaatcaaattatttataaaacacctttgcagaggtgtttttatttttcaaatcacaattttatacaaataatacataaattaggattctttatacaaataaatacattattatatagcaaagatattttttttatttatatttggactataaaaagaggaaaaaatatcaattattttgtaaaatattcattatgagcggtttaaaacttggattagatttaggaacgaatagtattggatgggcaattcgagacacaaataaaaaaggtaatcaaattattggtgctaatgtgattgtgtttccacaaggagttggagaagaaaaaggagtggaattttctttggcttctgaaagaacaaaacatagagctttaagaaaattatataaaagaaggaaaaagagaaaaactgatttattaaaacttttaatagaaaatggcttttgtcctttaaccaatgatgagttattgctttggtctgtttataaaaaaggacaggaaatgagatatccaacagggaattatgatttttcagaatggataaaaattaatccttatgaagtaagagcaaaagcagttaattctattgtttcaaagttagagttaggacgtgctttgtatcatatgtgtcaaagaagaggctttaaaagcgggcgaaaagatgctgatgctggaaaagacttaattcaatttcaaaaagaaagagagttattagaaaaaaatggtttcaaaactttaggcgaatattactttgatttacttgtaaagggtgaaaaagtaagaaaaacaaaatttagtgccgacgatcaagaggtgaattcgtcacgaattagttatgttgaagaatttaactttttaatgaagagccagaacattgagaaagaattagcagataagttttttgatactatcttttttcaaagaccattaaaatctcaaaaagggtcggttggtaaatgtactttagagaaaacaaagtcacgctgcgctataagtcatccattgtttgaagagtttagaatgtttcagtatttgaattctattaaaattaaagagagaaacagcgaaaagtttatttttctgtcagaatatccagaatattataaaatagccgaagataagttctatagacttagtgccaaaaatttcaaatttgttgatatttcaaaaggtattaataatcaagcaaaaaaagaaagtctgttttttgagtttaattataatgataaatacccagttgtaggaagcccaacggttagtaagttgattgaggtttttgatgcggaaaattggaaggattgtaaaagaataattcaatcaaaatataaaaaacaagacaataaaagtgttgatgaattgattgatgaactttggcatacactttttttttcgggagattttgttaatgatgttacttcggataaaataaaaagttttattagaaaccgtttttcgatttctgaagaaaaagtaaattactatgaaagtataaatttaaaacaaggctattcttcgttgagtaaaaaagcaattgtaaagattttaccttatttagaagaaaaaataatttatccgtatgctgttttcttcgcaaatattgatgttattattggaaaagaaaaatggaatgaaaacaagcaatttattcaggatactattattgatattatttcgagatataaagatgaaatattaaaaattgatattgttaatggtttggttggtgattttattaaagaatacgacaattccaattatgattattttctggacgaaacagatagaaagaatgttttagaaaaaatcaaagttttttatggaaaatatctttgggataaaatgtctgaacttgaaaaagaagcacttcagaatgaaattgaaatcacttttcaaaaccagttacagaaaagaagagttggaggatattatttatctaaaccaagaatagatgaaatcatcaaagactttttaattcaagaatataaagtttcaagagaacaagctgataaattgtatcatccatcagcaatggatgcttatccgcaaagtcaagatggttttttagggttgccttttactaattcgattaaaaatccaatggcaatgcgaacactgttttatttgcgtaaattggtaaatacattattaaaagaaaagaaaattgctccagatacagaaattattatagaattagctagagaattgaatgacaaaaataaaaggttggcaattgagagatggcaacgcgaaagagaaagtgaaaataagaagtttagagaaaaattagaagaattagcaaaagataccaattcaattgtcaccgaaacagatgtaattaaatacagattatgtcaggaacagaataataagtgtttatacactaatgaaactattaattgcgaaaaattattagggtctaatcctcaatttgatatagaacatacttttcctagaagtaaatcatttgataattcattagttaacaaaacattggctgataaaaaattcaatcaaataaaaggaaatcaaattccacaagaattgccagatagatacaagcaaaatttcataaataatacaagccattggaaagaaacaattgaaaatttagaagagagaattgagcagcaaaaatatttttccaaagttgccagtactgttgagcaaaaaaatagggctatccagcaacgacattatttgaaattggaattggattattggaaacaaaaattatatagatttactgcgactgaaataaaacctaatttcaaaaacagccagttggttgatacaggaattattacaaaatattctgaattgtttttaaaatcgttattccaaagagtctttcctgcgaaaggaacaatggttgcagatgtcagaaaatcttggggtatagaagcaaaagacagaaactatcattatcatcacgctattgatgcgattgtgctttcgtgtatggataaaagtattcgtgatggattggcagaagcattcaaagaatcggaggagaatagatataatgataagtttaaaatcaaaaaaccttggaatacttttacagaagatgttaatcaattaaaaaataatataattgtagttcataatcataaaaatacgattgataaacaaacggtaaagaaattaagaaagagaaataaaattcaatatgataaattaggaaatattatctatgagaaaggtcaaggcataagagcatcattacataaagatactttctatggcgcaattgaaagagaaaatgaaaatagtgaaaaggaaatatggtttgttattcgaaaacctgttacaaatgcgttttctgatgctgaagtaaatgctattgttgacgaaggaattaaaagtagaattataaaacatggacttaaaaatgtaaaaactgaagaaggatggattttattgccaagcgaaaaggataaacaaggaaaggaaatcaaggaaatgttgataaaaaaaatccgggtaaaaacggctaataaaaatcttccaaaaataaaagcgcaaagtcatgttgctcaggggaaaagaaaagagtataaagaaagttattatgctactttagaaaatattttcgcaatggcaatttatgaaacggtgaatgataaaggtaaaaaagaacaagcttttaatactatttcggcttttgatttggcaaaacataatcaaggaaatgttaaattagaaatgccagtagaagaaaatgtttttaaaaataaaggaaaaaaaagtgaaattttaattccgttatctaaggttttaaaagtgaatcaaatggctcttttttatgaaaataatccagaagaattaaaaactatttctaacgaaagtttgagtaagcgattgtttaaaataacacaatttgaaagtgatggcagaattcaatttcgtcatcatgctcaaggtggagccgataaagatttaaaaaaggaatcttctttggattttgaaaaatcagctcaaaaattgaggattagtttaagtaatataaaggcaatttatgagggaaaagattttataatacatccttcaggaaaaattgattttttgatttagcaatattggtgtatatttacaccactaaataaaaatagtatggcacgtcaaagtatcactttagccaatcaaaacgatgaatggttaaaacaacaagtagcaaatgaagaatttaccagcaaaagtgaagctgtaaattatttgattaaacaagcacgtgaacaagatgcttatgtagagtttgttcgaatgaaattagagaaagcagaaaaaagtggttttagcacaaagactaaagaagaattattagcagaaattaagaaaaaattgaatgtatagttataaacttaatgttcaagctgaagaagatttgactcggatttttgaatatggtgttggtaaatttggattggaacaagcggagaagtattatgagatgttttttgaatctttttcctcgatagcattaaatccttttctttttcccaatgcaaatcattataaaaaaggatatcgctactgtgtttgtggtgtagataccattttttataaagtaaatggcgatgaaatcgaaatcatggcgataataggaaggcaaaatttttaaagttcattgacataaagtttttcaaaagcttaaacaactaaaaccacaacagagtttctgcgatagcgcactcagttgtggtttgattaaagatttgaaaacacgatattcattgtaattgacttgatgccaccagaaccgttgtggtttgattaaagatttgaaaacacgatattgccctttaaaaattgtggatggcgaacttggttgtggtttgattaaagatttgaaaacacgatattttaaaaaaagtcaacaatgcagttaatcaagttgtggtttgattaaagatttgaaaacacgatatttactccgtatttttcaacataatccaaccagttgtggtttgattaaagatttgaaaacacgatattaagttacaggatcataagccttaactctatgttgtggtttgattaaagatttgaaaacacgatattttggagttgaaattattaagcaaaccacccgttgtggtttgattaaagatttgaaaacacgatattgatttagaattgaaagttcagcagatttacgttgtggtttgattaaagatttgaaaacacgatatttaaagccgccttaatttgtggaagctctgcgttgtggtttgattaaagatttgaaaacacgatattaacgtaaacgaatacggaatcgtgcaagtagttgtggtttgattaaagatttgaaaacacgatattgaacgtaaccagttacaggaccatattcatgttgtggtttgattaaagatttgaaaacacgatattaagattaaagaggactacatcagacatgatgttgtggtttgattaaagatttgaaaacacgatattcgtgaattaggaatggcaacaggcgacaacgttgtggtttgattaaagatttgaaaacacgatattttgtttcggcttccattaatgctagttcagttgtggtttgattaaagatttgaaaacacgatattaacgatacatacaatgtgtggcggaaaacagttgtggtttgattaaagatttgaaaacacgatattttaccgattaaaaatattattgacatcgttgttgtggtttgattaaagatttgaaaacacgatatttcaaacgcaaactagaatcaggcggttatggttgtggtttgattaaagatttgaaaacacgatattcccgaaagaaatcactgatggcttttatggttgtggtttgattaaagatttgaaaacacgatatttaccagttccaacattgttttcgtcctctagttgtggtttgattaaagatttgaaaacacgatattcaagttctacagctacacgagttttaccagttgtggtttgattaaagatttgaaaacacgatattattctgctttttttagagtggccatagctgttgtggtttgattaaagatttgaaaacacgatattaaactcaccatcagcagtaagtacatcatagttgtggtttgattaaagatttgaaaacacgatattttgtacggcaaactgccaacataaccgaaagttgtggtttgattaaagatttgaaaacacgatattgaagtttatcagagtaaattcctagatcagttgtggtttgattaaagatttgaaaacacgatattctttgtttattccaaatccaccgccagctagttgtggtttgattaaagatttgaaaacacgatattatgttgaaggaactatctttaaaaacgatggttgtggtttgattaaagatttgaaaacacgatattgaaatattatcaaaccaaacattctcgacagttgtggtttgattaaagatttgaaaacacgatattaataactgattttcatctgctaaaggcaaagttgtggtttgattaaagatttgaaaacacgatattaaaaattattcaatcaagaggttgggataagttgtggtttgattaaagatttgaaaacacgatattccctaactcctttacctcatggatttgatagttgtggtttgattaaagatttgaaaacacgatatttacagatagttttattaacccatattcatggttgtggtttgattaaagatttgaaaacacgatattatgtgttataataaggcaacaaaaaaggtagttgtggtttgattaaagatttgaaaacacgatatttgccgacatacgattagtaaaagacgaaaggttgtggtttgattaaagatttgaaaacacgatattctaaaaatgtttgtattctgccatgttatggttgtggtttgattaaagatttgaaaacacgatattggacaactcaatttgcgacattaataggtagttgtggtttgattaaagatttgaaaacacgatattggcgacgcctttatcgattgactatcaataaattatcgtgtaatttgcaaataaaaaatgcttcttttttgtggtgataaggcaaaattgacgcattttttgttttctgtaatagtagctttgctattttaactaaaaaaagcgacttataaagccgctaattgtagaagctaggtaataccatgcttcgtttttgtaatgtattttcttggaacaacccgcgaacgtaattacaatacaaatatacaaaactagttgcaaattgaccttttttatattattgattttatgtactaaagtaacgagcatatttctgctatttttaaaataaataaatatcgttttttcttttttgtatctttgtaaaaataccttgattatgagagtagtaatagaagcagatagtcaatttaaaaaaatgttagaagaaattgctattgctataaaagctaaaataacttttgaagaaaatgaaactgatttttgggatgagttgccggctcatgttcaaaaaggaattttagatgctaaatctcaagtagcacaaggcaattacaaagtacatgaagatgtaatggaggaatacaaaaagcgttacaaataatgcaaattatttggtctaaaaatgctcaaattacttttgatgctattgtagtttatcttgaaaataattttggcaatactgttgcaaagaaatttattgccaaagccaattcaaacattcaagttattgctaaatttccaaatctttacaaagccatttcattaaaacaaagcgtaagaaaagcaaccataagtaaagtttgttctttttactatgaagtaaatgaagatacaattgttgttttatacttttgggataaccgacaagaacccattgatttttaaaataattctaattgggtaggttgtggtgcttttggtacttcggctttgccccaaaaatttaaaatattaccaaattgtttatcggttattcgtaagatgctcactttgcctaatggtggaagtaattggtgaattcttttttcgtgaacatctgcactttcgctactggcacaatgcctaacataaaccgaatattgcatcatagaaaagccatcttttaaaagattatttctaaaaccagaagcatttcttcggtcttttttagtttcggttggtaagtcaaaaaatacaaatagccacataattcggtatccatttagttccataatttgggatatttaattttctttctatcgcccgtgtaacattgttgtaaagaacttgccgttttttgtaatgctaccatcaacggacttttttcttctttaaaatacaccgttcgggttagaatttgcaataattcagcttttattgctgtgtttaattcttgttcagtatagttttgcattatttcagcaactttttcatcaacaattggtcggaaaggttccatgatatcatctgccaatgcgaatgcgttgtatttacttttatggtgaatgcctaaagtgtttaataagccacttcccgaaagtgctctagcggttgcagctcttaaaatagcataaccataatttaagaaattgttgggataatcgccaaatcgttctcttttgaaattgtgttcaaaaaatgatttccaataaaagttggctgcaacaccttccatatttgaagtatcaccgctcaatacttttgaagcaagaaaatcaaaattattggttttggaagttatgttttgaagtaatataccttgattggtaattttttccattacggtttgttgccaaagttgtttttttagtggaacacttgcattgatttgatttttaaaaatctcttgttggatgtgatggctgttgaggttcaaaaacatgccattaggtaaatgattggtgttgcaaatgataaccgcagtattgttatcaacaagtaaatttaatgctggaacactcaaatagatttctggatgatcaataacaatatagccaatatcttctatcggaatattggtttcacgcgtatcggttttaattacaagttgtaaatttttggtagtaagagaggctttgttttcgagtaaaattgatttttttagcatgaaaaaagagttaaaatttactctaatttactaaaaatcaatttaatggttattttttttttgattttcttacttgattaatcgctttgctatttgttcacaaacttcatctaataattgaaaaacatgttcaaatccgtcttcacctccaaagtaaggatctggaacttctgcttttttattgggtgtaatttcgtctaaaattagcttcacttttgattttacgatttcattaggtgctaattgcaatacattttgataattggattggtccattacataaatgtagtcaaaagtatgaaaatcttgaacttgaaattggcgtgcacgttggttcgagatatcaattccatattttgaagcgattttcatagaacgactatcgggcaattcgtctgcatgccaaccaccagttccagcagaatctacgtggaatttatctttgggtaatttggattgtaaaatgccttctgccaatggcgagcgacatatgtttcccaaacaaaccattaagattttagtagccattacaacgacaatttcttgttgatatcgtcaacgaattttttaaattgtttatcggtagtcaccaagttgtctacagttttacaagcatgcaatacagtagcgtgatcgcgatctcctatttgtgatccaatattagctaatgaagctttggtaaatttcttagcaaaaaacatggctaattgtctagcttgcacaacgtgacgttttctagttttagatttcaatgtttctaaatccaattgaaaataatccgatactactttttgaatatagtcaatagaaacttctcgttttacatttttaacgaatttttctactacttgtttcgccaattcaattgtaacttctttcttgttgaacgaagattgggctattaaagagattatagcaccttctagttcacgaacgttggatttgatatgtttggctacatattcaataatatcttctggtatttcaacgccatctctgtaaagaatgttttttaagatagaaatacgggtttcaaaatcaggttggttcaattcagcagacaatccccatttgaaacgtgataataagcgttgctcaatatcttgcatgtcaacaggtgctttatcagaagttaggataacttgcttgccattttggtgcaaatgattgaaaatgtgaaaaaacacatcttgtgttcccgatttacctgataaaaattggacgtcgtctataattaaaacatcgattaattggtaaaaatgaataaaatcatttctagtatttttcttaaccgaatcaatgtactgttgggtgaaaatttcagcagaaatatacaaaaccgttttttctggaaatttatctttgatttccacaccaatagcgtgtgctaaatgcgtttttccaagtccaactcctccaaaaatcaacaaaggattgaaagaagttccgcctggtttattggcaacagccatgccagcacttcttgctaaacggttggaatctccttctaagaaattatcaaagctataattggcattcaattgcgaatcaatgttgatatttcttattccaggtattatgaacgggtttttaagttctgggtttttttgaacaattggtacatcaacctcttgcatttttacagcttgtctgttgttgctaggaatttgttcagtaaatggaagtttattgccataagtgttttccatcttaattttatacaataactttgcatttggtcctagttctttggttaatgcaacttttaaaagttttacatagtgttcttctagccattcgtagaaaaacttactaggcacttgaatagataatgcgttatcgttaaggtcaactgattggataggttcaaaccatgttttataggcttgctcctgaatattatcttttataaaagacagacagttttcccatactgattgcgcagttttattcatagatgtaatttttatagttgtttttttgttcgattaaccaaggaagtcttacagagtagggtagactatcctcgtaaagtttgggatgacaaatatgtgaacaaaatattgtaaaaaaaaactaaatgcctattgattttttaaaaaaattattgtaagcctatagactctttttttaagaaatttttaagaatagtttttttgttgataaatatcttacaattgtgttttttgtcgattattgttttaaatagttattgtaaaaagtataaataaaaagaatgaaagaatatcaatttaccgtaagagtgcgttatgcagaaacggatcaaatgggagtggtttaccacggaaattatgcgcaatattttgaaatgggacgcgtggagtggctacgaaatatgggggtttcttataaatggatggaagaaaatggggtgatgcttccagtagtttctttgcaaatgaattataagaaacctgctcgttatgacgaccttttaacggttaaaactatttttaaaagtcaaacttcggttaagattgagtttgattatgaaatatatagtgaagcaggtgagttattaacaacaggctactcgatgttggtttttgttgatatgaaaacaggacgtccaatgttacctccaacgtatgtatcggaaaagttaattggtttataactcttctttttcttgaatggttatttcgaataaattttcaaaaatgtcggcaatagtgtcggcatttttttttctagtcttgatttcgatttcgcaactcaattccattttttgattgacaatgtctaagtttttttctttgatgatgcgcattactttgttcatgtttttataatcaaaatgaatcagaaaatgtttgtcgattgttttttcaatgatagtagcattttccaaagccatttgagcagccgttttgtatgcggaaatcaatcccccaactcccaatttcacgccgccaaaataacgaaccactaccactaaaacattggtaacatcaaacgattgaatttgtccgtaaataggcattccggcgctgttgttaggttcgccatcgtcatttgcccgatattgtattttttctgttccaatttgatacgcataacaccaatgacgtgctgaaaaatgtgcttttttaatttcagtaagtatattttttacttcttcttcattggttacaggaaatgccaaaccaaagaatttgctatttttttctttgaataaaacttcttctgaaggcgcagcaagtgttttgtaagtatctttttcgttaggattcatgctaataagttactaggaaaatagccaacaaagctaataaaattccaaaaatatttcgtttgttgagattttctttaaaaaaaagcatgcctactaaggatgttaatataacaatggaaatattgttaatcgtgaataaagtagcactttgaaaagccttggcttcaagcattttaattaaataaaacaacgaaaagtaattgggaattcctaaaataattcctcctaaaacatttcgtcctttgatttttgtttgttggaaaataattttataaccaattaaaaaaatccccacaatgaaggcaaataaaaacgttactgtggaaaaaattcctacttgattttctggtaaataatgactttgcaagtattttaaactagcatcaattgttcctgctccaacgaataccaatgttggaaaaagtaaattaccaaaggattgaacttctcctttttcttttttagatgtaaaataaacagcaattaaagctaaaattattccaccaatttttatactattcaatacttcttgaaatagtaaaaccccagagagaataggaataactacagacatttttgaagcaacagaagcaaccgacaagccatttttctgtgaagttattgcagtagcataaaaagttccaatgaaaagaaagccaagaaaaacacttccaattatccattcttgattaaaaatagatgaagaaaaggtttgattgtcaagaaatagtacaccaactaaaaaagcaactaaataattcacgactaaagcctgaagtgtatcaatgttgaattttgcaaaggatttaataatgacaaataaaatagcattaaaaaaaatgcttaaaagtaggtatagcactggattttatagtaagtttttttcgaataattgggttacatcttctttgccaacttgcaaattccaggtgacaaagcctagtttcttcgcagcatttatattctcttttttatcatcaatgaatagtgtttttttgggaattaaattatgattgttgattacaaatttgaatgcattttcgtcgggttttcttaaatgaatgtcgtaagaaaaatacactttttcaaaacagccataaaaatctctagcaaatgattgacctactttatgttcaaatttatcaatatgggtttgatcggtgttactcaacagaaataatcggaatttaccacttaaaagttgtaaaaactccaatcgatacaaggggaaatctagaagaatagcattccaagcttctctaatagctagaatatcacattttgcaatatgtttttgaatgccacacataaattccaattcgtcaatctttccgatttcgtattggtaatttaattgttccaattctggagtccattcttttaaacctaatttctttaattcacgaacggtggcttccttgtctaaattcaggaatacatctccaaagtcaaaaataattgcctcaatcataatttctgaatagtttaagttggtctttctccaataaaagactagttagaattctgctttttggtaattttggggaaattacaccttcattaaaactgttttcggaaacaaaaactctagcttcatcccataaatttgcatcaataaaggtttgtaaagtttgacttccgccttctacaatcacggattggatattttctttatataaaatatctaatgttctttttgcaagaagggtatcaaatatagtatttttataataaatattttgtttttctgttaaatttt

SEQ ID NO: 3843 - DNA, 23879 bp, synthetic construct
  misc_feature 1..23879: note = Synthetic
  source 1..23879: mol_type = other DNA
attggtaataaggttgttgaaaatattgttgatatagcttttgggcaattctatatcggcttcaatttttgaatggaaaatcgtgttatctggttttaaatattccagctcttggtagatattctccagacttttagaaagtgttattttgttcgggaattggttgtcaatatcccgaataaatttgtggtaattaatcaatgcgtttaatccataattgagattttcaacattggttacatacatactctccaattcaggtacatttaagtcgttgtttctcacagaatctttgtaataagaataaagctctttcagggcaattatgggctctcttaaattgtgtgaggtaatcgaggcaaaatcttccaaatacaggtttttttcattcaattcttcaacaagcaatctcagccttttattggtttcttcaatcttttttgattttagggaaatgtctttgtagtaatcaataaacttaaacgaataaagaaacatgctaatgaatatcgaaaagtttaagaataggaatataaagtattcgccagcagtgatgtctatgaaatttaaaaatgtcaggacagatacggttgtggtcactattatcggtcccaagaagaataacggaaagtaataaaatgggtgtgattggttaaatggaaggtgtttaagttgtaaacggcttatttttttaaccagcagtaattcaaaaatagaaattgagtttataaagaataagattgaagtgttccagcttaaagtcctaaagcctaaaatgtttttaaagatatctcctttgttgaataaatagtaaaaaatggcgaaggaagaaatgatgtaggttatggagtttaaggataaaaaaacactatttctatctttaaactttactaaataaagtgaagtatatatcaaaataaacataacaatagttatgagagacgatggagccaaaatttcaacttcagaaatatcaaaaaaggtgtagccaagctggatggcttgtaaagatagtccggatacaaataaaactttaaaggagccttctttgttaattagatatagcgcagccaatataatgaagcttatactggtaaccactttcatggtagcgtccgggtttatgctgtgaccagtaaaaaagttctcggtttgatgggtgaaccatgagtacacgttgattgcagcagttattaccgtaataagtactgtaaacttataagacagaagcgtgttgggctctatatattttttaagtgttttcaacatttattatcgtaatttacttgaaaaattacgataatatagtagagtaaacaagaaaattctttaattaaattgattttgaaagcttattctttcttatgtgagatgttgacgatagattttgttagtgacagattgttgcttggttaacaaataggctaaagctaagaaagctgaccagcttcattaaattcaaccttgctaacatcgtcaacaaaatgagcaattcttcgttctaaatcttttaaactaaccaacttgttgagattgggtttaatctttcctactttgcaaaaatgtgtattcataacgttcctttttatatgtaaaatacgtataaacgtcttatttagacgtgattggaatgttaaggaattgataaaagttaaattgtaactttttgaggatctcgatagaggtatttcagcttatttaatttattaagaagcttaatggccttgtactcagaaatgtcgctaagcgccgaatcggtttgcctaaaattataggcttgctcaactaaattcttgtactgttggtttaatttgtcttggcgggtttttattgggtctgtataatccatgattatctgaataacaataacttaaatatacatttttttgttgaaatccaaaaagccgcccttttcttttttcaatccatcaggcggaatcctcctttaaactgggaaagttccttgaaaaaaaagttattaacataaaaaaaaccgaacgcaaaagcctccggttttcagtttaatttatctagtatttttagtcctgcaaagcaaaaacctttcgtaataaatcggtagttctggaagatactttggttctaatttctttttcttcgatggcaatcatggtataaacgccctcaagcgcttctccggttacgtaatcggttaaatctggattaacattgttggtaaaaggaatgttgttgtacctggtaataagattgttccaaattttgtcggcacctactttgctaaacgagtttttaataacaggattaaacttgttgtaaagggcggtttccgttttattggttaagtagagtgttgccgcattgtcactacctagtagaatgtttttggcatcggcgaaggtaatgtcttttacagcgtcaacaaatatcggggctgcctcttttacggcatcttcagcagcgcggtttagcacttttaggccttcatcggctaagttgcccagcccaatatcgcgaagggttttatctactttttgcagttcttcggggagtaaaatcttaaccaattcgtttttgtaaaatccatcggtttgcatcagtttggtcacttgtttgtctatgccaaaattcaacgcttgtcgcagtccggaagcaatttggtcgttgccaatggttccgccttggggtaattggcttaccacttgttggagttcggcgcaggccgaaaggttaaaaataagtacaagggcaaaaagtttacgaatcatgattgtaggttttaaatttttaggaataggtgttttttaactatgaaaagataaccgttttgttgttatacaccataacctttctgttggaatgcagtttaacggcattggccaaaacgattttttcgaggtcacggcctttggttattaaatcggaaatggaatgggcatgtgtaacccgtgttacatcctgttcaataatggggcctgcatccaattcttcggtaacataatggctggtagcaccaatgatttttacaccgcgtttgtatgccgaatggtatggcttggcgcccacaaaagcgggtaggaacgagtggtggatgttaataatcttatttgggtatttgtcaataagcttgctggaaacaatctgcatgtaccttgccaaaacaataaaatctatttggtgtttttccaatagttccagttgtttattttcggcagcctctttggtgtctttggttaccggtatgtggtgaaacggaatattgaaactatctgctatgggtttcaaagtatcgtgattactgataatgaaagggatttcaaggttaagctcaccagagttgtaacgccctaaaaggtcgtataaacaatggtcgtacttagaaataaaaagcgccattttgggctttctttcagaggaatagatgcgccatttcattttaaagcgctcggcgatattggctttaaattcagccttaaaaacttcggtattaaatgaatctgattcaaattcactttccaaacgcataaaaaagatgttctgttctctatctacatgctgatcgatataaacaatatttccttgattcccagcaataaagttagtgaccgaagcaataatgtatgggcggtctttacagtgtattaaaatggtgattttattcatgaaattcctatactttatgggctaaaaataaggcaaaaataagtgaggaatggttttagaacatggttttagaaaattttttgaataccgatggtttttttgaatatttcgtaaattgcaatagtaataattaatgttttttacgaatgaaacaacaagagccctataaaccgaaacatcatgtaagaatagtaacagccgcttccctttttgatgggcacgacgcctctataaatattatgcgccgaattatacaagctactggggtggaagttattcatttggggcacgaccgaagcgttgaagaagtggttaatacggctattcaggaagatgttcaagctatttgtttaacttcttatcagggtgggcacaccgaatattttaaatacatgcacgatcttttaaaagaaaaaggggctggacacattaaaatttttggtggcggtggtggtgttattttgccttcagaaataaaagaattgatggagtacggtatagctcgcatttattctccagatgatggtcgggaaatgggcttgcagggcatgatcaatgatttggttgaaagagcttcccccaacccatccgaaggaggggagcatatagtgccccacaattatgatgcttctaattttctgaatcttgctcctgaaaaaatactggataaattaaaaaataaagacaataatactattgctagattaatttctttagctgaaaataatcacaaagatttcaaggcgttgttttcaagcttgagtaagggttcccctcctttggaggggttaggggaggcttctcccgttctaggcataaccggcaccggtggtgcagggaaatccagtttggttgatgagttggtgcgtcggtttttaaaggattttcccaaaaaaacagtgggaatcatttctgttgatccttcaaaacgaaaaaccggtggagcgcttttgggcgaccgcatccggatgaatgccataaacaacccgcgggtttacatgcgcagtttggccacgaggcaatctaatttggcattgtctaaacatgtaagcgaggccattcaggttttaaaggctgcggcattcgatttaattattctggaaacctcgggcattgggcaatccgataccgaaattaccgaacactctaatgtgtcactttacgtgatgacccccgaatttggagcagccacccaattggaaaaaattgatatgctggattttgccgatttggtagccattaataaatttgataaaagaggggcgcaagatgcccttcgcgatgtaaaaaagcaatatatgcgaaatcataacctttgggacgtttcgcaagacgatttgcccgtttttgggactattgcctcacagtttaacgatccggggatgaaccatctttatcaagctattattttaaaactgaatgaaaaaacgaatgccaatttaaaatcctcattttcaatttcaccagaaaacagtgaaaagctttatatcattccgccgtcaagggtacgttatctctctgaaattgctgaaaataaccgcacttacgatcaacaagctaatgagcaagttgaagttgcccaaaagctgtatggtatttataaaacgatagaatctgtatccaacattatttcgagtgaaacgaagccatctttccttaataagcatgggttaaatagtgatgagatttttcggcaagcccagaatgacaaaaatactgttgattcgagcacagtcgagaacaaggagtttttaaagttgcttttcaaagaattcgaccgaataaaacaacaactgaaacccaaacattgggaaatgattttggaatgggaagataaactgaatcgctacaaaaaccctgtgtacagctttaaagttcgcgataaggaaatcaacatagagacccacatcaaatcgttgtcgcacacccaaatcccgaaagtggctttgcctaaataccaagcttggggcgatattttgcgctggtgtctgcaagaaaatgttccgggagagtttccgtttacagcagggctttatccttttaaaagaactggtgaagatcctacccgaatgtttgctggcgagggtggacccgaacgtaccaataggcggttccattacgtgagtgcagggttgcctgccaagcgtttgtcaaccgctttcgatagtgtgacactttatggtaacgatcccgattatcgcccagatatttacggaaaaataggcaatgccggagtgtccatttgttgtctcgacgatgccaaaaaactgtattctggttttaatttagccgatgccatgacttcggtgagtatgaccattaatgggccagccccaatgttattgggcttttttatgaatgccgctatcgatcagcaatgcgaaatttatatcaaggagaatggattggaagatgaggttgaaacacaaatagccaaaatctataaaggtaaggaacgccccaaatacaacggagctttgcccgaaggtaacaacggattgggattgatgttgttgggcgtaacgggtgaccaagtattgccagctgaagtttacaacaaaattaaaaaagcaaccttgtcgcaggtacgcggtacggtacaggccgatattttaaaagaagaccaagcacaaaatacctgcattttttcaaccgagtttgcgctgcgtttaatgggcgatgtgcaggaatattttattcaaaaccaagtgcgtaatttttactcggtgtccatttcgggttatcatattgctgaggcgggagccaaccccattacgcaattggcgcttactttatccaacgggttcacttacgtggaatactacctaagccgaggtatggacatcaacaaatttggtcccaacctgtccttctttttttccaacggcatcgatcctgaatatgccgttattgggcgtgtggcaagaaaaatatgggccaaagccatgaaatataagtacggtgccaatgcccgggcgcaaatgctgaagtatcatattcagacttccggcagaagtttgcacgcccaggaaatcgattttaacgacatccgtaccacattgcaagcactatatgcgatttatgataattgtaactcgctgcacaccaatgcgtatgatgaagcgattaccacgccaactgaagagtcggtgcgccgcgctatggccattcagctgatcattaataaagaattaggcttggccaaaaatgaaaaccccattcaaggcgcgtttattattgaagagttaaccgatttggtggaagaagccgttttattggaattcgataggattactgaaaggggaggtgttctcggtgcaatggaaaccatgtaccagcgtagtaaaattcaggaagaaagtctgcattacgaaaccctcaagcacagtggtgattatcccattattggtgttaatacctttttaagcagtaaaggttcgccaaccgttttgcccatggaggtgataagggcgacagatgaagaaaagaaatttcaaatagaaacgcttcaaaatcttcataagcaccagcagtcggaaaacttgttaaaatcgcttcagaaacaagccataaacaatgaaaatatttttgaatcactaatggaagtttgtaaggtctgttcgctggggcaaattacccaagcgttgttcgaagtcggtgggcagtatcgacgaaatatgtaagcacgatttcaatttagtggagctaagtgaaggctgaattgtgaatatcgcttaccctgagcgcagccgaagtatctcagagaacccatttttcttttttaggaaaaattgaacatcgactacttcgaaatttttcataaaacatgcatcttttttggaatatctccgtctattatatgaaccataaaagtaaatattatgaaaaataaagaatgtacttgcaattgcgacccatgtaaagccggaaagtgcagccaatgtatttgtgataattgtacctgcaccaactgtaattgttaagattgtttaaaaaccaaagataatagcattcgtatttgtaactttagtatggatgctatttctatgtaagccatgaaaacaaaagacatttggaaaacttattccaacgatataaaatattttattttaagtagggttaaagaccccgtagtaactgatgatttgctgcaagatactttcattaaagtgcacacaaaccttggatcgttgaaagataaaaccaaattaaaatcgtggctattttcaatcgcccgttatgcggttatggattattttaggggcaataacattgaggccccagtatgggaagccgatacagagtttgagtcgcaagatttggcccattccaaagcagattgtttgcacggtattctcaaaaacttgccaaaaaaatacagagagccactttttttatccgatataaagggacttaaacaaactgaagtagctgattggttgcaacgcccgttgccaaccgtaaaatctcaaattcaacgaggaagaaaactcgttgcccaaggttttatggattgttgcgattttaagttaaatgatgatggttttctagtgggcgaactcaaagccaaggaagattgtaaggtttgtcattaaagctcaataaatttagtgcccgtttcgtaaaacgaaatttttttcagtattatcatattgagaatttatataatgttttattgtcagaaatttaatgtaaaaaataaggtgttttagtatatttgtttagaaagcaagttgctagtttacatgcaaatattaaacgatattttacgagcctaccaaaaatggtatatcaattacagtggcctatttgatgaagaaagggaagacgacttgcctttttttagagacaaactgtttttatccattttatccttatccattgtattaggggctatagcgtatatacccagcgttatttttgccctgcttaatggcgattattacatatttattgtagatactcttggcatattgctactttactttatagccttcaataagtctgtggcgctccatgttaaaaagaatatttttgctgggatattttattttatagcattcactttattggtttttatagggcttcagggtaatggggctattgtagtttttacccccaatattttagttacactttacagcggaaggaggtctggactatattccgttggcctaacggcattaatttactgtgtctttctggtttgttcttattttcaattggtggatttgcccattttcagtcataacgattttaatttgatgtttatcgtttttgtaaacaacatcatctttaccctgtttattgtcttttcaatttcctatttaatagatatgttgtatgcatcattactgaagcaaaacaagcttagggaagagctcaatgaagaacacaaaaatctattggtggccaaagaaaaagctgatgaatccgataggctaaaaaccgcatttttggccaatatgagccatgaaataaaaacgcccatgtacggtatattgggcagtgttgatatactaaaaaactacaatactgaggacgccgaatatcaagaatacctaaaggcgatagaaaccacaagtttgcggttggccgatgtgatttcagatgtagtaaacgtatcaaagattgaaactggtttgatgaccataaatacgcaaaccttcaatatacaagacgccataaacgaggtgttaaagccttttgtgtttgtttcagaacgaaaaaatattgaaataaaaaaaaatataactacgagctataatgcaagtttagcgtataccgatagagacaaattagaaacgatactacggcatattttgcaaaacgcatttaagtttaccaataaaggttttgttgaaataggttgttctaaacccgataaaacgttttttgagttttatgttaaggattccggtattggcattgcaatggaagatattcaaaccgtattccaacctttttttcaggtagatgcagagcataaaaaagcgttgcacggatcgggcttagggttaagcttggccaaatcgtatgtggaaatgctgggtggcgaaattaatattgaaagcaaagaaaacggagggaccacggtgtggtttacggtttactctgattttgagagtattaaataaagaggtggtaaatggttaggtgaaatatgcctcaaaaaaagtcctaccgaagcaggactaaagattttcatctacggcatatagccttattgtgataagattaaaagattagaaatattaatctaatacaaatatagtagaaatatctggttaaaaaaatacgtgtttgtacgtatttttttgtttttgtaatctatgtatatttatagttttttaagaaaattatggcaaaaatattaggattggatttaggcaccaatagtattggttgggccattaggaataccgaaaaagaaggcaaccaaattatagataccaatgttttggtatttccgcaaggtgttggagaagaaaaaggcgtggaattttcattggcatcggaacgcaccaaacatagagcttccagaaaactttacagacgacgcaaacaaagaaaaacagacttgctcaaattgttgatagaaaatggatattgcccattgtccattacagagcttgaaatttggtccaattataaaaaagatagggaaatgaaataccctactgaaaatgaagcgttttcagagtggttaaaaatcaatccctatgaggttagggctaaagcagtacacgctactgtttccaaacaagagttaggaagagccttgtaccatatctgccagcgtagagggtttaaaagcggaagaaaagatgctgatgtagggaaagatttagaacaatttaaaaaggaacaagaattattaaagcaaaatggcttcaaaactttaggtgaatattattttgatttgctaaatcaagacagaaaagttagaaaaacaaaattcagtgccgatgaccaagaagtaaattcctcaaggataagttatgtgcaggaatttaacgaattgatgaaaagccaaggtgttggcaaagagttggctgataaattctttaatgccattttttatcaaagacctttaaaatcgcaaaagggaactgttggtaaatgcactttagaaaaaaccaaaccgcgttgtgccgtgagccatcctatgtttgaagagtttaggatgtaccagtatctaaactctataaaagttagggaacgcaatagcgataattttgtgtttctttcagaatatccggaatactacaaaatagctttagataaattttatagggttagtgccaaaaatttcaagtttttggatatttccaagagcattaacaaggaagcgaaaaagaacaatttgtttttcattttcaattacaaagacaaatatccaattgtgggaagcccaactattagtagattgattgaagtttttgatgccgaagattgggacgattgtaaacaaaaaataaaagtgtcctacaaaaagaaagacaacaaaagtgaagaagaattggtagatgagctttggcacaccttgttttttgcaggcgattttgttaacgacatcacttcagaaaaagtaaaaagttttattagagagtgttatgcgcttaccgaagataaaattgaatactacgaaaaaatcaatctaaaaccaggctattcctcgttgagcaaaaaggcaatcggtaagattttgccgtttctaaaagaaaaaatcatttatccttatgccgtgttttttgccaatattgatgcaataataggtgcagtaaaatggaatgacaacaaaacgtttatccaagacaccataatagatattatttcaaattataaagatgacaccttaaaaattgatattgtaaacggtttggtagacgattttgttaaagaatacgacaattccaactatgattatgtgcttgatgacaccgacaaaaaaaacgttactgaaaaaataatagctttttatggaaatgaagcatgggaaacaaagactgatgccgaaaaagatgcgcttcaaactgaaatagaaatcactttccagaagcaattacaaaaacgtagagttggaggttatttcctctcaaaaccacgagttgatgaaattatcaaggactttttggttcaagaatataaagtttcaaaagaagaagccgatacattgtatcatccgtcggcaatggatgcctatccacaaagtcaagatggctttttggatttaccgtttaccaattcggtaaaaaacccaatggcaatgcgtacgctgttttatcttcggaaattggtaaacaccttgttgaaagaaaacaaaatagcgccagataccgaaattattgttgaattggcgagagagcttaacgacaagaacaaacgtttagctattgaaaggtggcagcgcgaacgtgaaaatgaaaacaaaaagtttaaagacaaactagaagaatttgccaaggacaccaattcggtagtaacagaaaccgatattgttaaatatagattgtgccaagagcaaaatggtgtttgtttgtacacaagcaaaaccattaattgcgaaaaacttttgggttcaaatcccgaatttgaaatagagcatacttttccaagaagcaaatcttttgataattcgcttgccaataaaacactggcagataaaagcattaaccagataaaaggcaacaggattccgcaagaactggaagatgaatacaaacagcactttttaatgaacaccaaacattgggaagaaagaattgaggatttacgggaaaaaatagaacaacaaaaatatttttcaaaagttgccagtactgttgaacaaaaaaacagagctatacagcaacgccattacctcaaactagaacaaaactactggaaacaaaaactgtacaggtttacggcaaccgaaataaagcccaattttaaaaatagccagttggtagatacaggcattatcacaaaatattcagttttgtttttaaaatcactttttccaaaagtgtttccagcaaaaggaactatggttgccgatgttagaaaatcttggggattagacgaaaaagaccgcaattatcactaccaccacgctatagatgctatggtgttaagctgtatggataaaagcattcgtgatagtttggctcaagcttttaaagaatcggaagagaacaggtatagtaacaaatttaaggtgaaaaaaccttggggtacttttaccgaaaacatcaatgaccttaaagattccattattgtggtacacaagcacaaggacaatataggagtacagaccaaacgaaaatggcgcaaacgcaacaaaattcagtataacaattctggtcaagttatttttgaaaaagggcaaggtgtaagaggttcattgcataaagatactttttatggagccatagaacgcgaaaatgaaaataatgaaaaagaaatatggtttgtagttagaaaaccagttaacagttctttttctgaaagcgatgtgaaaagtatagttgatgaaggcattaaagccagaatagaaaaacacggactcaaaaacatacgaaccgaagaaggtttcattttactgccaagtgaaacagatgaaaaaggcaatgcaacacaagaaatgctcattaagcgcgttcgggtaaaaaccagaaataccgatttgccaaaaattaaagcacaaagtcacgtttcacaaaaacgcagaaagccctataaagaaagctattacgcaacacttgaaaacatttttgcaatggcaatttatgaaacggtaaataacaaaggcaaaaaaacattagcgtttaaaactatttcagcttttgattttgcgcagcataaccaaggtagtcccaaaatggaaatacctatagaagataatctgcttaaaaacaagggcaagaaaagtgaactgttattgccgttttccaaacttttaaaagttaaccaaatggctcttttttatgagaataatcaggaagagctgaaaacactttcaaataaagagttgagtaaacgcttgtttaaaattacccaatttgaaagcgatggtagaattcagtttcgccatcatgcacaaggaggagcagataaggatttgaaaaaagaatcttcattggattttgaaaaatcagcccaaaaattaagaatcagtttaagcaatataaacgcagtgtatgaagaaagggattttaaactgcacgcatcagggaaaatagattttctatcttagtctttttggtgtatatttacaccactaaatctgttaattatggcaagacaaagtattactctggcaaaacaaaatgacgaatggttaaaagaccaagtttcaaaagcagaattcaatagcaaaagtgaggctgtaaattatttgattcaacaagcaagaaagcaggaacaatactacgaatttgtgaggatgaaaattgaattaggagaaaaaagtggtttggccaaaaagcaaactaaagagcaaatgcttgcggagtttaaggagagattaaatgtataattatgatttaagcgaacaagctaaaatagatttgttgcgtatttatgaatatggtattaatcggtttggtatagaacaagctgatagatattttgatatgatgcacgattgttttagtaaaattgctagaaacccttatttatttccatctgtatcaaatattaagtcaaattatcacaaatgtgtttgtggcgtagacgctatctattataaaattgttaaaaatggaatagtgattaccacgattataggtagacaggactttgaaatacaaaatttagttcattgacataaaagttttagcattaatgcccaaaaaaaaacgacgcgagcgaagcgagcgttgtggtttgattaaagattagaaaacacgatatttggcagtagtacaaaataccttaatcggtagttgtggtttgattaaagattagaaaacacgatattgcatacaggccaaagcgcttcacgtaagtagttgtggtttgattaaagattagaaaacacgatatttcctttttaatcaacccttattaaacataggttgtggtttgattaaagattagaaaacacgatatttcaggcggtttaataaacaaccccttttttgttgtggtttgattaaagattagaaaacacgatattttcgctacttatatcggtgaaacaatagttgttgtggtttgattaaagattagaaaacacgatatttttaactggaaaaaacctaccgcctaccccgttgtggtttgattaaagattagaaaacacgatatttttggtattccaacgggtaaccaatttggtgttgtggtttgattaaagattagaaaacacgatattaccatattgcaatccagaggaaagcacaagttgtggtttgattaaagattagaaaacacgatattctattggttataatagtagcaccagcagatgttgtggtttgattaaagattagaaaacacgatattacgtgtctggagtcctcggcgtctactatgttgtggtttgattaaagattagaaaacacgatattgcgtttatggttggtatgcgttgggtgaaggttgtggtttgattaaagattagaaaacacgatattgttatgcgcacttaccgtaatatacatggtgttgtggtttgattaaagattagaaaacacgatattcaatacgaacgaacttcatactattttactgttgtggtttgattaaagattagaaaacacgatattatttggcttgttgtcttttgatattcagaaaaatacgtgtaaatatcgttttcaaaaatgcccgttttttgcagtgataaggcaagattggggcattttttggttttaaaacaactctaattgggtgggaggcggttctttgggcacttcggcgcgtccccaaaaattcatgatgttgccgtattgtttgtcggttatccgcagtacgctaaccttgcccaacggaggtaaaaggcgctttatgcgcttttcatgtacatcggcactttcgctgctggcacaatgccgcatataaaccgagtattgcatcatggcaaaaccatctttcaaaaggttttttctaaatttggccgcattttttcggtctttggccgtatcggtaggtaaatcaaaaaatacaaataaccacataatcctatatccgtttagttccataaatcgggatattttatggttttccgtttccccgaaaaacattgctgtagcgagctggccgttttttgtaaggcgaccatcaacggacttttttcatccttaaaataaacggttctggtgagcacttgcagcagtattgattttatttcggtgttgagctcttgttcgtcataatgtgctataatagtaaatacggcctcatcaaccagtggcctaaagggttccataatgtcgtcggccaaagcaaaggcattgtacttgtttttgtggtgaatgcccaaggtgttcaataatccactgcccgaaagggcacgtgcggtggccgccctaagaatggcgtacccatagtttaaaaaattgttgggatattggccaaaacgttcacgcttaaaatcttgttcaaaaacagatttccaataaaaattggcggcaacgccttccatattgctggtatctccacttaatactttcgagcttaagtattcgaaggtattgggtttgcccgttaccatttccaaaagtaagccttggttggttattttttgttttaccgtttgctgccataattgtttttttaacggaacactggcattgatttggtttttaaataattcttgctggatgtggtggctgttcaggttaagaaagagcccgttgggcaaatgtgtttttccgcaaatgataacggcactgttgttttctatcagcaagtttagggcggttatgcttatgtaaacttcgggattgtctattacaataaaaccaatgtcttcaatggggatgttcgaaatacgggcgtctgttttaatttgtaactgaaggtttttggtagtgattttgcttttgttttcaattagaagtgtttttttcaacatgacttatagatttactttgtaagttaaatattatgtatcgaaataataatttaacacgttgtagttcatattttatctacaaaaaaactaaaagccgtttttaagaactttaaaaatgggaaattatataagaagctatatccaagtcacgctaaatggaagtaagtcagtaaataaaatggggctttttcatttccaatggtttggggtttagttttatgtaagtcagtgtgttaaaagcacctggcaacccaaacattaaaatctttacctatggaaacaacattaaaatacacgtttaagagacgttcggaaaaccatttggattagttaattaacattgtaaaatctgaaaagcactatcaattggaagctagtattgttaacctaaaagcaggaatgtataatacataaaaacctagtgattataaatactaagcccctaattttttttaaatttctgggtttttgtttgtttttacgcaacccatttcagtttttgtcatcttaataaaaacttaacccaaagaaatgaaccgttttatctatgttattttggtgctaattttatgtggttgttcttccaacgataaccataaacccaaagaaaatgaaactttgttgggcaaatggaaactcattgagcaattaatggatccaggcgatggcagtggcacgttccaacctgtaagcagcaatcgggtttttgagttttttagtgatggctcggtaacggttaatggagatatgtgctatatcaccaccgaaattggcgatgaaaccacgggtacttatatcgaaactaatgaaagcgattggcatgacggtaaaataaccccaccagattgtagctttgagggggctaaaatatattaccaaatagagggcgaaaacttaattttgtggtaccaatgtattgaaggctgcggacaaaaattcattaaaatttaagccctcggaatatttaaagactaagtatccacgaacgttgaagctttttgaattttttcaactcgctgcgtaaaatgggtaaaaaatcttttccgttgctgttggagcgttccaatctataggagtttttataaagcttattggtcaactttctcaacgaagccaaatgtttgtgctttttgtcggaataacgctgcaattcggcattcaaaatctcgggagccaacgacaccgattgctgcacaatatcgcccgaaaagtagatgttttggtcttcagaaccatctgtttttaaaagcgataggtcgttatttaggtagtttgaaatgttttgcgacagtgcaaaaatctctaaggcttttttataaaccggtaaatccgataggtttgatggggtattgtgtaacataatctattccaaaaagcaattttatcaaaattactcacaagacaggagattcttctttagattttaaagtaaaattgtatttttggtttaatatttaagtttttcatattaattttcttttaaatgagtgtcgattcgattaacagcaagattttaaggtgtttgcagcaaaatgcacggatgagcaatgccgaaattgggcgtcaagtgggcattagttctccggccgtttcagaacggataaaacgtatggaagacttgggcatcattgaaggctataaagcgattgtttcgccgtttgaaattggctatcagttaaaagcgattatcactttacgggcttttatggggaaattaaaaccgtttttggaaaaagtgaaaacctacgaagaggtgataaattgttaccgcattacgggcgacgaaaatatagtaatggaggtggttttaaagaacaacaaacatttggaatcttttattgaccaactgattacttacggcgaatcgaaaacccaaattgtgctatcgcgcgtggtgaagcaaaaggaagtgattccaataaaatagacggtttctaatcaatacgccatggcggattttttctgttcttaccagcgtagtacaaaataatgtggttgccatcgggatcttgtagaagcgcttcacgccacagccaaggctggtcggttggcaaaacatcgaatttgaaccctttttcctgaagtttttttacccattcgtccaaatgttcttcttcaaaatagatagtgatgccgttacctttgggtgatttatcaacatggtggatggaaaacgtagcctcgccatcggggcattcaaaacggacataccgtggcatggactccacaataagccgcaaacccaaagccgtataaaaggctaccgatttttcgaggtttttagatggtatggttacttggtttaagttcattgggccattttcgtttcaatatgttccgtaatttgtttggcatggattctggagttttcaataaaccatttatgggtttcctttccgccacaaattaccccggccaaatacaggttttccacattggtttccatggtatcgctgttgtaagtggggatgcgctttccatcatccgaaaccgttataccgctatcggccaacaaatcgaaattaggtaggtagcccgtaagcgccaccacaaaatcgttggggatggccattgtaccgttttgggtttttataatcaccttttcaggttttatttcagcaatttcagaattaaaataggcctttatgctaccttcttcaatgcggttgatgatatcggggcgcacccaatattttacccgttcgccaatggtatcaccacgaaccaccatggtaacgcgcccacctttgcgccaaatttccaacgcggcatcaacggccgaattacttgcgcccaccacaataacgtcctgcatactgtaattgtgtgcctctttgtaatagtgggtgactttgggcaaactttcaccgggaacattcagtagttttgggatgtcgtaaaaccccgtacagatgatgacatgtttggctgaataatggtttttactcgttgtaattttaaaggattcggaagttttttcaactgaaactacgttttcataaagattgatatgcaattgattggaagtggttaccctacggtaatattccaaagcttcgtcgcggttgggtttggggttgttgcttataaacggaatggcgtcaatttccaatttttcagaagtcgaaaagaacgtcatgttttttggataattgaaaagggagttggttagcgctcccttttcaataatcaaataatcccattcacgttttttgcattccaacgcgcaagcaatgcctatggggcctccgccgataatgataatgtctctttttataatgtcactcatgttcaattaaagtattttcaatcaaaggttctactgatttttgccgctgtgcttttttcatattcaaataacgactcaagccaaaaagcaaaaatacacaaaacgcagccagtagggtaacgatgtaccaagtgttgtcgtagcccagcttgtcaaccaagcgcatgccagcgttgtgcccaaaaatatgggcgatggaaaaggcaatggaatacaatgccatatactcgccttgattgccttttttggcgcgatctaaagcaaaagcattggaataaggaaaggttatcatttcgccaacggtcatcagcagcatgcccaaaaccaaaacgccactccacggggtgaaattcagaattaaaaagctactgcctgttaaaatggcaccaaaaagcatcaatcccgttttggtgaatcgggtgttttccaaccactttatcaaaggcatttctaataaaaaaattaagaatccgttagtgcccaataaaattccgatttccaattcggttagtaaatgcgcttctttgtaatacagtggcatggttgaaaaatactgtaaaaacacaatgccgaacagtaccatagctaccaagaacatcaaaaatgctttgtcatcgtaggccgatttggggttgttgaccacaacttcgtccaacactttggcttttttagggtttaaaaccatcactaaaaccagtgtggcgataatgcaggtaatcccgtcaacccaaaacaatccgccatagctcaatgtggtaattatgagtccgccaatggccgggcctgccgaaaaccctaaatttattgccaatcgtattaaggtaaccgaacgcgttttgttttcgggtttactatatgcgctcaatgccacgaacatggccgggcggaacatatcggctaccagcatcaccaaaaaaatgccgaaacaaagactttcgaaagtatgcaaaaactgaagggcaataaacagaaatcctgtggccaataagctaaaagccattactttgtagtatcctactttgtcggtcattcggccgcccaaccacgacccgattaccgaccccaaaccaaaggcactcataatccatcccacatcgctaagcgaaaagtttaaactttcggtgaggtaaagcgacaaaaacggaataaccattgtgcccgcccggtttattagcgtaatgagtgccaaccaccatacctcttgcgataagcctttaaatgtgtttaagtaattgttgagtagccttttcatgagttataattgttctgtttttatttcacatatttttttgattagatcctgatatacatcaggattagttcaactaagtcaatttaatccgctagcttttaaattgctggtttcactaaaataaaaagtccgacgctgaggtcggacttttacatattgcattaatttataataacatcatcacaatatataacaagtccaacagcttcccttataagaagcggtccattgttttctgagaattgtgacgttactgcgcatgtttatttttataattgaactacaaacttatataaaatattttgaaattgtatttttgaaattaaaatgtttaaaaatgaagaaaattggcatcctttttttaatgctcatctgtctatcgggctgtgcgcaaaaaaaacgcccggtattgggtgaaaccgaatttcaaaaagaattgaatgccgattttaaggatgcttcaaaatcgccattaaaggataaagaccgaaagcattttgaaggattggacttttttaagttcgattctgcctatgtggtaaatgcccgcttggagcgaacacctaactccaaatggtttagtatgaaaacaactacagatagagtttcgcaagaacggatttatggtgtgttgcattttgaactcaacggcgaaaaatataaactcaatgcatatcaagggaaagatttaatgaaagaggaaggctatgagggttacctctttttaccgtttttagatgaaaccaatggactggaaagttatggtggcggccgctatatcgatgcccgaattccagatggcgacaccatggtcattgatttcaataaagcctacaacccgtattgcgcctacaacgaaaaatattcctgccccatagtgccccgcgaaaattatttaaaaacaagagtagaggctggggtaaaagcttttaggaagaattgatggtttttgcataaaaaattgaggttacaagccagaaagtatggcataatgagttgttaaaattttttaaccaattgattgtttttaagcctactttagtactaaagttaactatagagtactacattttgtttataataattgcatgtttgattttattgaaattattaaaacttgtattacatgtttgaccgttttgtactttctatatatttgttttatactaattataactctatgcaacgtgttttttgtctcatagtttttttgggtctgttttactgtggtgttgcgcaaaagaaagtttatcaatttacacacttgtctacagctgaagggttgtcgcaaagttcggccatagctatagaacaagacgatttaggtcagatttggataggtacccgagatggattgaatagatatgacggcagtaaatttaagatttaccgtaatgattttgatgacgaaagttcgctaagcaataacgatattcttgctatcaagcaggattctaaaggtttcatttggataggaacttacaatggtttgaacaaatataaccctaggtctgatacatttacccgatactttcacgaacaaaacaaggggtctttaagcaataataccgtatggactattgaagaaatgtccaatggagaaatgtggattggtacctcaaacggtctctcggtttataaccaagattctaatacctttaaaacgtatgtaaaaagtagttcagaagaaagtcttttaggtaaccatatactgtcaattttagaaacacgagaaggaacaatctatattggaaccacgtcggggttaagtgaagctataaaagacaataatggtaattacaagtttaaagcgatacccaaaacaacatcggtttatattcaagatgttatagaatcagagaacggtgaaatattaatggcaacacaatctcgtggcgttctttcatataatattgttagcaaaaaagtaaaaacatttcctattgttggagagaaaaacgacgctggtaaaaacgtaaggaggctattgtatgacgttaaaggcttattgtggattgggacctacaatggcttaacagtggttaagaacaataaagttgtagcgtccttgatgtctgacttaaacaatcctaaaagtttgagtaagaattccataaagtgtttgttcaaagacaaaaaaggatcgatatggataggtacttattatggaggggtaaatatttgggatgaatctaatgtgaattttataaactatgcccataaattagggaatagaggtttaaattacaatgtagtgagctcaatagcgcattatgacaatcttgtattttttggaaccgaaggtggaggtataaacatatacgataaaacgctacagtcgtttagttatattgaacaacgttccacaaaccaacttcctgacaataacataaaggctttgagtattattgacaaggacaaaatttggataggtacatttaatagaggacttgcaatttataacttgtctactaaaacctttgaaacaaatactttacccagtcaactgaaaagttttttaagtgatgttggtatttatagtattcaaaaagataaatatcaaaatgtatggataggcacctttggtaagggtattgtaaaatataaccaagcattacaaacatataatgtaa

SEQ ID NO: 3844 - DNA, 16272 bp, synthetic construct
  misc_feature 1..16272: note = Synthetic
  source 1..16272: mol_type = other DNA
taagatagtaccttttcgttacaatcttttgtggcgaaccccgccacaaaaggattttcactacaatcggggctagattcattttcaaaagtaacgctttcttaaaacaatattttcatgtcaaattttatcgatttaggtttaacaattgcttttgttgaaacgcttaaaagcctgaatatcaatactccaactgaaattcaacaacaagttattccacaaatcctacaagcacaacatgatgtagtaggcatagcacacactggtcacggaaaaacagttgcttttggtgtacccattttgcaacaaatagacgtgcaaaaccctcatgttcaagctgttatattagcaccaaccagagaacttggacaacaaattacgcaccaactacaacaatttgctcaacatcattcgtcaatcaacattttggctacttgtggaggcaatccaataaaaccacaaattgcggccttgcaaaataaccctcaaattgtggtggctacgccagggcgattgctagatttactcgaacaaaaggtactcaacttgcaacacgtgcaatttgtagttttggatgaagcagacgaaatgatggccatattacacgacagtttgaccaaaatcgaacaatatttgcccaaaaataaacgacagtttttgtttacagcaacatattcggggggattaaaacagttggtacaacaaaatttttcaaaaaatactgctattattacatcggttgtaggtacaaaaaccaatacaaacatcaaacaccattatgtaatagtagatccaatagaaaaattagcagtattattacatttattaaattcaaaaccaaatcaaaaaggaattattttttgtaaaacaaaagcagctgtcaataaattagccaaaaatttagccatcaaaaagtttacctcgggtgccattcacagtagtttgacacagcctataagagacaaaatgatgtcgcaatttagagcaggacatattcctattttagtagccacagacttggctgcacgtggtatcgatatagatgacatccaatatattgtaaattatcacttaccagatacgttagaaacatacattcaccgcagtggcagaagtgcccgaaatactcacaaaggcttggtttacaacattatacaagaagaggaattagcccaattgcaaactattgaaaaagcgattgagttgcccattttaaaatatgaaaaacctgacaataaaagtattgaagataataatacgatgatatgggccaaacaaatttttaaaaccaaacccaatcatcaaatatctaatgaattgaaaaacgacattaaaacaatttttcatcatttaacaaaagatgaattgattgataaaattttggcgaatcacttgcaacaaaacgctaaaaagtaaccaatatcaaagccaatgtgctccttttttggttattatcatttgaactataattaatattatgtaaaatagaaaattacttttatccattttgcctatcgcatgcctttcacatgatacagagcattgttacagatttattttaaaattatagttaaaaaaataaatacaattttataaagatagcattataaataataaaatgctttttttgaaaatttgtgtaactcaaaacttgatttttcacatgatttcaattataaatataatagtaaatttatatttacctaaatctaacttatttgattccattttttttatcaggaaatcatttgcaaatgtgaaatgagtctataatattgaatttatttatcttttatatttgaatttaatatttagctgtattttacaatagtataaagcaattgattaggagcttttttttatgagaaatggataaaaaaacagttgaaacaaggtaaaaataacacaataaacgttcctaaaacgctgcccccctcctactcttttagtggtattttattacaaaaaaaagtcccaccgaagcaggactaaagattttacatctacggcatatagccttattgtgataagattaaagattagaaatattaatcatgctgcaaatatataaaacatttttaaatgtatatagcgaaaaaactttttttttaaaatattttttccaatatatttacaaaaaatttgaaaacacaaaaatggcaaaaatattaggattagatttaggaaccaactccataggctgggctattagagatacaaataaaaatggtaatcaaattgttgatacaaatgtaattgtatttccgcaaggtgtgggtgaagaaaaaggagttgagttttctttagcttccgaacgaacaaaacatagatcatcaagaaaactttatagaagaagaaaaaaaagaaaaaccgatttattaaaaatattaattgaaaacggtttttgtccattgataattgatgaattgacaatctggtctgagtataaaaaagggcaagaaatgaaatatccaacaactaactttgaattttcagaatggttaaagattaatccttatgaagttagaaaaaaagctgttaatcaaatagtttcaaaacaagagttaggaagggctttgtatcatctttgtcaacgcagaggttttaaaagtggaagaaaagatgctgacgcaggtaaagatttggaacaatacaaaaaagaacaagagattttaggccaaagtggttttaaaactttaggagaatattattttgatttatttcaaaatgataaaaaagttagaaaaacaaaatttagtgcagatgaccaagaagttaattcttcaagaattagttatatagaggagtttaatatattgatgaaagcacaaaatgttagtaaagaattagctgatagtttttttgatgcaatattttttcagagacctttaaaatcacaaaaaggatcggttggaaaatgtactttagaaaaaactaaaacccgttgtccaataagtcatcctttatttgaagaattcagaatgtttcaatatttgaattctatcaagattaaagaaagaaaaaacgacaagtttgtttttctttcagaatatccagagtattataaaatagcaatggataaattttatagagtaagtgcaaaaaattttaagtttttagatatttcaaaaagcataaatacagcagcgaaaaaaaatagtttggtatttgaatttaattataatgataaatatccaattgtgggtagcccaacaatcagcaaattaatagaggtatttgatgctgaagattggactgattgtaaaaaaataattatttcaaaatataaaaagcaagataataagacatcctatgaattagtagatgaattatggcatactttatttttctctggagattttgtaaatgatgtaacatcagaaaaagtaaaaagctttattagaaatcgatttgatgtttcagaagaaagagttaattattatgaagccattaatttaaaacaaggctattcttcattgagtaaaaaagctattggaaagatattgccgtttttggaaaataaaataatttatccttatgctgttttctttgctaatgttgatgttataataggaaaagataaatgggaggccaacaaagagttcattcaagatactattgttgatattatatcaaattataaagcacaaacactaaaaattgatattgtaaatggtctagttggagattttataaaagaatctgataattctcatttggattatattttagatgaaatagacaaaaaaaatgtatctgacaagacaaaattattttatggtaagtatgaatgggataaaatgcctgacgaaactaaaaatgatttattgaatgaggttgaaattacttttcaagaacaacttcaaaaaagaagatttggtggttactttttgccaaaacctagagttgacgaaataatcaaagattttttaattcaagaatataaagtttctaaagagcaagccgataaattataccatccttctgcaatggatgcttatccgcaaagccaaaataatttattaggattgccatttacaaaatccattaaaaatcctatggcaatgcgaactttgttttatttaagaaaacttataaatacgttattaaaagagaagaaaattgcagctgacacaaaaattattatagaattagctcgagaattaaacgataaaaataaacgactcgcaatagaaagatggcagcgtgagcgtgaaaatgaaaataaaaaatatcgagaaaaacttgaagaacttgcaaaagataccaactctaaagtaacagaaacagatgtcattaaatatagattatgtcaagaacaaaacggtatatgtttctatacaaataatacaattaattgcgaaaaattaattggttcaaatccagaatttgatatagaacatacatttcctcgtagcaaatcatttgacaattcgctagctaataaaacattagcctataaagcctttaatcaaattaaaggaaatagaatacctcaggaaataaacgaaggaaattataaactaaatttcataaataacatcaaagattggcaaaaaaagattgatgaattagaagaaaagatagagcagcaaaaatatttttcaaaagttgctagtaccgttgagcaaaaaaacagagctatccagcaacgtcattatttaaagttggaattagattattggaaacagaaagtgtatcgttttacagcaacagaaataaaaccaaactttaaaaatagccaattagtcgatactgggataataactaaatattcagaactgtttttaaaatcattattttataaagttttccctgcaaaagggacaatggttgcagatgtcagaaaatcatggggtttaggaattaaagatagaaattatcattatcatcatgccatcgatgcagtagttttaacctgtatggataaaagtattcgtcatggtttggcagaagcctttaaggaatcagaagaaaataggtatcaagttaaatttaaaattgaaaaaccttggcaaactttcacagaagatgtaaataagttaaaggaaaatattattgtggttcataaacataaggataaaattgagaatcaaacaaaaaagaaattaagaaaaacaaatcatcttcaaccaaaagtagattttaaaaaggatgaaaaagggaataatattttggatgaaaaaggtataaaaataattgaaaaatattattatcaaacagataaatacggcaatttaatacctcaaaaaggaagaaaaatagatgtaaatgaacttactggaaaaattttgggtgttgattatttcaaatttgaaaatgataacctaataagttttcatgaatttgttatgaataaaaaaaatgaaattgtttacaaaaaagaatattattatgaaaaaggtcaaggaataagagcttcacttcataaagacaccttttatggggcaattgaaagagaaaacgataatgaagaaaaagaaatttggtttgttattagaaaacctgtaacaaatgcatttacagatgctgaagtaaatactattgttgacgatggaatcaaaaatagaattttaaaacacggtttaaaaaacatcaaaactccagaaggttggattttattaccaagtgaaaaagatggcaagggtaatgaaataaaagaaatgctcattaaaaaaataagagtaaaaaccagtaataaaaatttaccgaaaattaaatctcaaagtcacgtttcacaaggtaaacggaaagaatacaaggaacattactatgccactttagaaaatatttttgcaatggcaatttatgaaacagtcgataataaaggtaaaagaattcaaaagtataagactatttcagcatttgatttggcaaaacataatcaaggaaaatctaaattagaagtgcctgttgaggaaaatatcaaaatagaaaataagaaagaatctattcttgtgccgttgtcaaaagttttgcgagtaaatcaaatggctttattttatgaaaactcagcagaagaaataaaaaaactttcaaaaacagatataaacaagaggttatttaaaattactcagtttgaaagtgatggtagaattcaattacgacaccatgcacaaggaggtgcagataaggatttaattaaagaatcttcagtaaattttgaaaaacctgttcaaaaattgagaattagtttgagcaatgtgaaagctatttttgaaggacaagactttattttacattcttctggaaaaattgatttaaaatattaattatttttggtgtatatttgcaccactaaatcatactatcatggcaagacaaagtatcaccctagccaatcaaaacgatgaatggctaaagcaacaagtggctaaggaagaatttaccagcaaaagtgaagcagtaaattatttgattaaacaagcccgtgaacgtgatgcgtatcatgaatatgtccaaatgaaaattgatagaggtttaaaaagtggttttgcaccaaagcaaaccaaagaagaaatgttagccgagttcaaaaagagattgaatgtactatagttattttttaactcgagaagcaaaagaagatttgtggagaatttatgaatttggtgttcatagatttggagctactcaagcagataagtatttcacaatgcttcatgattgttttgacaaaattgcatccaatcccttcatgtttccattggtctcaaattacaaaaatgtagaacgattttgtgtttgtggtgttgatacgatttattacaatatcaaaggtgatgaaattaaaatcgttaccattattggaagacaaaatttttaaaagttctttgacatacgttttcatggtcttaaacagccaaaccacaaacacgatataagagtaatctgtgcatcagtggcaattttaaagttgtggtttacaaacaccaaaataatattttttattggtgtgtttgtgaatttatttgattaaagattagaaaacacgatatgaagaatcttacaagcccttattgtgtcaaggttgtggtttacaaacaccaaaataatattttttattggtgtgtttgtgaatttatttgattaaagattagaaaacacgatatgttgtaatatctttctattagtggtctggcagttgtggtttacaaacaccaaaataatattttttattggagtgtttgtgaatttatttgattaaagattagaaaacacgatatgtttattttcaattttagctataccaatgttgttgtggtttgattaaagattagaaaacacgatatgtgaatgttggtgtcgttgtaaaagacgaaagttgtggtttgattaaagattagaaaacacgatatgcattctccagtatctatgtaattaggcaaagttgtggtttgattaaagattagaaaacacgatatgtgagtggaagcaaaggacaaactaccttttgttgtggtttgattaaagattagaaaacacgatatgtcaaaatacctgatttactggtcgatgtaggttgtggtttgattaaagattagaaaacacgatatgtggaaaattagttagattatcgtttcctcagttgtggtttgattaaagattagaaaacacgatatggcatcacgtgcatgtgctctgtaccgcccggttgtggtttgattaaagattagaaaacacgatatgagttgtatctttgccacagcaaaagagggtgttgtggtttgattaaagattagaaaacacgatatgaaataaataagtaactaaatgaatccagatgttgtggtttgattaaagattagaaaacacgatatgtacatcgccagctactattgttccaaatgtgttgtggtttgattaaagattagaaaacacgatatgcaagcactgatcaacaagcaccaatttgcggttgtggtttgattaaagattagaaaacacgatatgcatagctagataacttcccgcttttatcgtgttgtggtttgattaaagattagaaaacacgatatgaaatggaattatctttatagaatcaacttggttgtggtttacaaacaccaaaataatattttttattggtgtgtttgtgaatttatttgattaaagattagaaaacacgatatgtgaatgttggtgtactggtcaaagacgaaagttgtggtttgattaaagattagaaaacacgatatgccaattacgctcggttgcaactttgtaaaggttgtggtttgattaaagattagaaaacacgatatgtagtaaatttgacgcatcgtagctttgagagttgtggtttgattaaagattagaaaacacgatatgaagtggaaataaatacactggacaagttttgttgtggtttgattaaagattagaaaacacgatatgagttggcttgttgccttctgatattcaagggattaattgtaaatatcgttataaaaaatgcctctttataggactgataaccctatattgaggcattttttgttttctaaaacaactctagctgtacaggcattggtacttttggcaacggagcttggccccaataattcataatattgccaaactgtttgtcggttatccgtacaacactcaccttgcctagtgggggcaacaattgtacgatacgtttttcgtgtacgtcggcactctcgctactggcacaatgtcttgtatatacagaatattgcatcatcgtaaatccgtcgttcaataatttgtttctaaaaaccgaggcatctttacggtttttttttgttgctgtgggcaggtcaaaaaatacaaacaaccacattatccgatatccgttgagttccataacttggcatattttatttttttgcgttcgccactataacattgttgtagcgagctggctgttttttgtaaagccaccatcaaagggcttttttcgttttcaactatattttaaaagaagtttattattacaaataaagtggcttttttgcagacgctgcgttagggatagtagtggaaatccttttttggggcagggcttttttttggccctgccccaaaaaagattgcaacggatagcccggccccttgtgggaacgcccaaaaaagggttgtggttttgtagtgaagttttttttttttgatattattcatcaagtaaattgtgtgtagggctgtggtttgaaattgtttgcaccgttcaaagtattttgctacatttgccataaaataatgcaccaatgaacaatcccgtagcagataaaattgcagattttttatcggattttaaaccatttaacttattgagccacagcgatttgttgttggtgtctagagaagtgaaaatattgtacaaagataagggcaaaacgttgtttcaggtaaacgatgcgttgcacgattgtttttatgtgatttattcgggaagtgtcaaattgacggtgtttgcagatgccgaggaaacgttgttgaacaagtgtcagaggggggatatttttgggttgaggcctttttttgcaaaaaacaactacatgatgacggccacggcccgagaagatgctatggtgtatgcgattccgttggcggtttttaaaccgctattggcttcaaacacagaggttttggattatttattggagagttttgcctcggtgtctagtacgtccaaagatagtaaaaacacgatttcggatgccatttcgatgacagaaaatgggtcggaaattcagtattttcaggcattaaactattccaaaacaaccttgcaggtggtagtagagcaaacgatacatcaggtggcacagttgattagtgaaaaaaatactgattattcgcttgtaatagaaaataatttaccaattggtattgtaaccgatgaagattttcggtcgaaagttgcaacaggccgctaccctattttgtcttcaatagacaaaatcatgtcgtcgcccgtgataacggttaccgaaaacatttcgttgacagaggctcaattgttgatgctcaaaaacagtgttacccacttgtgtgttacagaagatgggagcgacaagtcggtagtaaagggaattattacacaaaatgatttaattgtagcacattctaacaatcctggggtgttgttgaaagaaataaagaaggcaaaaagtactaaagaattgaaaaatattcaggaaaaattgtatgaattgatacaaacttctatttcaaaaaacatacctatacaaagtattgccatgatagtgggcgaaatattttttgcgttaaataaaagggttattgagctggctattatggagttggggactcctccaactacttttgcatggtttagtatgggcagtcagggtcgaaaagaacaaattttgcaaacagatcaggatagttttttggtgtttgatgatgttgcggccgatatgtaccgcaatgtgaaagattattttttgaaattgtctaaaaaagtaaccacaacgctcgaaaaaattgggtatccgatgtgtgccaatggtcatgtggccagcaattatatttggtgtaagtcgttgagcgactggactaaacagtttaacaattggataaatactccaggtgaaaacacagatgatgtatgtagtgttttttttgattttgaattgatttatggcgaagtaaaaatagaagaaaccttacaaaatattgtgtttaaagaacgaaaatccaatcatttgttttatgattatttaggtaacgaagccataaaaaaaccagcccccttgaattttttcaaaaaatttaatttggaagaagaaggtgccgaaaaagggaaatttgatatcaaaacccgagggctactgccgctggtagatgcggcaaggttgtttgtattgagtcaaaacatcaaaggtaatggtcatacttactttaggttcaagcagttagcacatttgaatccgcagcatcaagctttatttttgaattgtgccgaggcctttatcacgctttccaaatttagaattttggatggattgaaaaatgatagccaggggcagtatatagatttagaagaattttcaaagttggataaagaaaaattaaaaaatgctttattgagtttgaaagatttagaagaaatcatcaaagaacaatttcaactaacccatttttcgtaattatgctagactggctcatcaatatcggaagcaattatccagatttttggaaaacatatacagaaaaatttcaaaccaaatccaaacagtttgttgttttgagtatagaaacctcgggtttgaatcctacagaggattacatcatgtctgttggggctattgttatcaaccaaaatgaaattttagtacggcaggtttttgattttaatttgaatgaattttcatacaatttagaagagcaattgaatgcaaaagaacaagaacttatcatcaattttattgattttataggtaatgctacacttataggccatagaattcattttgatattgcgatattaaatgaatatctcaaaaaaatgcaatgtggccgactgaaaaatgaggcattggatgtagaagtgatgtataaaaaatggaaagatactaatgaaaaaacttttacagtagaagaattattacaagaatttaagattgaaaaaagcgaaagaaatacggcttcggaggacgcattgtctctcgctttgttgtttttgaaattaaaatcaaaactgaatatgccttagattttgccataatacatggcttttacaatgccgtctgaaagtccaattttgggaacataaatgttttgtgctttgctccatttcatggcatttaaatacaatttcatggcaggaatgataacgtctgctctatcaggattgaggcccaactctgcaatacgttgttcataagtcaaattgttgagcattgtaaattgagcatttaagtaaatataggttaaaggtttttcttgtgatttacccgacattttaaataatttgttaatatttccaccagaacctatcaaggaaatactatcataaccagatgtattgcttacaatccatttttcaatttctttccaaacaatatcgcttacgacttcgttgagcaatcgaactgtacccgctttaaaggatttagaagcaataattttgccgtcggaaaacaacgaaaactctgtactaccaccaccaacatctacatacaaatatgttttttctgtttttaataagaaatgcaaatcggttgatgcgatgatggccgcttcttttttgccatcaatgatgtcgatgtcaatttcggcttctcttttgataatgtccacaacctctttgccattataagcctctctcatggccgaagtggcacaggccaaataacgttctaccttatgaactttcatcaacaatttaaaagctttcatggcatcaaccattctttcaatattttcggaagttatttctcctaccgtaaaggcatcctgacctaaacgaataggtactctaaccaacgaacttttgttaaactgggtttgtttgcctttgtattcgataatattagtaatgagcaaccgcatggcattagaaccaatatctattgcggcatatttttttatgtttatatgttctgttgtactcatttaatttttttttgataaaatctataagattctaattgagccctaaatacaggttcgttgtcttttcttatacggtatttattatctaaattttcagaatgaagccttacttttacatttcctttccaacccaaatcaaagctatcaatcaaatcctgtttgattttggggtcgtatattgggcaagttacttcgaccctaccatctaaatttcgggccataaaatcggccgacgaaataaatacatcaggttttccgccgtttccaaaaataaataaccgtgtgtgttccaagtagttatctactatactaatggcttcaatattgtcgctcaagccttttttgccaggaatcaaagagcaaattcctcttacaattaattgaattttgacccctgccctactggcttcatacaatttgtctatcatttgaaaatctgacaaactattcatttttagttttataaaagtaggaataccggcaagtgctaatttgatttctttatctatcaatttaaccaattttgagcgggtataatgtggcgaaactattaagtgttggtagcggtgtattctaaaatttacttcaaaaaaatcaaaaacttttgaaatatctttaagaatttgctgatgacttgttaataatgtaacgtcggtataaacttttgccgttgattcattaaaattgccagtagatacaaaaccatatcgttttaatttgccttcttcaattctatcaatcacacaaattttgctatgtactttaagcccttttaccccaaaaatcaattcaataccttcagtttgcatttgttctgcataagaaatattgctggcctcgtcaaaacgggcttgtaattcaatttgaaccacgacttttttgccgtttttggcagcattgattaaggaactaataatttgagaatttttagacaatcgatataaagtaattttgatacttgttacttgagggtctagagcagcttctcgtaaaaatttaataatataagaaaatgtttgataaggtgcgtttacaagataatctttttctcctatttttttcattatattttcgtccaaactcaatccaggcactaataatggtggattcgttttatacaataaatccttacgacccaagtcgggaaaatccatataatctcttctgttgtggtacctcccccctggaatgatactatccgaagcatctattcccattttttttaggaaaaactttaaggtatctttttcaatagattggtcatatataaaccgaacgggctccccaattcttctttctttgacactagtagctattttttcgagcatgcttttactcaaatcgctatctatttccaattgagcatcacgagtaattttgatcatgtgtgccgacacttgttcgtagtcaaaaatattaaagatgctttgaagatgtagcctaatcacatcgtcaatcatgataatatattgcttttcatgaatagaaggcaataccacaaaacgattgatggattttggtatttcaattacagcatatctgatttcgggttttaacaaaggcaaatttaaaagtttagattttactttgcttttcatggttaattttacagccaaatagccaaaagtatcttttagcagcggaaattctgccaaatcatttaaaataatagttactaaagcaggagccactttttgaacaaaaaaatctttaatataggttttgtgttcgtctaaaatttcactttcgttaataataaaaatgttttgttcttctaattttttttcgataatacccaaaattctcaagctttcagactgttgtttgatggctatttcggtaatatctttaatcaattgttttgcagtaatggtaccaatcattttgttttgcgatgctttattaagcgtcaatcttcgaatggctgcaaatcgaactctaaaaaattcatctaaattatttgaaaaaatgcccaaaaatctcaatctatccagcaaagggacgttttcgtctgaggcttcttgaagtactcgggcattaaaattgagccagcttttttctctgtctatgtaactattttgttctaaattcattttaaatcttttggaaacagtattttttgtatggttccttgagaaatattttcccaagaattggcattaaaattaatagaaaccactcctgatgtgggaacattttctataaatttatcgccaaatttattaacaaaattggtaatagccccattatgtccaaaaattatcaaattcttaacatcgtctttacaagatttgacaatatcttcgagttgtttttcgtcaaacgtatataaatcctctatataattaactgattctaaggggaataataatgagtttgaaaaaatttttacagtttgagtggctctagttgctggactactccacaccgtaaatttatcgggcaaaaattggcaaatggtatgggcaattttttgtgcatcaatgatgcctcgtaccataattggtcgcattttgtcatacatgggagtttcccaactagactttgcatgtctaataagtgttaaatttttcatattataaaatggttaaatttgggactataaatataatcattttttttaataaaaaattatttttttgtttttttttacatcaattttaaggcgataatcgatcaattttccaagaaaaatcttcctttaattggaatctaatccgatcatgtaacctattgggtctgccttgccaaaattcgacttcaaccggagacactatatatccgccccaaaaatcaggtctttgtattgtattttctttataattttcttctaattgctttaatttattttctaaaaatgttctgttctcaataatttcgctttgatttgatgccaaagctcctaattgacttccaaggggtctcgaggcaaaataattgtctgatatgttatcggccacttttgaagctattccttttatgataacttgcctttccatcgaatgccaaaaaaaagataaacaaacctttggattgttggccatggccctccctttttcggactcgtagtttgtaaaaaagacaaaaccattttcgtcaaattttttcaacaaaaccactctcgattttgggtagccatctagtccaaatgtagaaaccgtcatggcatttacctcttctgtaccaccaaatgcttccatttcatgaaaccatctgttgaataaattaataggatcttctgttagttgatgctctaataattcagatttttcataagattttctataatcatgtaaatctttcataatttttaatattaaatatttttagcttcgttccaatacatttccatatcgttcaaagataaatctgctatacttttttgactttcaattgctttttgttcaatatactgaaatcgtttaatgaattttttattggttttttcgagtgcatcttcgggatttattttcaaaaaacgagcgtaattgattaatgaaaacaatacatcaccaaattcctcttctatcttgttgtgattttgatgttcgatttctattttcaattcttgtatttcttcttctactttttcccatacttgttggctattttcccaatcaaaaccaatacttttagctttatcctgaatacgacttgctttta

SEQ ID NO: 3845 - DNA, 15236 bp, synthetic construct
  variation 9478..9479: note = note, n is a, c, g, or t
  variation 14181..14182: note = note, n is a, c, g, or t
  source 1..15236: mol_type = other DNA
  misc_feature 1..15236: note = Synthetic
cctgtttcaaatgaaaacatacgtgttacggctccattgcctgacgatgtggtttggaatgcttgcgaaaattagtttaaagcatagtcaatagtcagtttgactccttcagttgggcgcgaccataaatctagtgatgcgttaatgagttctgccctacttttcatgtttatcaatccagagcctttttttacagtttgcatatcaaacccttttccgtcatctgtcgcctctatgattaatctatctggatggtaatctaaaactacttttaaattattcgcttcagaatacttaacagcatttgaaaagaactcttgtagtatcctaaaaatgatgatttcatgctttttctctttaaactctctcttgctgccttttatttccagttcggctgtagcaaatttcattcgttttaatctattcatctcattgatgatagagtcttcaaaacccatattgagaatcacatcattattaagggattttgaaagtgaacgcacttctcttaaactttcttttataacatccgcagcactattgacgctttctttaacatcgtcgccaacttttgccgaaatcatattcatttgcatgttcgcataggccaacaactgtccaacattatcgtgcaattcccagccaatatgcttcaatgtttgttcttgtatttcggtttgtgttctggatatttcttcatcaaactcttgttgctgtttaatttgatctaaaagcaatttgttttttcttttttgaaataccataaaaaaaacaataaccaatgtcgttacaattaccaagacagctatcatgtaaaccaataggtaacgttcggctgcagttgacactgctcgctcttgaaacagtattatttttaataaatcaatcattctttaattgtggttttgaaattattaaccctacagaaaagcaagtatacataaatatattagcgaacaaaaaaatacgccgttttaaatttgcaaaatcccaatctgaagtggtattatacacgtcaaaaaacaaaactggagttacaatcagccaccaaacaaataagcctacactggcataaaagccaaaggttgtaaacattacaacaatagcatcgcttttaagcaattgaataaaatataaagcgatacaaaatatagtggccaaagctcctgaaagttgataaaaggatgcatgtgtttttaaaaacatatcgggatagatgcaaaagtgacctaacatggctaccatgaagaccaaaaccgctattttaattgtagttttatataattttggtttcattaaagaatgaaaataatacatcacaaacagcacgcttccaaacatccaaaaaatattataccaaataacgctccgcagaccaaaatctcttaaaaaagcaataacagggaattcactaaagtaaaaaaaacctatacctacagtttcaacaaaaacgatataacataaaaaataaataaaatatcttgtggatgtgtttttatacgttttgtaacatataactgctgtcaacgcagcaaaaagctcaaagccatttgctatataattaaaatattccgttataaattcgaacacaaaaagtattaaatattaattattttctggtttacaaactagtattgcaactgcaaaagacaaatacataaagacattagaaaataaatatatataccttcttaacaataaatacccagcatctgcttgggaaaaataaacctcataaaatatcaatggggttataattagccaccaaagcagcaaaatggcactgattattgagtttaatgacttataaaaaaccaatattttatcgctttttaaaacttcaataaaatataagacaatacaactcaatataaccaaggcaccaaaaatatttacaaatttcaactgcgaattaaaaaaggcatccaaattgtagaaaatatagatactggcaaatatcaaaaaggtaaggcttaaatatctaataattttaatggaaacttttgacttaattatcttttgatagtaatacgacataaacattacgccaccaatattccaaaataaagtaaaccaccaatagtttctcttaaatggtgtatcagcaagtatctctttaatagctccaagctctttatactctacaacatatgatggataactaccgataaaatcgactatagcaacatatactaaataatacaaaaagattctagcatcagtgtttttgaattttttaaaataaaaaacaccgactacagccgcaataatcaataccacatcgtttaattgcgtagaatatttacttataaagtcagtcacgttttttattgtggataattggagctaggcggttctccaggatcgcctgcgttaagcccttttccacctgtaatatctccacttccaccttgaaatgagaaattgagcatacttccttctgaatttgtggcattcaaaatacctgtaggaacaaaaaacatcgtagtataacctacttctttatcggttgggtaagctcccaaatacacccttatgccatccattgtataacccaatcctttggcttcattttcggcataattaagataatctctcatgtctttgagcgaataccacgacgagcggttgtctggtcgctttacaatagaatcactaatcaactgatgtctagaatcgaatgcgtgatcaagaaccttggcctctgctggtgttatcagcccttttggagctacaatgctttcttctagttcattattacaacaataaaaataaactgcagcagctccaataattaaacctaaaagaaataaaaagaaatttttcatgttttatgaagtttagttggtttttatattgactaaagtaatgaaaatctttaaattaactattccttttcaaaaacattataaagttttttcgtacaattttattcaatcaatttgaatcttattctttgatttgtaaatttttgtgacagcatatttatagaggcaacgctcaactgcaataccctaggataacctcctgttgtttggcaatctcgcataaggacaatgagttgcccagaaggtgtcaattgaactgttccaggcaaaaccaacgatgttataatgggctctaaatggttaacaaaaagcccttctagctgatatgccattcggttgttttgtttagaaatacaaaactccattgagcacaaccgtatttgctgttcattggttagttgttcaaattctggacctttataaacaggcaaaatgatatctttaaaaaaagtatgattctgtttgatggatgatgtagatgttgtcttatcgttagcaaattctaaaatgggcaacatatcatttttaagtagcttttgtccttgtgtaatgtttgaaaacatacttcggctatgcatcactttttctgtttgaaatcctccggaaacagccaaatacgccctaaaaccaaccgttaggcttccaaaagacaagatatcgccagcttttaccacaacgacaaaattattcttaatcctttggttattcaattttggtgacatatcagctccagaaatacaaatatgagttgcacattgaaacataagcgtggcaccggtcattgtcatttcaataactgcatcattcttattgttgttaagcaaaccattggccatggttgctgaataggcatccataacaccagaaactggaactccatagtgctgataaccaaatcgtcccaagtcttgaatggtagaataaaatcctgattgaatgaccttaaccatgcatcacctcactttctaactcataagcgtccagttcaactaactttttgatactatgatattcgtcaatcgacacagggataaatttaattttatctccagcacttgcaaagcatggaatgggtttgttgacatcaaaaaaattaatgggagaattgccaataatgttccagccaccagggctttcgtttggatatattcctgtttgatgcccaccaatggcaacagctccttttacaatgtccaatcttggtgttgctttgcgaggtgtataaagttggtcgttcaatccgcccaagtatagaaatccaggtaagaaaccgataaaaaaaacagtataaataggttctgaatgcaactggataatcttgctttttgatagtcccttttctaaagatatgagctctaaatccaacgcaaaagaattatcataacatacaggaattttccacaatttaaagatagatttctgatgtgtgtcttttgatgcatataaatcctgaagcagtgttgtttcatgattaaaacccttatttgatttattataagatattaataatgaattatatgcgtggtttatctgaatgttttgtttatgaaacttctgaagtattttttctttaaaattcagaatatccttaagtataacttcatcaatttttgaaggccattccaccaaaatcgaatgtgctccaaacgatttatatttcaattggaagtttttcaaaatatcataaaatttgaatgtggtattgtttcaatcgttctgtcaaattctgaagcaaatccactgttttactatggtctccgtgaatacaaaatgtgtcggctttgattgtcactttctttccattaatggtcttcaccttttgatggacaatcatttcaaaaacatgttgaaataattcgtctgcgttttcaataagtgcattttttttgcttcgcgataccaatgtaaggttttcattatagtttctgtcagcaaaagcctcataaactatgggaatattagatttgattgccaatgtttcaatgaccgaaccataaggcacatacagtttaacaggatatgcaatacttttcattacttcgatgacaaccgctgcaactttgtcgttgaccacacagtcattatataaggcaccatgcggttttatgtggtgcagcatggcattttcttctcttaaaacaaacatgaactctcgtatttgatggctcatcgttgtgaataaatcagcgcatgacaatggcatcgtcgttctaccaaaattggccttgtctgggtatgatggatgtgctcctattttgacgttatgctgtttagcaagtcttaccacagctctcatcgtttcgagcgtaccagcatgacctccacaggctatattgcaggaagaaataaaaggcattacctgtgcttcgttgttcaaaccttcgcctacgtcagcattgatatcgattattctgttgcccattagagtatctcaaaaacttttagaatactttttaaacctaaaaaaatggtcacacacaagataagaattcccatcagattattgaagagagaatttttttgttttccaaggatggacgatttgttcataatccaaagcaacaaaccagcaataattggcaacagcaatccgttggtcacttgtgcaaattttatgatttcaatcgatttgatacctaatgaagacaacacaattcccaataatagaacaagcatccagaccattctaaaaggtttagacgtcattttagtgttccatcccaagcatcctgtggcaacataagccgctgccaatggagctgtgatggcacttgtaatgccagctgcaaagagcccaatggccatgacatatctagcgaaacttccgaacaatggctccaagccttgagccaaatcagcagcactgctcacttctttcgtttgaatggcagccgccgaaataatgatactcatcgacacgataccacccaaaaccactgcaataatggtgtcctttcgagcaaatttcaaatcggaggctttgtgccatttttcttttaccaatgacgcatgcaaaaataaattatatggtacaacggttgtccctattaaacctatgatggtcaacaaactgccttctggggttttaaagctaaaaataccttcaaaaatatcggcaaggttaggtttggtcaaaatggctgtcaccaaaaacgccatactcattacaatgaccattcctaccaaagcacgttcaagaattttgtaatttcctataaataacaataggaaggcaaatatgccgatacaaatgctccagatatttacagaaaatcgtccggtttccaatactggatttccaaagatggattccagccctaacacaccaccactgatgtttccagcttcgtaagctgcgtttccaatgacgatggctgacaatatcaaagcgacaataatgcctttaaggatgggttgtttaatttcggtgcggatgatttctgcaagccctttttgagaaataatgcccaaacgtgcagacatttcctgcaaaacgaccgttgctattatagaaaagaccatagcccaaagcaatgcaaagccaaaccctacgcctgccaaggtgcaaacagtcactgttcctgggccaataaaagcggcagcaatcaagggtccaggaccaatattttgaaaccagcttttaatcattatctacagagtttaaagcataaatggcaaaactgcccagccaatgtcctccttcataactatcgcctacaatgcttggcagtgaataattgatatgttgattcgcaatattttttagatgttggtattcgggaagctcttgtgcaatagcatttaaactccaagcacgcgaaaagttaacaccatcgagatgcaccaacttaccatcggttctatcggagactttgcctgtttccagctgaaaatttttatccttcagttgtggaaagaaatcggcaaaccacgttttaaactcttcttttggcagtacacgtttcatgatggctgcttcttccaagcaaggtgaaagaaaatcaaaaccgcttggctcccaagacaatggacattctttgtcatttaaataaaaatcctttgcgcgtttttcaatcattgttttgagttcatcatgacctacagttatggcataatcataggcaaacgaaagtccgaaagcggtattgggatgctcgcccactctgattgggtaattcaattttggtaaaaattcaatgtatttgcccacaatcaaatcggttaagggttgtagattcgcttctaatgttctggctgttgggtcgtcccatgtgtgaagctcttctgccaatttgagcagccaagcccaaccataggtgcgctcataagacgtgttgtgctttccataaaaataggcgacttctgccatgatgttttctttagacatgttttgaagcagttttgattttatgtcatctgcgtgttccaactctgggaattgtttcaacaaactgaccaaactccaatggccatggacagcagaatgccaatcgaaacagccataaaacgctggatgcaatgctttaggcgactgcaaatcgtcggcactgcctatggtttggttgagtttgtttgggtattcggtatccatacagtgcaatggcaactgtgccaacctgttggcttcttcaagattgagaatgggtgttttggcctgtactatggctggaagttgcttttggttttcctttttcttttcggaagtgttacaactccaaacaaaaatcaaaagtagcagtgttatgattttattcatttcttatagttatggtattatgagcagcaacttactttactggctctagttatttttaaagagattagcgatgctgaacctatgatttcttgctttcgcaggaattttttaccccaaccaaccttctctgtccaaacttcggtattgaatggcttcgctgatgtgtgagccgttcaactcttcaacaccttccaaatcggcgattgtgcgtgctactttcaggatcctgtcgtaggccctcgcggagaggttcaagcgctccatggctgttttgagcaactgcttggaggcttcgtccaacacgcaatacttccttatttgtttggtgttcatctgtgcattgtaatgcacgctgtcattgtcttcaaagcgtttggtctgttgttctctggctgctgtgacccgctttctaatctctatggacgattcgcctttgcggtcatcggatagcttttcaaaagggactggtgtcacttcgatatggatatcgatcctgtccaacagtggccctgaaattttgcttaagtagcgctgcatctcgtgaggcgacgatgtgatgggtgcgcttggatcgttgaaatagccacttgggcttgggttcatgctggccactaacataaaactgcttggataggtcacagtgaactttgccctcgatatggtgacttcgcggtcttccaaaggttggcgcatgacttcgaggacatcgcgtttgaactctggcaattcgtccaaaaacaaaacgccgttgtgcgaaagtgagatttcgcctggttgtgggtaactgccacctccgacgagtgcgacgtttgatatggtgtggtgtgggctacggaatggacgttgtgacatgaggcctgtatcggctttgacgcgtcctgccactgaatggattttggtggtttccaaggcttcgcgaatggtcattggaggcaaaatgcttgggagtcgcttggcgagcatggtcttgcccgcacctggtggaccgattagtataatattgtgccctccagctgcggcgatttccatacagcgcttgatgccttcctgccctcggacatcggcaaagtcgaactcggggacgtcgaggtttttataaaattcttcctgtatgttgatggtggtttgctctaatggttgtgctttatcgaaatggttgatgacttgggctatgctttcgaccccaaaaacgttgagaccatcgacgatggctgcttctttggcgttttggatgggcaggatgacgtttttgaagccttcttccttggctttgatggctatgggcaatgcgcctttgatgggctgcaggctaccatcgagggagagctcgcccatgataaggtactcttcgaggttgttggccttgatttggtcgctggcaacgaggatgcctatggcaagggtgaggtcgtaagcagagccttctttgcggaggtcggctggggacatattgatgatgatttttttgccgggaattttgtagccattgttttgtagggctgccgcaatgcggaaattgctttctttgatggcattgtctgggaggccaacgaggtgatagccaacgccgttatcgacattgacctcgaccgtaatagtggtggcttctacgccgaaaacggcactaccgaagactttttttagcatataggatagtttggattaaatgtaggaagattggcgttaattacaaagtgttttgtttgggtgttggatgttgttgtttggtttttttactgttcctttttttctaaacaaaaaagcgaaccaaaaaacaattttactttttaatgttataagggtttatgaatcttcgatttttacaaattgtcgtgtgtcgtgctgttggcggtatttaaggacttattgtcattgcaagaaaactcgttgacanngcaagaaaactcattgacattgcgagaaaactcattgacattgcaagaaaactcattgacattgcgagaaaactcattgacattgcaagaatactcgttgacattgcaagaatactcgttgacattgcaagaatactcgttgacattgcaagaaaactgttatgagctagggcttgattgattgagattagccattgcgttttagtgctattgacttgactgtacccacaaaaaaaaagtcctacctaggcagcaggactaaagattttcatctaattacattacgacgcggtcaatacaagataattactaattaataaagtctacaaaaaagtaaatcccaccgaagcgggattttagatttctctacggcatatagccttattgtgataagattaaagattagaataaaattatctactacaaatatagtgaattaatggaatgaaaaaatacgtagaactacgtattttatattttctattatttgaatacatttaagtttcataaaacttggcaagatggcaaaaattttaggattggatttggggacgaactctattgggtgggcaatcagagatacgaataaagatggtaatcaaattgttgatacaaacgtattagtttttccacaaggtgttggagaagaaaaaggtgttgagttttctttggcatcagaacgcacaaaacatagagcgtccagaaaactctatagacgaagaaaaaagcgaaaaacagatttattaaaattattgatagacaatggctactgccctttgagtactgatgaattgtttatttggtcagtttacagaaaaggtcaggaaatgagatatccaactgaaaatcatgaattttcggaatggttaaaaatcaatccttatgagattagagctaaagcagtgcattcacaagttactaaaatggaattgggaagagcattgtaccacatgtgccaacgacgaggttttaagagtggacgtaaagatgctgatgctggcaaagatttggaacaatacaagaaagaacaagaactattagaaaagaatggttttaaaacccttggcgaatattattttgatttgcttgaaagggatgaaaaagtaagaaaaacgaagtttacttctgatgaccaagaagtcaattcatcgcgtatcagctatgttgaggaattcaattatttaatgaagtcccaaaaaattgataaagatttagcgaacagattctttgatgccatcttttttcaacgacccttaaaatcccaaaaaggagctgttgggaaatgcaccttggagaaaacgaaatcgagatgtcctgtgagccatccaatatttgaagagtttaggatgtaccaatatttaaactccattaaagtaaaagaacgcaatagtgacatcttcgtgtttctttcagaattcccggagtattatcaagctgcgttggataaattttttagggtcagtgccaaaaattttaagttcttggacatttcaaaaggtgtcaatgcacttgcaaaaaagaacaatctctattttgaattcaattacaacgacaaatacccaatagtgggaagcccaaccataagtaggttcatagaagtttttgatgcaactgattgggaggaatgtaaggttatcatcaaatcaaaatataaaaaaagggatggcaaaacaattgacgaattggttgatgaactttggcataccttgttcttttcgggcgattttgtaaatgacatcacttccgagaaagtcaaaacatttattcgagacagatttgaactttcagaagaaaaagtggaatattatgaaaaaatcaatttaaaacaaggttattcttcgttgagcaaaaaagccataggtaagattttgccttttctgaaggataaaatcatttacccttatgctgttttttttgccaatatcgatgtaattataggtaaagaaaaatggcttaagaataaagaatttatacaagacaccattgtggatatcatctctcgttataaagaaaaaactttagagatagatatagtaaatggattggttggcgactttataaaggaatacgacaactcaaactatgattacgtattggatgaaatcgacaaaaaaaatgtcaccgaaaagataaagttgttttatggaagatatctttgggaacacatgtctgattctgaaaaagaaattcttcaaaaacatattgaagccttgtttgaagcacagcttcaaaaaagaagaacaggcggttattacatgtcaaaaccacgagttgatgagattatcaaagattttctgatttcagaatttaaagtttcaaaagagcaggcagataaactgtaccacccttcggcgatggatgcctatccgcaaagccaggatggttttttaggtttgccctttaccaattcgataaagaatcctatggccatgcgaactttgttctatctgcgaaaattggtcaatagcttgttgagggaaaataaaatagcatcagatactgaaatcattattgagttggcaagagagttgaacgacaaaaacaaacgattggcaattgaaagatggcaacgtgagcgagaaaacgagaacaagaagtatagggccaagttagaggagcttgcaaaagacaccaattctaaagttactgaaacagacgttatcaaatacagattgtgccaagaacaaaatggtgtgtgtttatataccaacaaaaccatcaattgcgaaaaattgttgggatcaaatcctgaatttgatatcgaacatactttcccaaggagcaaatcgtttgataattcgcttgccaacaaaacacttgctgataaaagttttaatcaaatcaaggcaaacaggattccgcaggatttggagtatgaatacaaacaaaattttaccaacaacataagagattggcaggttaaaattgaagatttggaagaaaaaatagagcaacaaaaatatttctctaaagtggcgagtaccgttgaacaaaaaaacagagccatccagcaacgccattatttaaaattggaattggactattggaaacagaaagtctatcgttttacggcaaccgaaataaagccaaatttcaaaaacagccaattggtcgatacaggcatcatcaccaaatattccgaactgtttttaaaatcactgttccaacgcgtttttcctgcaaagggaagcatggtagccgatgttagaaactcatggggacttgatgaaaaagacagaaactatcattatcatcatgccattgacgccatcgtattgacctgtatggacaaaagtattcgagatggtttggcagaagcattcaaagaatcagaagaaaatagatatagcgacaagtttaaaatcaaaaagccatggagcacttttaccgaagatatcaataaattgaaggatgacatcatcgtggtacacaatcacaaagataaaattgaaaagcagaccaaacgcaaattgcgtaagcgcaacaaaattcagtatgacaaaacaggcaaagtcatttacgagagaggtcaaggcataagaggctctttacataaagatacgttttacggtgcgatagaacgggaaaatgaaaacaacgagaaagagatttggtttgtattgcgaaaacctgtcaacagttcctttaccgatgcagacgtgaacaacattgtggatgaaggtataaaaggtagaatccaaaaacatggactaaaaaacatccgaacagagcaaggctggatattgttaccgcaagaaaccgatgaaaacggcaaagacctcaaagaaatgctcatcaaacgcgttagagtaaaaacaagtaacaaaaacctacctaaaattaagtcgcaaagccatgtttcgcaaggaaaacgaaaagaatacaaagaacactactatgccactttagaaaacatttttgccatggcaatttatgaaaccattgacgaaaaagggaaaaaggatttggcattcaacaccatttctgcatttgatttatctaaacacaaccagggcaattcaaaattggaaatgcctattgaagataacgtcatcaaaaataaaggaaagaaaagtgaaaaattaataccattatccaagattttgaaagtcaatcaaatggcaattttttatgaaaacaatccagaagagttgaagtcaatttcaaatgaagaattgagcaaacgattgtttaaaataacccagtttgaaagtgacggtcgaattcagttgcgccatcatgcccaaggcggaccagacaaagacctaaagaaagaatcgtcattggattttgacaaatcagcccaaaaattaagaatcagcttaagcaatgtgaaagctatttttgaaggaaatgattttgtgttacatcctactggtgcaatagatttgctgttttaaggggttaaaaaacaggttgagttcattgatatagtggttaaaaaaaaaagatattggtaaaacgtggcaggacgtgttacaagggttgtgggttgattaaagattagaaaacacgatatttaataccaaatactatcatcagggtcaagggttgtgggttgattaaagattagaaaacacgatattagacctttgcatacaaatttcttttaattggttgtgggttgattaaagattagaaaacacgatatttaacttgctttatatttaaatcaaatgaaagttgtgggttgattaaaganngattagaaaacacgatattttacatttttagattcttgtttcaacctggttgtgggttgattaaagattagaaaacacgatattagacatccaatcccaaagacaagctgggcagttgtgggttgattaaagattagaaaacacgatattctcaattagcctgtcgtattttggtttgtagttgtgggttgattaaagattagaaaacacgatattgcacctgcagaaattccatgacctgccatagttgtgggttgattaaagattagaaaacacgatatttgaaagcttcaatcgataattctgttcctgttgtgggttgattaaagattagaaaacacgatattcaagcaccttcctattacaaacttgttgagttgtgggttgattaaagattagaaaacacgatattttgcatcttcaatttttacgcaacctgatagttgtgggttgattaaagattagaaaacacgatatttataaagacagtggaagtgcccaataccaagttgtgggttgattaaagattagaaaacacgatattttccgcaagtaattattcttttacgctgaagttgtgggttgattaaagattagaaaacacgatattgcatcggtttgtggaacttctggagcgtcggttgtgggttgattaaagattagaaaacacgatattcccatatacacgtttaccatcatcagagcagttgtgggttgattaaagattagaaaacacgatattattgacaattgtattaaatcctgctgatgggttgtgggttgattaaagattagaaaacacgatattaaaatatcggtgagtccgaactgggaatgtgttgtgggttgattaaagattagaaaacacgatattgcattacggtatatccgcttccggtaagtgttgtgggttgattaaagattagaaaacacgatattaatttatcaaatgagttgtttggtttgttagttgtgggttgattaaagattagaaaacacgatattttaagtaaatttttgagttatgcggtttgagttgtgggttgattaaaga

SEQ ID NO: 3846 - DNA, 14320 bp, synthetic construct
  source 1..14320: mol_type = other DNA
  misc_feature 1..14320: note = Synthetic
gaagcaggactaaagattttcatctacggcatatagccttattgtgataagattaaagattagaaattttaatctgtgctaaagatataaaaaaatattatatttgactgtattaaaaaataatctgagagtgtttggacaattatttatgatataatttccaattgcttttcaaactgtataaaattgcagttctttttaatcaaattattttcagtaaagtttataatccttgaagtgctgactttgaggattattttttatcaaatcacaatcttataatttatgcatatataaatattataaaaataggtttacttataattatatgctgtatataaatatttgcatatgtcaaaagtaaaatttatttttgacatataaagaagttttctaataaaaattaaaaattcattgttgtgcattaatttttagtgttgaataataataatagatatggcaagaataataggattagaccttggtaccaattcaataggttgggcaataagagatagtggtttagataacaaaaatcaaatactgcatacaggagtattaatatttccgcaaggcgttggcgaagaaaaaggtgtagaattttctctagcatcagaacgtacaaaacacagggcgtcaagaaagttatacagaagacgcaaatggcgaaaaatagatacacttaaaattctaatagaaaataatatgtgtccattaactatggaagagttaaatgtttggggaacatatgaaaagggcaaggaaaataaatatccaaccgaaaacgaaaaattcagggaatggttaaagttaaatccttatgaattaagaaaaaaagcttcagaagaaactgtaacaaataatgaattaggtagagctttgtatcatatttgccaaagacgaggttttaaaagcggaaggaaagatgcagatgctggaaaggatatggaggtttatattgaggagaaagagaaaagaggcgaccaaacacttggtgcttatttaagcgaccaattatatgctggtattgaagtaagaaaaaccaaataccaagccgatgatcaagaggttaattcttctcgtattagctatattgaagaatttgatgttattgttaaaaaacaaaatcttgataaggacttaattgaaaaattgtttgatgccatcttttttcaaagacccttaaaatcccaaaaaggaaccattggtaagtgtactttagagccaaacaaaccaagatgtgcagtaagtcatccattgtatgaagcgtttagaatgtaccaatttcttaattcaatcaaaattaagaatacgtttggcaatgattctcagtttcattttttaactgaattcccacattattttgaaatcgtaaaacaattatttttcagaaaaagcaaacccaattttaagtttgctgatatttcaaaagccataaataaagaagcaaaaaaaagaaatgaacattttgaatgcaattataaggacaaatatccaattgttggcagcccaacgttaagccaatttattaatctatttgatgccgaagattgggaagattgtaaaacgaaaattaaaaacaattataaattatcaaacaataaatcaacggatgaactcattgacgaactatggcataccttgttttttgctggtgattttgtaaatgatattacgtcaaaaaaagtaaaagattttgttcgagagcgttacaatgtaactgaggaacaaattgaaacttatgaagctataaacttaaaacaaggctatgcatcattaagtagaaaagcaattaaaaatatactaccatttttgaaagcgcatattatttactctcatgctgttttttttagtaacgtggaagccattgttggtaaagatgtctgggaagcgaatagcgagtttattcaagatactataattgacataattacgtgttataaagaagataatttaatagttgatatcgttaatggtttggtaggcgattttattaaggagtatgacaatgcgcatttagattatattttagatgaaactgataaaaacaatgtagaagaaaagattatttccttttacggaacatcaaaatggaatgctttaagcgaagcgaaaaaagaaaaatttcaaaaagaaattgaaacactttttcaagaacaattacaaaaacgaagaacaggaggttattttttatccaaagccagattagacgaaaaaattaaaggctttttgataagtgaatataaagtaacaaaagaacaggcaggtaaattatatcacccttctgctattgatatttatcaagatagtttatcaggcgaattagaaagtccttttacaacatcagttcgcaacccaatggcaatgcgtactttatatcaattaaggaaacttgtaaatacacttttagaagaagataaaattgatgcagatacaaaaataattatagaactagcaagagaactaaacgataagaataaacgtttagcaatagaacgctatcaaagagagcgtgaagctgaaaataaaaaacatagaacccttttagagccacatgctaaaaaagctaagagtaaagttacagattttgatatagtaaaatatagactatggatagagcaaaacggaaaatgtttatacactaatgaaactattggaatagctgatttgtttggttctaaccctaaatttgatattgaacatacgtttccaagaagtaaatcttttgataattcgttagcaaacaaatcattgtctgaaaagaaattcaatcaaataaaaggcaataaaattccacaggaattatctgtaaactatttgcaaaatgcactacataatattgcgcattggaaagaaaatatagaggctttaaaagaaaagattgagcaacaaaagtatttttctaaagtcgcttcaactgttgagcaaaaaaacagggctattcaacaaaagcattatctcaaattgcaatacgattattggaaagataaacacagacgttttacagatgaggaaattcatttcaggttcaaaaatagtcagttagtagatacaggtatcattaccaaatatgctaaattatatctacaaactttatttaaagatgtatttcctgctaaaggaactatggtttcagatgttaggaaatcttggggcttaaaagaaaaatacagaaatttacattatcatcatgccattgatgctatagtattaacctgcatgactaaagatataagggaaaaacttgccacatcattcctagaagctgaaacattacataagcgtgaaaaatttttagtcgaaaaaccttggaataattttaccgaagatgttttgaacttacaagaagatattttggtggttcataaacataccgataatcttttaaaacagactaaacgaaaattgagaaaacgtggtaagattcaatataacaaaaatggagatgtaatttatgagcaagggcaaggcatacgtaattcgttgcataaagatacattttatggtgccattgaacgaaaaaacgataaaagtgaaaaggagatatggcatgtgataagaaaacctgtagatagttcattttctgaatcagatgttaagaatattgttgacgaaggcataaaagagcgtatttataaacatgggcttaaaaatattcgtacagatgaaggatttatagtgttacctgaagaggataataaaaaaccaatgcttataaaacgtattcgtcttaaaacaaggttaaagaatttaccgaaaattaaaaagcaaagtcatacctctcaaaaaagcaaaaaaccacataaggaacattactatgcaactttagagaacatttttgcgatggcagtttatgaagcagagaatagtaaaggaaaaaaaacaatagcacatcaaaccatatcagcctttgatacagcaaaacataatcaaggcaatcaaaatatggaagtgcctgtagaagctaatatgattaaaaataaaggaaaatcttccgaaatattattaccattaaattatgtgcttaaagtaaaccaaatggtgttgttttatgaaaaaaacagggaggaattaaaacaattaaataaaaaagaattaagtaacaggctttataaaataacacaatttgaaagtgacggaagaatccaattaaagcatcatattcaaggaggagctgataaagatttaaaaaaagaatcttcgttagattttgaaagaccagctcaaaagttaagaataagtttaagtaattttaaagcagctaaagaaaatgaggattttaaaatgtctgcctcaggaaaaatagattttgtaaagtaaatgattttggtgtatatttacaccactaattattttattatggcaagacaaagcatcacattggccaatcgaaatgacgaatggttaaaacaacaagtagctaatgaagaatttactagcaaaagtgaagtagtaaattttttaataaagcaagctcgtgaacgtgatgcgtatcatgattttgttcaaaggaaaatagacaaaggtttaaaaagtggtttcagcacaaagtctaaagaagaacttttggtagaaatcaaaaatagattgaatgtataactatcatatatcttttgaagctgaagaagatattgttaggatttttgagtttggattaagtaaatttggactaaaaaaggcgaataaatatttatgatatgctgtttgattgttttaataaaatagcttccaatccctacttattttctgtagaaatacaatatagggatgtagaaagattttgtgtttgtggagtggacacaatttattataatatcaaaaaccaagaagtagaaatcattactattattggaagacaagattattagaagttcattgacataaagttttgctgttttaaacacttaaaatacaacgggaaatcatgaatagtatttataggattgattattttagtattccatcgttgtggtttgattaaagattagaaaacacgatatttgaatatcttgtagtatctccatctaaagagttgtggtttgattaaagattagaaaacacgatattctagcagtagtattatatagtgttttaggagttgtggtttgattaaagattagaaaacacgatatttatcgctaagcttattgtccattccgaagagttgtggtttgattaaagattagaaaacacgatattccatgcattcactattgttttaccaacgtagttgtggtttgattaaagattagaaaacacgatatttatacaatcagcagtgtgattagtcatatagttgtggtttgattaaagattagaaaacacgatattatggtctgtgataattacagccacttcacagttgtggtttgattaaagattagaaaacacgatattaatcaaaatattttcgatagccattaccaagttgtggtttgattaaagattagaaaacacgatattaacgtctctaaccgctgaacttaacattaagttgtggtttgattaaagattagaaaacacgatattaaacttaggaggtaaaaagcaatgcttagagttgtggtttgattaaagattagaaaacacgatattacctaaatcgcttaatgtgttggatagattgttgtggtttgattaaagattagaaaacacgatatttaaaagtgcgatttcactatctacctcaatgttgtggtttgattaaagattagaaaacacgatatttacaacaccaatataaccccaatagatttagttgtggtttgattaaagattagaaaacacgatattattttgattttatccttattgactgcccagttgtggtttgattaaagattagaaaacacgatattatcccaattttgccaggagtgtttttttagttgtggtttgattaaagattagaaaacacgatatttacagaactgcatttggcgtttaacgaccagttgtggtttgattaaagattagaaaacacgatattacagccacgcattaaaggccgtatttatgtgttgtggtttgattaaagattagaaaacacgatattttacttaaaaagcaactcgccaaacgttagttgtggtttgattaaagattagaaaacacgatattagttggcttgttaccttctaataatcagtagaataaagaaggatatcgttaaaaaaaatgcttcttttttgcagtgataaggcaagattgaagcattttttagtttctaaatctaaaaaaggagtcatattaaattaatgtatagaggtccttttggaagtaaacgctatttgtctgtaaaaattaaaataattccagctgcgtgggttggggtgctttgggtatttctgcacgaccccaaaagttcatgatattgccaaattgtttgtcggtaatccttaatatactcactttgccaagaggcggtaataattttttaattcgtttttcgtgagcatctgcactttcgctactagcgcaatgccgtatatatactgagtattgcatcattataaaaccatctttcatgatattttttctaaagccagcagcatttttccggtctttagaagtttcagtaggtaagtcaaaaaaaacaaataaccacatgattctatagccgtttagttccataatttaggatacttaattttttttcttttgccagagtagcattgctgtaatgagcttgcggttttttgaagcgctaccattaacgggcttttttcattttcaaaatatactgttctagtaaggatggttagaatttcagtttttatttccgtagttagttcttgctcatcataattttgcatgatataatgaactgtttcatcaacaataggtctaaaaggttccataatatcatctgcaagtgcaaacgcattgtatttacttttgtgatgaatgcctaatgtatttagtaatccgcttccagaaagggctcgtgctgttgcagctcttaaaattgcatacccataatttaatatattgtttggataattaccaaatcgttctcttttaaaattgatatcaaaaaaatatttccaataaaattttgcagctaccgcttccatatttgaggtgtcgccacttaacactttgcttgctaaatattcaaatttattttctgctccagttattttgtttaataaaaacccttgattattaattttttcaattatggtttgttgccataattgcttttttaaaggcgtactggcgctaatttgaaatttgaatatttcttgttgtatatgatggctgttgaggtttaaaaacataccattaggaagatgtttgtcgttacaaataatacatgcacaattattatttattagcttatttagcgcgggaatgcttatgaagatctcattatgatttataactaaataaccaatatcctctatagggatagttgtatttttatttaccgattttattacgagttgttcattagctgttgtaatagcgcatttgtttgagaatagaagcgtttttttaatcatgaatcatccagaattagcaattaatagaaatttgctaattaataatccattcgagagagtagtaaatatattacttttaattttaatcgcaaaatgtgacctttcaaaatcaacggtgtctaataagtgctattagtcatttaaattaagaggagttataagaaattgtagctcttttttttaacacttttaccaaatgcttattccttaaaatttaattttcttcaaccttaaatgcatcagtggaataaattaaaagtgtgttactaaatgtttctttaaactaagtatttgaaaatttggatagaggtatattaagcggattaatcaaaacgctttcttttagagtaatttgatttgaaaagctttaaataaaaagattcaatagattaaataaatagcacttgctagctgtaatttttttaaattgcatggattcaaaattatatcatttcaatatggttaccttaaaacaattagcaaaagaattaaacgtttcaatatctacggtttccaaagcattgaacaatagtgatgaaattggaaaagatacggtgaagcgtgttaaagagcttgctgaattgtataactacagacctaataaagtcgctttaagtttaaaaaataataaaacaagaactattggtgttattatacccaatatcttaaatcggtttttagcgaaagtactttttggaattgaaagagaagctactaaacatggttataatatcataacatgcatatccaatgagtctttggataaggagaaagaaagtttgcaattgttggcaaatggtagtgttgacggttttatattatcggttgctgaagagtctcaaatgaataatgaggttgaacattttaaaagaactataaaccaaggtttgcctattgtgatgtttgatagagtggcgcacgatgtattgtgtgataaggttatagttgatgattttgatgctacttacaatgctacgaaaagcttaattgaagaaggtagaaaaagtattgtttttataagtaacataaacgatttaagtgttggtaaattaagagaacggggctataataaagctattttagaaaatatagttatagagcctttggttttaaagattaaaaagaaagacgattgtcagaaaaaaataaaaacgttatttaagaaaaaccaaaagattgatgctgttgtagctgcagatagttcgtctggtataatagctctgaataccgctatcagttttggtttaaaagtgccaaaagatatatcggtaattgcatttgctagcaaatcggattccaaccatacactccctaaattaacaactatacgccaacacgctaaagttattggagcaaaagcagcagaattacttataaatagaatacaaaatactggctctgaggtggatgtaaaaactaaaattataaaaacaagcctaataaaaaacgaatcaacactctctaataagtaaaatattacattttttgtatttcatcgacgaataaatatgcgtttcgtcgaatattttgttcttttttaaaataaaaataaattcctctatttcttaatatattttagcatttcataattgagcttacgaatatacattccctaagtttaattttaaaaattattccattaagacttttttaagtcatttcccctctttaaattttaaatgtcggtcttgaattgtaatgaccgattttaagtaattatctgttttttaactttgtaaatattttatattcagtataatagaatttttttatattaaatatagtctaaatgtataaccaaaaaccataatattatgaaaaccttaaaaatcacattaatcacaacattattttttgcatccttaacttcttgcacaaaacaggatttaaacgaagacaatatacagggagcagtagatcagacagaagttgcaccgtttacgggtgggcaaggacatgattaaaaacataggaaacaggaacttattaatctcgtaaaaaccttttacttccctaattactaaacaattatattttaacaaataaaaaataaccctaaaaaacaagcattatgaaaaccttaaaagtcacattaatcacaacattatttttcgcatccttaacttcttgcacaaaacaagatttaaatgaagacgatatacagggagcagtagagcagacagaagttgcaccgtttacgggtgggcaaggacatgattaaaaacataggaaacaggaacttattaatcttgtaaaaaccctttacttccctaattactaaacaattatattttaacaaataaacaataaccctaaatttcaagcattatgaaaaccttaaaaatcacattaatcacaacattatttttcgcatccttaacttcttgcacaaaacaggatttaaacgaaggcgatatacagggagcattagatcaaacagaagttgcaccgtttacgggtgggcaaggacatgattaattaagttttgtgcttttgtaaattataattagtttacataaatattgggaaattataaatacatttgaaagtattgtaacatatccaataatattgagatttttagcattattaataattattcatttttgcataggtaatcttcatgcacaaactgaagtaaattttaagataattgattcaattcatgatgttttaaaaaataaaaatactttagattctacaacaattgctagagattactataaaattgccgagatatacaggtattcttcggtaagtgatagcgctttttattattatcaaaaagcagaaaagatattcaagaaaaccaactcagtatttgagcttgctaaaacgttttatggcattgctgttattcaatgtaatgaaaaggattatacaggtagtgaagtcacatcaattgaagctatttctcttttagaaaccctaaagcctacaaattttgtcaataaatataaatcatttgtatataataatttaggtattgtttttaacgagcttgggttgtttgaggaatctttagaataccataagcggtcacttaaattaaaaagaaacttaaatggcgattttcaaaaaagtatagggttgtctgaaaataatattgctgttgcatataaaaactcaggacaatatacattagctattgatagatatcaaaaaatcttatcgaatacggaattaattaaaaatcatcctgaggtttacgtattggctttaggtaattatgccaatacgttatatttaacaaaacgttataagaagttgcctggtctatatttaaaggcattaaaaaaaagtgatagtattaattatacatacaactctattataatccatcagcacttagctgaatattatgataatattaataacaaagactctgcaaaatattatgcctataaggcaaaaactatttctgaagattataataatgatgatttattgaaatcgttattattaatttctaatattgaaagtgaggatatagctatcgattatttgaaagaatacgttgtattaagtgatagtttacaaaaaagtgaaagacttaaacgagataaatttgctagaatacgttttgaaactaataaaattgagcaggaaaatatacgaatatctaaagagcgcatgtggcttttaataatttccatagtattgatattagctttctttcttctctatcttgtaattacgcaaaggaataaaaacaaagaattagaatttgtgcaagaacaacaaaaaaccaacgaagaaatttataaccttatgttatctcaaaatgaaaatatagaagaggctagagatttagagaaaaagaggatttctcaagaattacatgatggtgttttaggacgtttatttggcacgcgtttgagtttggatagtttaaatatgagtcatagcgatgaagctataaaaacaagagaacaatatattattgaacttaaaacaattgaagatgatattagaaaggtttctcatgagttaaatactgactttgtatctggttctggattcatagatatcataaaaacattagtgaaaactcaaactttagcttatggttttgactatatattaaatcatgatgacgctataccttgggattccgtaatcaataaatataaaattcatatttacaggattatacaagaagcacttcataatatttataaacatgcgcaagctacccatgtaaatattagttttaaattaaaaaataatgtaatttgcttaaacattgaggataatggttctggttatattgttaacaaaactaaacctggaattggtttaaaaaatatgaaatctagaataaaagaaataaacggaaacataaatataatctcagaaaaagatattggaacaagagtaaccattaaaatgccattatcttaaagccaaattatgactgaaaaaataaaaattttgatgattgatgaccaccctatgattattgaggggtatcaaaacactttattattaacaaaaaaaagcaaccaagagctcaaaatcgatatcgccaacaattgtgatgaagctattatctatatggataaatctgtacataagcaaatgccctacgatttgctctttgttgatattagcttaccgccatcttcagatggatcaatgagttcaggagaagatttggcagaatatgctcgaaaagttttaccaaaagcaaaaataattattttaaccatgtttaatgagtcctttagaatacataacattataaaaaccattgacccagaaggatttatgattaaaagtgatttaacatctaaagaattggctagtgcttttcaagcggttctcaataatccaccgttttatagtggtaccgttaatagtcatataagaaaaacaatagcaagtgatattgttgttgacgataaaaacagaaaaattcttcatttattatctcaaggtataaaaactaaaaatttagcgacccatttggatatctctctaagcgccgttgaaaaaaggaaaaaacaacttagagagatatttgaagtaaatgatggtcaggatgaaacattgcttaataaagcaagaaaaaaaggttttgtttaattcaaaatatacattataatttaaaaatgtgattttgtaaataaaaatacattttttttctcttgaaacgtctgttattattgagtactacagttaccccgtaataatgttacgggttttccgcagtttaaaaacaatagttctaagtatatttgcatatcaacacttcaaaaattaattaatccctcaatttttttgttgataatagcaatttacataaaccctgtggaggtgagagacccacagggtttcttctttttaatactgaaataatacgttgcgataatcccacaaaataccacaaaataaaccaaggtatattacagccacaataaattttataaaggtagatgccaaaaaaccaataaacgacccaaatgctgctcttgttgctgtttttgcatcatttttatttataagttcgcctgccaaagcaccaataaaaggaccgattataatacctcctggtataggtgcaatcaagccaaaaacaaggccaatagtcgttccaatcataccgtatttagtacctccaaaacgttttgtaccaatggcgggaataatataatccaaaacccaaataaataaagcaatagcaaaagttatgattaaaaacgttttgtctataggaatagcgtctgaaaaatgtagtattaaaagtccaatccaacttgttatagggcctggtaaaattggtaagaaactgccaataatgcctaaaaacataataagtgcagcaataataattaaaataatatccataaaaatgtttgtgttatacagtagttagactaaaaaccatgccaaatgttacattttaaactaaaagattagtttaaactaattttttagttatatttgtttaactaaaagattagttgaatatagaaattagttttattatgaagcaacttaccaaggcagaagaagatattatgcaaatactttggcaattaaaaaaagccaatgtaaaagctgtaattgaagagtttcctgaaccaaaaccagcctataatacggtgtctacaattgttaggattttagaaagtaaaggctttgttgattatgaaaaacaaggtaaagggcatgtttattttccgttaatagaaaagcaagattacagtaaccagtctataaataaactggttgataattattttcaagggtcttttaaaagtatggtatcgttttttgttaagaaaaatgacatgaatataaaagatttagagtctgtgctaaaagagattaataaaaaagattcgtagttatgtcacactatattatacaagttgttgcctttcaattgttcttttaaattatatatgatttgtttttaaagaaggagactttttttaattggaacagatcgtatttattagttacagcagttctgccattaataatcccatttattaaaataagtagttttaggaatattatttcacaagattacattattaatttacctaaaatttttattggaaatacccaacaaaccaaaataaatcctatacaattatcggcaaaaactatagctaataagatattttggacttgggagttaattttttatttaggtgttggctttgcgacacttttattagctattaatttaattaaaatattggctttacttaataataaccctaaaaaaaacaaggtaagttgtttattgttagtttgataaagagtaatacggcattttcgttttttaattatatttt

SEQ ID NO: 3847 - DNA, 14249 bp, synthetic construct
  source 1..14249: mol_type = other DNA
  misc_feature 1..14249: note = Synthetic
gaagcaggactaaagattttcatctacggcatatagccttattgtgataagattaaagattagaaattttaatctgttataaatatattcaatatatttgaaaactccaatctattgttcaaatttggcgattcgttaatagattctgttagtttggacctaacagtaaaatatttgaaagcagaataatatagttttggaagctttattattttaatcaacttttctgctatttaggagttttatttaaatataaaatcaaatcacaacatccaaaacaattgtaaaaaagatttcacctttgttgttgatagttcaaaattactgtaaaatttggttctatccaaaactatttatatattagtctgcaatataataaaatttcatgacaaaaatattaggattagaccttggcaccaactcgattggttgggcagtaagagacagtaatttagataaaaaaaatcaaatactacattctggagtattaatatttcctcaaggagttggagaagaaaaaggagtcgagttttctttggcttctgagagaaccaaacacagagcctccaggaagttgtatagaagaagaaaatggagaaaagtagatacacttaaaattcttatagagaataaaatgtgtccattaagtatagaggagctcaatttgtgggctttatatacaaaaggtaaaaaaaataaatatcccacagagaatgaagattttagagcttggttaaaactaaatccatataaagcaagaaaaaaagcttcagaaggaaatgctacaaagcaagagttaggaagagcgttgtatcatatttgccaaaggcgtggttttaaaagcggaaggaaagatgcagatgcaggtaaggatatggaagtctatattaaggaaaaagaaaaaagaggagaccaaacacttggtgcttatttaagcgaccaattagatgctggcattgaagtaagaaaaaccaaataccaagctgatgaccaggaggttaattcgtctcgtattagttatattgaagagtttgatagaattgtagaaaagcaaaatcttgataaagaacttgccagtcaattatttgaagctatattttttcaacgtcctttaaaatcccaaaaaggaactattggtaagtgtactttagaaccttctaaatcaagatgtgccattagccgtccattatatgaagagtttagaatgcatcagttcttaaattcaattaaaattaaaaacacgtatggtaacgattctcaatttcagtttttaactgagttttctcattattttcaaattgtaaaacaactttttttcagaaaaagtaaacctacatttaaatttggcgacatttctaaagctattaatagggaagcaaaaaaaagaaatgaattttttgaatgtaattataaagacaaatacccaatagttggcagtccaacaatgagtcagtttgttagcctttttgatgcagaagattgggagaattgtaaagaaaaaatttctaaaaattataagctaaaagataataaaacggttgatgaacttatagatgaactctggcatactttgttttttgccagtgattttgtaaatgatataacttcaaaaaaaataaaagaatttattaaagcgcgttataatgtaactgaagaacaaattgatgcctacgaagatattaacctaaaacaaggttacgcttcattgagtagaaaagcgataaaaaatgttttaccttttttaaaagcgcatataatttattctcatgctgttttctttgccaatgttgatgccatcgttggtaaaactatttgggaaaataataaggaatttatacaagatactattattgacattatagaatgttttaaggacgataatttaaaagttgatattgttaatggtttagtgagcgattttataaaggaattcgataatgctgatagtgactatgttttagatgaaacggacaagaaaaatgtaaaagaaaagattgtttctttttatggtgtttcaaaatgggaaaacttaagtgcttccagaaaagagagtttacaaacggaaattgaaacaatgtttcaacaacagttaaagaaaagaagaactggtggttattatctaactaaagcgagattagacgaaaaaatcaagcaatttttaattgatgaatataaagtaggtgaaacagaagctaataaattataccacccttctgcaatagacatatatcaagatagtttgtctggcgaattagaaagtccgtttaccaactctgttcgtaatccaatggcaatgcgaaccttgtttcagttgaaaacactggttaataccttgttagaagaagataaaatagatactgatacaaaagttattatagaattagcacgagaactgaatgataaaaacaaacgtttagctatagagcgctatcaacgcgagcgtgaagccgaaaataaaaactatagagtgaagttggagccacatgctaaaaaagcaaaaagtaaagttacagaacaagacattataaaatatcgattgtggatagagcaaaacggaaaatgtttatataccaacaatactataagcattgaagatttatttggttcaaatccaaagtttgatattgagcacacgtttccaagaagtaagtcttttgataattcattggcaaataaaacactatccgaaaagaagtttaatcaaattaaaggcaacaagattccgcaacaattggaaaccaaatatttgcaaaatgcattaatgaatattaggcattggaaagaaaacatagaagctttaagagaaaagattgaacagcaaaaatatttttctaaagtagcatcaactgtcgaacaaaaaaacagagctattcaacaaaaacattatttgagattgcaatatgactattggaaagataaatacaaacgatttaccgatgaagagatccatttcagatttaaaaacagccaattagtagatacaggcatagttaccaagtatgccaaactatatttacaaaccttatttaaaaatgtgtttcccgcaaaaggaaccatggttgcagatgttagaaagtcttggggattaaaagaaaaagatagaaacctacactaccatcatgctattgatgctatggttttaacatgtatgaccaaagatatcagagaaaaactcgcgcaatcatttttagaagctgaaacattaaacaaaagagaaaaatttttagtcgaaaaaccttgggatacttttaccaaagatgttttgagtttacaagatgagattttagttgtacacaaacatccagataatctattaaaacaaaccaagcgcaaattaagaaagcgtggtaaaattcaatataataaaaatggaaatgtaatttacgaacaaggtcaaggtcttcgaagttcattacacaaagacaccttttatggagccatagaaagagaaaatgaaaaggatgaaaaagaaatatggtatgttataagaaagccagtagatagttctttttctgaaacagatgttaaaaatattgtagatgaaggtataaaagaacgtatttataaacatggacttaaaaatataagaacagagcaaggttggattgagttgccaaaagaaaacggcaaaaaaccaatgcttataaaacgtattcgccttaaaacaagattaaacaatttgccaaaaattaaaaagcaaagtcatatctctcaaaaaagcaaaaagcctcacaaggaatattactatgcaactttagaaaacatttttgccatggcagtttataaagcagtgaatagtaaagggaaaaagataatggcatatcaaaccatttcggcttttgatgcggcaaaacataaccaaggaaacaaaaaaatggaaatacctgtagagtctaatatgataaaaaataaaggaaaagcttcagaaatattattaccattaagttatgttctcaaagtaaaccaaatggttttgttttatgaaaaaagcaaagaagaattaaaaaaactaaaaaataaagatttaagtaatagactttataaaatcacacaatttgaaagcgatggtagaattcagttaagacatcacattcaaggaggagcagataaagaccttaaaaaagagtcatcattagattttaataaacctgctcaaaagttaagaattagtttaagcaatgttaaggctggttttgagggaaaggattttgttctacatccatcaggtaaaatagattttgtaaactaaacaggttggtgtatatttacatcactaaataattttattatggcaagacaaagcatcacattagccgaaaaaaatgatgaatggttaaaaaatcaagtagcagaacgagaatttgcaagtaaaagcgaagctgttaattacctcattaaacaagcacgaaatcaagaaaaatattatgattttgttcgactaaaaattgaaagaggagagaaaagtggttttgtaaaaaagcaatccagagaagatatgttagctgagtttaaacaaaacttacctaatgtatagctattatttaagtagcgaagcgaaagaagatttaagacaaatatattattatggagttataacatttggaattgttcaagcagacaaatactttaatatgatacatgattgttttgataaaattgaatcaaatccttatttatttccatctgctgaacatataaaaagtggctttagatattgtgtagctggagtagatactatttattataaaattgaaaaaaataatagaatagaaattattacgattattggaaaacaagattttccaaaataaatgttctttgacatagatattttttaaaatttgagttctcgacgtagaatagttgtggtttgattaaagattagaaaacacgatatctcacccacaatacgtaaacagaatagcatagttgtggtttgattaaagattagaaaacacgatattacaagacgtatcgaaagaattgaagttatgttgtggtttgattaaagattagaaaacacgatattctgccattctagtgtctgctacgttgttaggttgtggtttgattaaagattagaaaacacgatatttaccagaaagaaaaaagcatcattcagtatgttgtggtttgattaaagattagaaaacacgatatttcaattatgaaattgaagtatttggtacaggttgtggtttgattaaagattagaaaacacgatatttataagcgtaggtggtttattagcttcgtggttgtggtttgattaaagattagaaaacacgatattataataaccattaataaaatgaagacgagagttgtggtttgattaaagattagaaaacacgatattcacccaagcctacagggcatttaggtagttgttgtggtttgattaaagattagaaaacacgatattagtaaatagccttgtcccaccactcatctagttgtggtttgattaaagattagaaaacacgatatattagcagttgaaccatacgctctaaaatagttgtggtttgattaaagattagaaaacacgatatgtgtttcttttgatgaagcctcggtattacgttgtggtttgattaaagattagaaaacacgatataaatagaaagtaaagatagcacagaacatccgttgtggtttgattaaagattagaaaacacgatataaaataccaaaacgcatcaataccgccccagttgtggtttgattaaagattagaaaacacgatataacttctcctccagtctcgcacttggtgtggttgtggtttgattaaagattagaaaacacgatatccctttaggtggttttaattatatgggcacagttgtggtttgattaaagattagaaaacacgatatcctattattgcgcgaatattataaagcatagttgtggtttgattaaagattagaaaacacgatatcgtccgggtagagcggttcgttacctccccggttgtggtttgattaaagattagaaaacacgatatcgtaatatttttagtagcgccaccaccaccagttgtggtttgattaaagattagaaaacacgatatcttgtgtgcttgatatactttttacagatgcgttgtggtttgattaaagattagaaaacacgatatcatccatgcagccatagttccatcaaatgtgttgtggtttgattaaagattagaaaacacgatatctagtgcctttaatagtaatattgtgcaagggttgtggtttgattaaagattagaaaacacgatatccaaaaatacaagatttactaggtcatagtgttgtggtttgattaaagattagaaaacacgatatcaacctattcgcgacttctctctgaaacatagttgtggtttgattaaagattagaaaacacgatatcccaacatatgtaaaaaacctgaatccatcagttgtggtttgattaaagattagaaaacacgatatcttgtcctaattgaaacttaattgcattatggttgtggtttgattaaagattagaaaacacgatatctaatgatggaatcttggatgctattgagtggttgtggtttgattaaagattagaaaacacgatatcattttatgagtccgttatccactctgataggttgtggtttgattaaagattagaaaacacgatatccccgccgccgaatcccgcaaagattacaggttgtggtttgattaaagattagaaaacacgatatcaattatcaagtatagaaaacaatgccacgggttgtggtttgattaaagattagaaaacacgatatcaaagcacagccggtccagaaataaacacctgttgtggtttgattaaagattagaaaacacgatatccaaaaattgacaaggacagcaaagcgcgagttgtggtttgattaaagattagaaaacacgatatctcggttgcggatgcgacacatcaataatctagttgtggtttgattaaagattagaaaacacgatatccaccgattaaaagaggcattaaaaaaatagttgtggtttgattaaagattagaaaacacgatatcaaatacttttccgttctctaccttaatcgggttgtggtttgattaaagattagaaaacacgatatcatacctaatctcggagcagagcctaggttagttgtggtttgattaaagattagaaaacacgatatcagccaaacctagtatcactcaactttttcagttgtggtttgattaaagattagaaaacacgatatctgagtttgcggctgatgcttcgggtaggtagttgtggtttgattaaagattagaaaacacgatatcaaaagtttcatgcattattaattcttgttcgttgtggtttgattaaagattagaaaacacgatatcaaaattaccattaagagacggagacgcagagttgtggtttgattaaagattagaaaacacgatatcaaaacggctcttttaaatgtcattctagcggttgtggtttgattaaagattagaaaacacgatatctctttttcaatcgttcgtcggcattcttttgttgtggtttgattaaagattagaaaacacgatatcattaaaaatagagtatgtacccatataattgttgtggtttgattaaagattagaaaacacgatatcaacctacagctcatatattattaagtaaaggttgtggtttgattaaagattagaaaacacgatatcacagaacccaaaagagggcgaacctctatagttgtggtttgattaaagattagaaaacacgatatcaactcgccaattaaatcattcaggagtatggttgtggtttgattaaagattagaaaacacgatatccccagcggatcaacgcaatgccctccgcagttgtggtttgattaaagattagaaaacacgatatctttgtaatcaaataaacattcaccttattagttgtggtttgattaaagattagaaaacacgatatcgttcctctaagaatataaatacttcgactgttgtggtttgattaaagattagaaaacacgatatctatagtatcggcctcctcaattaagcgatagttgtggtttgattaaagattagaaaacacgatatcatcaatccgttttaaatctttacgaggtgtgttgtggtttgattaaagattagaaaacacgatatcttgccgcctgtgcttttatacgctccttttgttgtggtttgattaaagattagaaaacacgatatccctcggcaaaccctaacgtactggcaagctggttgtggtttgattaaagattagaaaacacgatatcatacgatggttttaagattctagaagactggttgtggtttgattaaagattagaaaacacgatatctattattttcttaaacgcattttctccctagttgtggtttgattaaagattagaaaacacgatatcagttggcttgctaccttctaattattaagactttaaagtgaaatatcgtttaaaaaaatgcttcttttttgcagtgataaggctagattgaagtgtttttttgttttaaaaaagttccaattgtgtaggctgtggctctttgggtatttcggagcgtccccaaaaattcatgatattgccaaattgcttatcggttattcttaaaacactaacttttcctagtgggggcaataattttttcaaacgtctttcatgggcatcggcactttcactacttgcacaatggcgcatataaacagaatattgcatcattgtaaagccatctttcataatgttttttctaaaaccagcagcattttttcggtctttggcagtattggtaggtaaatcaaaaaaaacaaataaccacataattctataaccatttagttccataattttggatattttatttttttccgtttgccactatagcattgttgaagagaacttgatgttttttgtaaagcaaccattaatgggcttttttcatttttaaaatatacggttcttgtaagtacctccaataaaattgatttaatttctgtgtttaattcttgctcatcataatgttgcattatgtggtgaacggcttcatccactaaaggcctaaagggttccataatatcatctgccaaagcaaatgcattatatttacttttgtggtgaattcctaatgtgtttagtaaaccactcccagacaatgctcttgcagttgcagctctcaaaatggcatagccaaagtttaagaaattatttggatagttcccaaaacgttcccttttgaaatctatagaaaaaaacgatttccaataaaaagctgcagcaacaccttccatatttgatgtatctccactcaatactttacttgttagatattcaaatttgttttcagaacctgttatcgttttaagcaataggccttggtttctaattttttcaacaactgtttgttgccataactgcttttttaaaggtttactggcttctatttgatatttgaatatttcttgttgtatatgatgactatttagatttagcaacattccattaggaaggtgtttcgcatcacatataatgcaagcacaattgttagtgattaatttattgagagcgggaatactaatatatgtttcattatgatctattactataaaacctatgtcttcaattgggattgttgtgtttctattctctgaggcgattactagctgctcgtttgatgtagtaatagagcacttattactaaaaaaaagtgtttttttaatcataattatttatttaatagttttaaaaccaactaaatatttagaaattatggggaaattaaatttaacattttttgtagaaaattcgtataattgattgatttttatttgtaaaaaaggattattaagctgatttaaggaatgtgtttatgttaattgttaaaaaaaaacaaattcaacaaactattagcttgggaaaagaataaaaaataaaccgacttcttagttctcaaccctctggagttgtctatctaagctcgtggttagcagaacatgggttttcaacaccattatgaattttataaaaacagtaagtgatttagtctagaaggaatgatctttccctcttttttcaaaagacgcctattcttcaatcccttttttaatttcacttaaaatcccatggacttcttcaagagatttattcatgttttgtgctaaaattatttctgtatttccggcttttggcttttctgaaatggcaacttttaatatgtctattatggtttggtaaagttttttgttcaattttaaaattggtttcattttcctgccaataattcttgctgctgccgttatcatttcgaagttatcatcaaatagatccaaatgattttcataagcttcttcttcatagaaatcccacccagattttaaaagcaacgaaatgtcttctaaatcttttgtcctatcctgcttatcattccaagaaatcaattttagaattattaatcctactacaggcgaagtaggtaatgaaaacccagcatcttctattgatatgtcttcagcatattctccaacttccttgaaacctaatacgcttaacgttatatcacgttctgtaaagtttacagtatagtcttgttcaatctctccataaggcattaggtctagtactgtattggttttatcataaaccaatctgtaattctcttttgtacgcctaaatcctttttcacataattcatcaaacaatttgtcgtacactacaaaatctggaatcattactgcaaaatcgatatcagccgtacctctagttggttttatacccgccttaaataactgtacatctctggcattcgcgccaaccaagtaatattttatattattttcagaaaagactttttctaaaattttatatacttcgccatgataagcaaaagaataatctttataagttgggttcaatgtactcatcaaatataattttggctgtttctaaatttctatcactattactgtaaagcaattctgcatatattagtaaagggtgggctgctacatcactatcttgatattcatcattacaacttccttgtttccaaaaaggactgtaaacgataatttctccatcttcattaggaataagcctgtaatctttaataaggtcttgtttaggtcgattagtgaacaaggtatatttttctggatttagataattagttaatattgcagctccagattcgccgccccagcgtgtttcaaattcagggttcttttctttaatttcaaatcgattttttgaaaaactataagtgcctattctgtaggtaggtagtattttttcatttaaaagcgttatccatttttcgagaagttcctccctacgcactaattgatattttttatctgagtcccattttactgcaaatgcctcttttaaaagtccattaatagttttgcttacactgcctaatgaaacctgactaatacttgccaactgttcgtaattagcattaatcaattctggattttgtaatagatgaaatagaatttgaccacctgctcttgtaaatacctctgaatatttattgtaaactggttttgaatttccttgctctacaaaaatttttaaatgctttaaatttaaaaatgcattaccaaaactatctatataattaattttattctgttttagaaacgcttttgcgtttggagtaatataatctgcaacaataagtagtggcttgtactctttagataatctaataaatggaaaagtgttgtttggtctaatttctgtcctaacttctgcatatactttctctttgttaatgtttataataatatcacataagagttccttttggttctgaagcttttcgatgtcaacatcaaattcaagtttctcaaaaaagtcttttattttctgaaattcaatcatttttcatttttttaattatttcatgttacatgaaaacacaaatataatgaaaatattaacatgtttattaaaaatgaattgtagatgcggtttatggtaaaatatgtaattcatttaaaatcattagagtaaaacttcagttgcatcatctagaacataattgctaaagctttttagataagtttgagtaattactatgttttgatgacctagtgattcgctaatgatatcagttgatattcctttgaattttaggcaagtcgcaaaactatgtctggcgacataagtggttacttttttctcaattgaagcaagagccgctatttcttttaatgctttattatagagccccataaccttgtgctttctattctctatttgctttaaatctaatttttctcttagtaatatgggaaaaatatagtttgtttcggatgggtaatccttataaaaatctagaatttctctcacaggctttatcgtttttacttgaaaattaactttcgttttagaacgcgtatagaatatcctatcatcaattacattatcccaggtaagatgtatcatgtcggcaaaattcattcctctcgtgtagaaactgaataaaaaataatttttgtaatggattaagtgtgggtgttcatttaagactaaagcaactattcgatttatttcatcaagtgataaagcgcttttaaactttttggcttttaattttgagattttatattttctgaaagggtataagctttccggaatgtattcatatttaattgcggtgttgaatatggctctaagtgctcgcatacgaacaccaataccaccatcgcttccacctcgtgaccggagaaatatttcatatctgtctagatatccataatttatttctttaaatgtgaggtgtctacttctgttaaatcgttttaaagagtttaaagtatcataataggctcttgcattccctaatctaccagaagatttcatgtcttcaacaatcttgtctcccatggcaaaaatgttttgattaatagggtttttatttactctaaaaactttttcaaaatcctctaatgtgtaatatgcattttctatttcaagatcagtaataattttataggcacgatccttatacttatttaacaacctattattttgaatgtaattctgatttttcttactaaactcacccgttttagtacaccattccgactcaaaaacagaataaggtgttttaaaaaattttgatcttctattttttgatactcgaagcgatacaggaaacctatcattagctaacttagtttttcttaatacggcttttattgaggtcataattactattatttcagtacaacatatgtacaacaaatggtcgtataaaggtaaaataaatgatgtcaaaagaaaaataaaaaatgttaaaatactgaaaatcagataaatacatacaaatgaagccaattgaaaagcacttttaaaagactgttaatcagagggtccttggttcgagcccaagagaaggagcaaaaaaccacttaagaaattaggtggttttttttatgccttaaactttccttgtaataactgtatttgctaaataacccacattttacttcaaatgccagcttgtcaagttatttgatgaaagtcctgtgttacaaagagtcgatcaagtaaatatataaatagggttaattgtaatggcataacttttaaaattatagattgaatatataaaccaaatcgaccaaaaatcaatcaatcaatcaatttaaatcataaaagtgaactaaaatatattgccatcaaatcataaaaaagaaagtcgcctaaaaaatgctttttaggcgacttataaaatattttcttgaaatagctactatttgttcatgtttttcatttcttcagtaaaggtatctaaatcaacaccattgttaactaaagtcaatgctttgtcaactatgtattttacattatccacatgaaatccaagtccaacagcaatctttcttaataaagtctcttcattatcatctttaatatgatccacataaaccatccgcgctaaatcgtataatcgatccaatcgctggtcgtaagaatgtggcgcgttcatagggtgcgaattataattttttaaaattatttcataatctccttctccaatatctaacttacgggctaaacggtctaaaaacgctttttcatcatctgtaataataccatcatccatggcaacacgaactatcgaagcaaaatgattctcattacgctttttaaaaccactatcaaacaaatctgaaaacgacatatattcttttttt

SEQ ID NO: 3848 - DNA, 10111 bp, synthetic construct
  source 1..10111: mol_type = other DNA
  misc_feature 1..10111: note = Synthetic
cgcctggaaagatgtaactatcaacggcaacctttacaggagtcaaagagtgttgtgtacaggcagggcttatgagcagtacctgacaatcttcaaacccggcgtcctcgaagattgccgccgctatctcgatgaagcggaaaagctggcggaaaacgacctgattaaaaaaagaatcgaatttatgcggacaggacttcgctataatgaactgacgatgaaggcaatcagggcaacaaaaaaagtggaaagcctgggctttccgaaattctatcagttcaagctgacggaacacctgccatacccgattgaacaggccaaggcgaagttgacagaaatcgatagagataaggccaaatcatatctttcagaggctgttgatgcctggcgcgaaagagcggaattcgtgaagagcattaagagaaccggcactatgacttactactcttaccacaaacagtttgacccctcgaattcactaaaccaacttctcgattgctataaggaaaccaacttatgagcaaaacgccggaattgtcccgcagagaatttctgaaaaaatcctcacagcttatggccggcggtttggctatgggtgcagcgcccgcaatactcgcagaccggcagaactccccgcaaaaacaccccaacctgctatatgtctttgctgatatgatgcgaggccaggatatgaggtgtgtcggcaacgaacagattattactccaaacttcgatatgctggcaaagcagggcgcacttttaaccaatgccatttccacctatcctctttgttgtccctatcgcgcaatgctgatgacaggacggttccccctgagcaataaggtcatagcaaacggcccgccgcttcctgatgatgagctttgtatcgcagaaatcttaaaaaccgtcggctaccagaccggctacatcggcaaatggcacctgaacggccacacggaaaccaataccgttgaggagcagtttgtcccgccaggcaaaaaacgtcacggattcgattactgggccgcactgaacttcaaccacaattatttcgattcgtattattatggcgacaagcccgaaaaaattccgcttaaaggctgggagcctgatgcccagaccgatttggccattcaatatatgaaggagcataagaacgcccccttctgcctgtttctttcctgggggccgccccataacccttacgttgcgcccgaaaaatacaaaaaaatgtacaacccggaaaaaatcaagctgagagaaaacgtatttcggacactggagagcgcaagaatagattattgctcctattacgccgctattacttctctcgactggaatatgggccggctgatggaggcaatggataaattaggcatcgcagacaacaccatagtggttttcacctccgaccacggcgatatgctttattcgctggggctttacgaaaaacaattgccctatgaggagtctattcttgtcccctttattatccgctgcccgcccaaaatcaaaagcggccagaaaaacgacctgcttctgggcagccccgatattatgccgaccctgctcagtcttatgggcgtcgatatccccaaaacagtggaaggaaaagacctgtcgccgttcatcatcgaaaacacaacggagccgcagcccgactctgttcttatcgagaccattctcccaacctggcgcatagccgacaggatggggcttcgcggctggagaggcgtcaggacaaaaagatacacctatgcaaaattcagggaaagcgactggatactaatggataataaattggacccctatcagcgaagaaatcttgtttataataaagaatatgatagtctcaaagaagagcttaaaaccaaactcgactattggctcaaaaaaacaaatgacccgtttttgccggactccgcatattacaacgtcaggaccgatatgattcacgacaggccgccgttgtggcctgcactgagccctgtcgaagtgaagccggaaaaatagaaaatacaaggagaccgctttatgagtaaaatgacagaactgtcccgaagagaattcctgaaaaaatcctcacagcttatggccggtggtttggctatgggcgcagcgcccgcaatactcgcagaccagcagaaaccgccgggcaaaaaaccgaatttattgtacgtctttgccgatatgatgcgaggtcaggatatgcgttgcaccggcaacgagcagattatcacgcccaatctcgaccagttggccaaacaagggacacttctgacaaacgctatttccacgtatccggtttgctgcccctatcgtgcaatgctgatgacaggccgattcccgtttagtaacaagataataacaaacggtcccccgctgccggaagaagagctttgcatcgcagaaatattgaaaaccgtcggctaccagacaggctacatcggcaaatggcacttaaacgggcatcccggctctaatgcaggggcggggctgcagtttgttccgccgggtccgaaacgtcagggctttgattactgggcagcagctaacttcattcacgattactttaaatcttactactatcgcgatgaggacaaaaaaataatgatagaaggctgggagccggatacccagacagacctggccatccaatatatgaaagaccataaagatgcccccttctgcctgttcctctcgtggggaccgccgcacgacccatataccgccccggaaaaatatatgaaaatgtatgaccctgccaaattcaaactaagagaaaacgtgttctggggacaggatggcgcaagaaccgactatcattcttattacgccgcaattacttcccttgactggaatatgggccgcctgatggaggcaatggataaattaggtatcgccgataataccatcgtagtctttacctccgaccacggcgatatgcttcactcgttgggccttcttcaaaaacaattgccttatgaggaatccatcaacgtgcctttcatcatcaggtatccacaaaaaatcaaggctgaccgcaaaacagatttattgctcggctctcccgacattatgccgacactgttgagcctgatgggcgtggacatccccaaaacagtagaaggaaaagacctttcgccgtttatcacaggaaacgcaaccggcactgagcctgattcggtcctcattgaggtgatttcgccttgcggcaggtatctggacaggaccggtttgcgtgcctggcgaggcgtgaggacaaaaagatataccttcgcacgcttccacgatgaagattggctcctgttcgataacaagctcgacccttcccagaagcgcaacctgatttacaattcagagtataaacctttgcgcgatgagctaaatgccaaacttggcgaatggctcaaaaaaaccaacgacccgttcctgcccgcctcagcctactataacgtcagaacggaaatgattcacgataaacccccgctctggcctgcactgagcccagtcgaagtgaagccggaaaaataaatcgggagaacttttatgaacaaaagagtcttgtttggtgtatgcattttggcaattctttgcttgcagggacaaattcttgcagaagccgactcggctgctatgcagggtgaaatcacggtctcgacctccgaaaaaatcggcgagataaacccaaatatctacggcttgtttgcagcagactgttaccacgagtttaacggcggcctctgggcagaaatgctcagaagccgaaaattcgccgaagacgacagagaagacgacaaagacagctacggcgttgtaaaatactggttcgccatcggcagaaatgaaaaaacgcactttgctcacgacgcaaccacattttactgcggcgcacgctcccaaaaaatactaaatgaaaacgtgccgcagcataaaatcggcatcagccaaaaaggattatgcctcgacagctcaaaaaactatcaggtcaggctcaacctcaaacagaaagacataaaaggcccggtgattatcgctctcgaaggtgaaaaaaccgtttacgcccaaaaggaaataaccgtctcggacaaggactggagccggcattccttcaccctgaaaccttcgcaatcggccaaaaacggcagattcaccataacctttaccggccccggcactctctgggtcggcaccgcctcgcttatgcctgacgataacatttcaggctttagaaaagatgtcattgaggctttcaaagccattcaccccccgaacatacgcggcctcggcggaaataatatctcctgctatcgctggcaggacggcataggcgaccccgataaaagaccgcctcgttttgacaaggcttttccagatgacgaccagtggatatcgaacgatgccggaacggacgaattcatcgaactctgccgattggtaggtgcgcagccgcttgtggttgtcaattcaggcgatggctcagcccaggaagcagccggttacgtcgaatactgcaacggcagcactaaaaccaaatatggcaaactgcgggccgaaaatggacaccccgaaccttataacatcaaaatttggggaatcggcaatgaaatgaatggcaactggcaaatcggccacgtcgatgaggaaacctacgccgcaagacatctcgaatttgccaaggcaatgctcgctgcggacaaaaatataaaaatcgttgctgtcgggggcaggtattggaaattcccgcgatggaaccagatgcttttcaaaaccgcaggaaaatatatcgactatcttgctcttcactcttacgccaaaaaatacagagccaccctcaaaaaagagcagctcaaagaccccaagttcgccgaagaagtctattactacatcgtctcctcgccctatggaatagaagagcagattatcgaaacggacaaagaaataagaaaaagcctccccgacaggccggatataacaatttcattcgatgaatggaacgcgtattaccgcaaggcacttcacgaggaaattaactttacgctgcgggacggcgtctacaccgcaggcgtcctccacgcattcagaagacagcacaacgctatgggtatcgccaacttttcgagaatggtcaacagcatcgggatgatgaaagtaaacaactgcggcttattccttaatccacagtatcttacgttcaagatgtatacgaatcactccgggccgacgctgcttaaaaccagcgtaaaatgcgataccttcgccgcaccggattatgaagaaggcaggccgcaggccaaaagcaaaataccatatctggacgtatcggcaacaatggataaaaatggaaaaactgtttatgtggccgttattaacttacacgcagataaggacataaaggcaaaactttcatttgaccgctgggatttcactccggatgttaaaaccattgagctttatcaccctaactatatggctgaaaacacgttagagaagccggacaatataactataaaagaaaaccaactggcagggataagcaatccgtttgagtatacctttaagccgcattcggtaacaattatggagttccagaaaaaataaacagccgtaacctattgacaggcaaggaaataacgaaaatttttaatctcagaaattgttaaaaacagggggagaattttggggttttaggcggggttgcaagttgcctagactgttccgtaaagcggttttttggcaatatgggtaaaatttaacgatggcgtaagccatccccaacgggattgtagaggcggatttggcgagtgctaactgttatcagatgttatcagttgtaatcagttgtcatcagttgtaatcagaacacactctaagtgattcagaagcactccaaaatacatcagagatacgtcaaaatgcatcagaaaacaccagtgtttttggttaagtattgtcataacaaggacttaaatgaaatcgaaccacggattaacacggattttcacggattttttttatttttagctgccggacaggaggttgtttatggctgaggtgagtgcggtgccgtttcattttcatttgaaagctccattaaattttatttcatccaacattgggatatagagtctccctataattgagcggagatgcgcatttgggttgaccctacttcgccctgcgggctacgaagggcaggcaaaaaagagataagttattatgggataaagagtaaggggtgttgtaaaaaattttattttttcccatatttggcgaagagtgggtgcgtatttgattgaatcgtcgtgctgggcacggggtgcgtattgcggagagcagatgaaaaattgcccttcgactcgttgcgttcgctcagggcaggctctattttaacgggtaaaattttgttgaaagagattaggatttggggtattttgtgatgtctaaaaaggattcgccccagcagatattcgttaaaatacctgctggggcattgtccgcgtgcaaccagcaaagctggtgccttgttgtgaaaagcacgcagacacaggttagttacaataaatcggtctttaccataaaaaagagggctggtcaagagggaaaaataaaaaattatggattcccgtttgcacgggaatgacaataattacagaggagaatttttatgaacgattacatgctaggattagacattgggtcgaaaagtatcggctgggtcttattaaaaacaaaagaaaaaccttcaatacctgatattggggtgcgagtttttcctgaaggagttgagcgtgacaaaggaagcgaaacatcgaaatataaatcacgtcgtgaagcaagggggacacgcagagtaattcaacgaaggcgttttagaaaaaacaaactaactaaaattctttcacaagctggcttattacctcagaataaagaattattgcgcgaattgttacttgatagaaagatagataagaaacaaagagacctccatccatacaagctacgtgccaagggattaagcgaaaaacttgagttatttgaatttggccgggtactttaccatctcgcacaaaggcgaggatttaagagtaacagtaaaaataaacagcgtgaagaaaaaaacaaaatttcggaagaaataagcgacctccagaaaaaaataaatgcggctggctgtcaaacattggggcagtatttttcgacacttgatccgcacgaccaacggattcgcggctggtatacttcgcgaaaaatgtatgaagacgaatttaatttgctgtggaaagaacaatcaaagtattaccctgatatcctcactggagaattactgaaggatatctgtgatgaaacaatattttaccagcgacctatgagatgggacccacaaacgattggggactgcgaacttgagccaggggaaaaacgttgtccacgaggcgactggtatgcgcgtcgatttcgaattctacaagatgttaataatctaaagattcggaatcgagacggttcagaaagaaacttgaccgagaagcaacgcgaaatggttctcggcgaactcgctcgtaaagcagaagtatcttttagcggtttgcgcaaaaaacttcaaaagctttcgggcaatgatgggatgtatgaaactgaattatttaatcttgaggaggagggaagaaaaccgaaggtaaaaggtgatgaatttgctgccgctatgataaagatattaggcaacaagatatgggacaccatagaagaatataagaagatagaagttaatacctcccttttggaactcgaagacgacaaatttgcagaaaaaatggcaaaagaatacaacctcaatcaagagcaaatcgaggcaattttaaatatagacttgccgagcaaatacatgcattattcgcgcagggcaatacagaaacttttgcctgaaatggaaaaaggatctttaactactgaagccgtaaaagaagtttatgaagaacacgatgataaaccaaaaacaaaatatgcggagcgagatatattggatatgccccccaatttgcgtaatccccttgttcaaatcgctttattagaggtgcggaaactaattaacagtttgattgccgaatatggtaagccaagcaaaatagttattgaaatggcaagagacgttaaggggagtaaagaggaaagactcaagcttcaggataatatgcgtgaaaacgaaaaggtaaataaaaatgccataaaaaaattaaaagaactgggttatcaaataaccgctgataatatattgaaatacaaactatgggaagagttacgcggtcatatatgtccatatacgggacggtcgatttctgacgttgctctttttggacaatatccggaatttcaggttgaacatattctgccgtattcccgcagtctggataacagctatatgaacaagacactttgcgaggtgcatgagaataatcacgtcaagaaaaaacaaacaccttatgaggcatacggtcacaatccggagaaatatgagcagataaaacaacggacagccgcgttgccttggccaaaacgaaaaagatttcttccgccgaaagaaggtgaaaactcaataaatctcgatgagtgtataagtcgtgaactaaacgacaccagatatatatgcaaagaggtcataaagtatttaaaacggcttggcggaattacgattaaaggcacaaaaggaagggttacttccgatttacggcacagttgggggctggacacaatacttgatacttccggttccgcggttaagaatcgagctgaccatcggcatcacgcaattgatgctgcggtgacagcggtaacaaccaacgagcatttgcacagattagctgaaagcaaatgtcccgaaaacaacgtggagtttctacggccgtggccacattttcgagaagaacttgcagaaaaaataaagcacataaacatttcacaccggccaacaaaaaaaacatcgggcaaacttcacgaagaaacctcttacggtttaacggacgagacaagacagtattttcaagacggaaagatgacacgattgtctcccaatgcgtggctatgtaaagaaacgcttaactatatttacagcaggacaccagcagaaatctttaagacagtcagcgacctggatgtgatatcaaaagattcgaaaaatgtaagagaagccatagaaaagaaatttattcagaacggtataaatattaaagacaaacacgctgaaataccggaaagcatttttgatgaaaaaatttatatcgaaaccaaaggaggtaaaaaaattcccgtcaataaaattcgggtaagagtgcctatgagtaatatgataatttttaccgaccaaaatgactcgccgtaccgtgcgtgtcctgcgggggtaaaaggtggtaatcatcatgttgagatattcgaacagactgatgaaactggcgaaacgcaacgaatcgccaaaataatttcccgcattgaggcagttcaacgacggcgtgaacgtaaggctgttgtacaaaaggatagtgtatcaaacaccaaatttatatgtgcgcttgccataaatgatatggtgctaatgccaacaaaaaatggagacagggatttataccgagtacaaaaaatggatgtaaatggaacagtttgttttagacatcacaccgcggcaacgcttgacgataactcacagagaatctttcaacaggcacatctcttttcaggtaaaaaagtagacgtggatattcttggaagaattatgtcgtgcgaataaccaaaaaaggcgtttaaggggtggtgggaatttgacgatgaatgggttgtgtgggttgtgtaagaaataaaaccctctaaatattctggaccccagataaagacgttctggggtcttcgctacgctacgagggggtaaatgataaaaaagattatagaaatatcgcaggcgaagacgcatttggcgattcggtacggccaattggtcatcaggcaagaggaccctacttcgcccactcgtgcttcgcagcaaaacgccgcttcgcagagtagcaaagggctacgaagggtctccgcttcgctacgagaaacaagtataccctgtgaagatata

SEQ ID NO: 3849 - DNA, 5008 bp, synthetic construct
  misc_feature 1..5008: note = Synthetic
  source 1..5008: mol_type = other DNA
acacctgcgatgtttgcagagttgaccgatcatatctggtctttgcacgaatggctgacttatccggctgttcaattaacataagacacaaggaaattttatgatttgcaaaaaatgacaaaaactgacacgaattgagcattttttgacaaaaatcgttcactttttagcacttttttacacttttttacaaaaaaagatacttttttgacaccctcattaaaaaaagaccgcctgtgttaaacgtgttaaaataggaaagatgggaaaaagatttttcaccgcaaagttcgcaaagggcgcggagttccagagggtctttagtttaagaaaagatttttcaacacgaagctcacgaagaacacaaaggaattttagacgcagattttttggggggtaaaaggattgacaaaaagggaagttttgggtattatacggggtattaaaaggattcgccccacatagcgtcctaagatgctacatggggcgttgtccgcgggttttcacccttgttgtgaaaagcacgcagactcagatcagttacaataagcggactaataacatatgaagagatgttagtcaagagtttttttatttttttcgggagagttatcatgaaatcttatacgctggggctggatatcgggtcaaaaagtatcgggtgggttttgcttgaaaatagcgggaagccctcaatttctgcgattggtgttcgtgtttttcctgaaagtatcggccgcgataaaggaacagaggtttcaaaatacaaatcgcgtcgtgaggccagaggagcacgaagacttattcaacgtcgccgatttagaaaagatagacttgtaaaaattctgtgggaagcaggatttttgccacgagataaaaaagaattacatgatttactgcttgatgcacacacaagaaatgggcaagaacccaatatgtatccttacaaattgcgagccaaaggaatatccgaaaggttagaaaggtttgagtttgggcgtgttctttatcatttggcacaacggcgaggattcaagagcaatagtaaaagcggacaacgagaagaaaaaaacaaaatttctgaaggagctaatgaacttaaaaaaaagattaccgatgccggctgtaaaacattagggcaatattttgcttcacttgatccacactctgacagagttcgcggatggtacactttcagagatatgtatcaacaagaatttgaagagatatggaaaaagcaggctgaatatcatagtgaacttaccgaagaactgcgcaaaaaggtacaaaatgaaactattttttatcaaaggccattaaggtcatctgagcatcttatcggcaagtgtgaattagaacctgaagagcctcgttgtccacgaggagactggtacgcgcgaaggtttcggtttttacaagatgtcaataatctgaagattcgaaatcgagacgggtcagaaagaaaactgactgataaacaacgggaaatcgtgcttgatgaactcgaaaaaaaatctgaggtagcatttagcagtttgcgtaagaaactccaaaagctttccggctgtgatgcgagggatgcaaccgaaattttcaaccttgaagaggatgggcgtaaagaaaaactacgcggtgatgaattcgccgccgcaatgataaaaataatggggatcaaaacatgggagagtacgaccccacagaaaaaagtggcaattaacgatgctcttctggaactggacgatgacagtttcacaaaaaaaatggccgaagaacacgagcttaaccaagagcaaattgaggcgatattagatatagagctacccagtaaatatgttcacttttcacgaaaggcgatacaaaaacttctgccgtttatggaacgcggatttttgacttctgaagccgttaatgaagtgtataaaaacagagataagggggtaggagaaaaaccaaaggaacaagagagattaggtattccgccaaatctacgaaatcctcttgtacaaacagccttgcaagaggtacgaaagtttatcaatagtctaatagctgagtatggtaagccatcacacattgtgattgaaatggcaagggaccttaaaggaagcaaaaacgaacgacttgaactacaaaagaaaatgtgggaaaacgagaaggtcaacaagaccgccatagtaaaattaaaagaattaggttaccgaataacatcagataatatattaaagtacaaactttgggaggagtgtggatacaagtgtttatataccggccgctcaatttctgataccgctctttttgggcaacatcctgaatttcaagttgagcatattttgccgtatagtcgaagtcttgacgacagttatatgaacaaaacgctttgtgaagtgcatgagaatatccacgttaaaaagaataaaactccctacgaagcatatcataacaagccggaaaaatacgaccagataaagcagatgatagctgttttaccttaccccaaaagaagaaaatttcagcaggaaggtattaatcttgatgaatgtattaaacgtgaacttgaggacactcgctatatatgcaaagaagccatgaaatatttaaaacagcttagcggaataaaagttagtgggacaaaagggagggtgacttcagaattgaggcatagttggggattaaatacaatacttgacaccacgggttcgggaattaaaaatcgcgcagaccatcgacaccataccattgatgcagcggtggtggccgtaaccaaaaatgggcatttgcgaaaacttgctgaaagcaaatactcagagattgattctgaatttccgcaaccgtggccgcattttcgcgaagagcttgccgaaaaagtaaagcacataaatgtatcacaccggccaacaaagaaaacttcgggaaaacttcatgaagcgacctcttacggattaaccacagaagtaaaacggcacttcgatgatggcaaaattatgcgactgtcagacaacgcatggttatgcagagaaacgtttgattatgtttatagcagaactcctgccgaactgtttaaagccgttgccgatttagatattatccccggtgatgcaaataatgtttgggaagctgtggaaaaacgacttgttaaaagcggaataaacatcaaagacaaaaatgctgagatacctgaaaaagtttttgctgaaacggtatttattgaaactcaaaatggcaaaaaaattccaattaaaaaaattcgcgtaaaagtgccaatgagcaatatgattattttaaccgatcaagacggaataccgtatcgagcatgtccggcgggtgtgaagaacggcaaccaccatgttgaaatattcgagcaaaccgatgggaatggccaaacaaaaagaatagcaaaaattgtttctcgtatagaagcaacacggcggcatagcgaacataaagctgtggtacaacaagatcatgggccagatgcaaaatttgtatgtgcgcttgccataaatgatatggtaatgatgccaacaaagaatggcgatatagatttatatcgtgtgcaaaagatggagataaacggccaagtttgctatcggcatcacactgcagctactcttgatgataactcccaaagaatattgcaaaaagcacaccttttcacaggtcaaaaagtcaatgttgatatgcttggaagaatcaaaccagtagaatgattaaaaaagtgatcgagatatcacaggcaaagacgtatctgtccattcagtatgggcagcttgtgatttctcaggagcatattgagaaatcgcggataccatgcgaagatgtcggggttcttttgattgaccatgcggggacgacttatacacattcggtatttacagaactgctgcggtgcggtgcggcgatagtgctttgcgggggcgaccatcacccggcagggatgcttttgcctttagagagcaacagcgttcaaacggaaagattcaggcagcagatagaggtaaaagagccggtaaagaagaagttgtggcaacagattataagggcaaagataaaacatcaggcaaaaatagtgggagaggacagtgagatttacaagacgctaatgggattgagggagcaggttcgttctggagaccctgataatatcgaggcgcagacgagcaagaaatactggatgtattttatgcaggatgttcgttttcatcgggatattaacggagcagcgccaaataatatgctcaattacgggtatatggtgatgcgggcggcggtggcgagggcgttatgttcggcggggttactgccctgtcttgggattcatcactgcaaccgatataacgcatattgtttagcggatgatatgatagagccatttcggggttttgtggagtcaaaggtaaaagagatttgcgagggtgagggcggcgtgcctgaggaactgaatcaggcggtgaaggcaaagttacttgaggttttgtatgagccggtagagatagcggggttcagcgggcctttgatggtcgggctgcacaggactatggcgtcactacagaggtgttattgcggggaacaaaaggacatagaattacctgaaatatgataataagcgggtacagggcagtgtggatttttgcgatgttcgacttgccgacagacacaaaaaaggcgagaaaagactatacttattttcgaaaaaatcttttaaaagacgggtttagtatgctacaatattcggtgtatgtaaggcattgtgccagtgaggaaaatgcggatgttcactataaaagggttaagagttttcttccgcctgatggtgaagtcagggtcgtcgggattaccgataagcagtttgcacggatggaaacttactggggaaaaatgcggaaaccggccactgcttcaccccgacaactggaattattttaagcgacctcacctgcaaacccttaaagacaaaggccttgcaggcgaggtattgtaactgatccgagcctgagtgcaagccacaact

SEQ ID NO: 3850 - DNA, 23381 bp, synthetic construct
  misc_feature 1..23381: note = Synthetic
  source 1..23381: mol_type = other DNA
cccaatgaacagcttggctctcagcaagaagttttacagctggtcaaatcaggtgccattgaaatggcgattgtttctggcacccagctagagaacgtcaacaaggattttcaggtattgaatatgcccacgacgttcacttccattgatcaccaaatggcggttttgaaagatgagtccatcgtcggtgatatctttcattcgctggaaaagagcaataacatcacagtgctcggcggctatacccaaggtagtcgtagcgtctatacgacctttgggccagttaagacaccagcagacttgcggggtaagaaaatccgcgtccaagaatcagatatgcatattcgcatgattgagttgatgggcggctcagccacgccgctatcctacggcgaggtttactccgcgctgcaggcgggcgtccttgatggtgctgaaaacaatgaggtttcctacaacacagcacggcacatggaagttgcaccctattactccaacactcatcacctgatcggtttggactacatgattatgcgtgctgacttgctcaacgccatgcccgaagcagatcgcaagatcttctacgacgcctggtataaatcaatggatttccacacccagttgtggaaggaatacaccgaagaatccattgaaattgctaagaaaaacggtgcccagttctctgatgtagaccaagcagccttcgctgaggcattagccccgataaaagacgaattccttaaaacggactatcagcgtgagctctacgacgagattcgcgctaaggaagctgaggtggagcaacgatgaaaaccctacataaatggttaaccagactaactggctggttgtgcatcatcttgtttgcgttacttgtagtgacgacggtctggcaagtattttcgcggctcgtcctgcactctccggttacctggtctgaggagttagccaaaatattgttcgtttggctaagtttcttaggtgctgcgctggtttacggtgagcgtggccacatggctgttgaaatccttgcgcggcgtttctcagaaaaaacagaacgcggtctagcagtttttactcacgttgttggcctagtgtttgcgttagtcgttttgacttggggtggctggaatgctgccatgaacgcctggacacagaatctgaccgccttgccgatcaatatcgggtctgtgtacctggttatgccactggctggcgtcatcatggctgtctatgccgttgatcacatcatcgagattgggcgtggggataggagtccatatccgactccggaggcagagcttgcggtagctgaaggtgaaaaggtggctgccgaagcggatctcgaagaagcaaatctgaatggagttgaaaaatgaccccaactgctgttgccggtttgatcctactaatcggcattattttctttatcgcctcttcgactcccatcgctgttgggatcgggttcacggttgttatcgccgcaatggcgatcatgtctcctgatgtggcagccatgtctatctcacagcggatgtttaccggggttaactcgtttacgctgctagcgattccgttcttcattttggctggcgtgttgatgaattatggcggcattgctgcccgattgattgatgctgccaaggtgttggtcggtaaaatgccatcgtcaatggcgcaaacgaatatcatcgctaatgcgctattcggcgcagtgtctggtgcagctgttgctgcagcgtccgctatcggcacgatcatgaacccgcgcatggttaaggatggttattcgcgtccctacactgcggcggtaaacgtcgcatctgcgccctcgggcatgttgattccgccatcgaatacgttcattgtgtattcgctggtctcgtcaacatctattgcggcattgtttatggctggtgtcgggccgggcgtcctgtgggtgcttgcctgctgtgtcgtcgccttcattttgtatcgccgttacgagaaagacaatgttcatgttcccgaagagcggccttcgctgtcggttgtgttggtgactctgtggcgcgcgattccatccttgttgatgatcattatcgtcatcggcggcatcatcggtggtttctttactgctactgaatcctctgctatcgcggtcgtctattgcctaattcttggtttcctttaccgaaacattaaggtgcgcgatttgccggaaattctgcttggggcaacccgcactacggccgtcgttatgcttcttgtggcggtctcgtccggtcttagctgggtgatggctttcgccaggattccggcgatgatcaccaatgccttgttgggtattaccgattctaaggttggcattttgattatcatcatgctgattttgttggttgtcggtactttcatggatccgacccctgcgattttgatattcgtgccaatcttcctgcctgtcgtcactaagcttggcgtcgatcctgtgcattttggtgcgatggtcgtcatgaacctatcggttggcgtgattaccccgccggtcggtaacgttttgttcgttggcgctagggtagcggggctaagaattgagcccgttatcacgaaactgtggccattcctggtaggcatcattgcgatgctcttcgtggtggtctttgtgcccgaagtctcgctttggttacctacagtttcgggcttgataaagccggcataacttaattaaatacagacgaaatcgggtggccaatcggtcacccgatttcatttctaagacccgcaggcgggttggtgctaaagatacttagtgttaatgcaggctttccggaatcttctgaagtgggccagtttgcgtaacgcagtagctggcaactttgtttgcatagctgcaagcttccgccaagtcagcacctttctggagtggtgctaccaatgcgccgagaaatgcgtcacctgcaccggtagtatccacaacatctactggcacagaatctgcgattccgaagtttccctgtggatctaaatatgcagcgccgcgagagccaagtgtttggaccacgctgcgaggcccaaggtgggctatacgtcttaatgtttcttgtgatccggctagggatggggtgctccgtgcgtaaaatgctccctctacctcgttaactactatcaggtccgtgttgcgcaagatagcttctggaagatgctgagccggagaggggttgagtattgtgtacatttctttagcgtgtgccagatcaaacgctttttgaaccaccgcaattggcgtctccagttgagctactagaacatcattaggtttggctgattgtaggcggttcagcacgaattgggtgtttaaggcagtgccggcatttgggcaaaccacaatcgcgttctctccagaattttttatttgaatatatgcgcgtcctgttgggccgggaattctcgcaatattgctgatatctactccgcgttcttccaaataattgagagcgtgggaggcgtctaaatcattgcctactgcgcttattagctttacataattgcctagggctgcgatagcactcgcctggttcgctccctttccccctataccgcttcccaggttggacgctagaagcgtttctccagaagtgacaatccgttctactcccaaccgtatatccacattgactgaaccgaggacgaacgtgcagaagtcagcgacacccatttgctacaccttctctagtgctctgaatatccggattactcgtgaaagttaataatagctttaataaagttattttacttgatggtgactagttattcgagtaacctaaattgaaacaaaggagtttgtcgtggcaaagaagcctcccactcgatctgatgtggctcgactggccaaagtgtctgtcgcttcagttagttatgcattcgatgaacgtaacggcaaggtttctcccgcgacccgagcacgcattttagagattgcagaagaactcggctatcgcccgaatcgtatcgccggagggttgcgtcgtggccgtaccgatttggttggcatgatggttccggacattaccaaccctttcttctctgaactggcaagagctgttgagggtgagtgctatcggcgtgaccttatgctgctgctcgcgagcgtagataatgacccggaacgtgaagaggaatatgtcagatccctaacggatatgcaggttactggagtgattgtcacttcgaccaacgtggcgggcatctctcaagcggcgcagaaaaccctctttagttctggcatcccttatatacggctagatcgcaatggtggttcgacccagaacttaatcgctgtcgataatcgactaggcgcctatatggctgtgacacatctaattagacatggctatcgaagcttattatgcattgctggtccttgtggtcttgattcagctgatcaacgcgtgcaagggtgcgcggatgcgagtggcagcgccaaaggagtagaagtcaaaactttacgtggagaattcagttttgagagtggataccggctgatgtacgcagctcttaagcagtcagaggaacctcccgatgcggtctttgcttcttccgatgtgcaagcattgggagcgttacatgcaattcttgagactggtcaccgtgttccagacgatgtagcggtaataggttttgatggtgcccgtgagtcccgttactcttgtcctccacttagcacggtgaagcaacccatagcacagctcgccgcaaaggcggtggagtctctcttagctcaatctgacggcaagtcaggctttgaacacccaatgttgctttccccgaagttagttcgacgcagttcgtgtggctgtgtttgggacgagatggaggaggtgggtttgctgtagtttaactttccgcttaaggctagccattgttaagcctcaacggctcaacgatgggggtggaaatctttcctcagacgcaaaacgcaatacctgagattatcctgttatttctcttctccaggagacaatcatgcaattcttgctagtactgttgacgctcgcatgcgttgtgatcgtcgcaaccttaattctcaaacgtgttaacccgatcttcacgttcttcttctctggagtggtaattcttctgattgccaccgccattgaccagcagtctgttttaggcgacaaaacacttggcaatattttccttgacacctttggtcaaatcacggcttctttcaaatctactgtgtctggtgttggtgccattattatgaccgttactggttatgcggtctatatgagccatactaaatcttcggaaaaactcgcatatctggccactcgcccgctatctcaccttaagaatccttatttggtgcttagtggtgtctttgttgtgggtgtttttcttaagctagtgataactagtcaagcaggtgtggccatgttactgcttgcctccacattccctatcttgatggcagtgggaattcacccattaaccgctgcttctttactcaccttagtttgttttgactgggggcctgtggatggttcgacgcttttcgctgcagaagtagctaaaatggatgtggtcgatttgtttatacagcatcaggcaaagattgtgctgtgtgccatggtggttttggccatagttatcccattttattaccgttgggtggataagcgtgccattgagcatggtacccaggagttgtctgatcgaaagcatctagaaaatcccgcagtaccaggttggtacgcagtgctacctatactgccaatcttgattgttctagccgcttatttcattccgggcatcgatgtcgatgtcgtgacggccaacttcatctctctgttggctgtatttctaattgaaattgcccgtcgtaaggatcgcaaacaggttcccggagatatgaaagtggtgtgcaaggctatgggcggtgccttcagcaatgtggttatgatcatcatttccgcatctgtttttgctactggcattaagaagctcgggggaataaccatcattgcagacgctctcgccgaggttaaaggtgccacactgctgagtattgcgctcatggcaattatctgtttcctggccgcaatgataatggggtcgggagctgcgtcctggtttgcgtttggtccgcttgcgcctggcattgctgcaaaacttggcgtagaacagatcaagttccttattcctatggagttaggtgctggaattgggcgcggtgcttcacctgttgcgggtgcgaccattgcgatcgctggatacgccggacaggatgtcatggccgtcgttaaacgaacgctacccttgcaggtgctttcattcgctttagttcttctctcttcgctggttctcatctgagccccaaatgaaaggcaatgttatgtcagaaattaaattaatcttggactgcgatcctggctctgatgatgctgtggctatcatgttggcgtcactgtcggagcggatcaacctgctcggcattactgtggtaaacggcaatagaatactgccgaagactctggaaaatgcgctacgcgtagtccagtttctgggcaaggatattcccgtgtttgcgggtgcagagactgcattagtcagcgggctaatcaagtctcgtaaacctgatttgccacgggtaacccttaacgattcgcatggtgactatctcgcgctagaacctgccagaatcaaaccacagccgaagcgagctgcgcagtggctggtagaaaccctaatggaatctgatggcgaaatctcgattgctgcagtggggcctttgacaaatttggcgcttgcacttcgactcgaaccacgtattgagaacaaaattaagcagcttgtaataatgggtggcggaattgttggctccaacgctactcagtccgctgagtttaacttttatgcagaccctgaatccgccaagatcgttatggggagcacaatacccaagatgatcttgccgttggacgcgacgtggagagcgtgcattactctcgatcaatgtgttcagttgcgtgaattaggcacaaagtgggctaactacactgccgatctagtggagttgcgagtgaagggactgcaggtcaatgatgcttgtgagcacaacgccaaattgcgacacacgccgggcacagtcggcagcacgctactttatcgttacgagaacgatatggcgcccgtgcatgatgccctagcggtggcctacctcctcgaacctagcctagtcaaggaatacatcgaggcgaacgttgatatcgatatcgcgggtgggcttgctgatgggaggatggtagtagatctccacaacaaaaagaaaggttcagaacccttgaacgcaaaagtagccatcgatgcagatggcgaaactttctataagctgctgcttaccgcgttctctgagtaggcgaaagtcgtgggaatttgacatgtttgaaaacgttgccgggagtccaggaacaattgagttttcaggaatagtcccgtacctgcctactcctttacgagatggaaccatcaatcgtgaatgtgttactcgattagtggatgaccttatctctgcgggggtagagggactcgctccgctagggtcgactggggaggttatgtatcttgactcccggcaacgattcgacatggttgacgccgttgtcaaggctgcggcaggcagagcgccggtaattgctggtgtcgcagacttttctacccgaggaatacgacaacagataggcgaattagaggccgcaggtgtcgacggcttcgtgataattctgcagcgatatttcccgttgaccaaggaacagcagtattctttttactctgctgctgcagccgctactgaacttccggtagtgatttattccaattcgctgctaggtgacgacatctctgtcgatttagcagagcggttggcaggcatccctaacgtccgatatttgaaggatgcgtccagtaatacaggaaagctattttcaatccttgagcgtacggggaaagaattggatgtgtttgcggcatcagctcatgtgcctgcatttgtgtttgagcttggtggtgtgggttggatggcaggacctgcttgtatagcaccgaaagccgctgtggctatgtggcgtgcctggctaaatggtgacagatctcggatgtggtcactccaagatgcactatggccattaaacgagatgtttcaaaagcactcggcagcacgatttattaagtttgcgctatctcagcaaggttatgacgtaggggatccgtgcttgccacaagagcctattaatggggtggaggcaaaggaagtatctgcgcggcttacttcggtttgtgaaaaaataaataacttgcttgcgtagtagattcccacaacatttcataagggtctaaacgttaatttggaagcttggttccgttattcatggcgaacagagattgtgctcagataatctgtccactgttccaaagtcatgcgggtcggtttgccatttcactggtcatagagaacgttgttgaaaggtatgttgggtatgcgcatccagttgaactctcacttacaacaaaatatttcaactcttaagtagggaactggttacgacttttttcatccgtttgagtgttgattgacaaagcttcagaatggttagtgggttatcaacggtttacgtgcgaagtagtgtgttatcgattttttcttaatcggtacagtccgattttgttggcagggcacgcgtagcatggagtcatgatctatggagctatggggctgggcggcgaaaaagggtcggccacactgacagatgacgataaacagctcgcttttgaggcgctgaatgctgcgcgggaagtgggcattaccactattgatacggcagacatttaccgagcgggacgttcagatttggccgtggctgcggcgtttgaggcagatccttcactgaaagaacatttccgtattcaaactaagttcagtattcgtccggctgacgatgggcgcaccccgcaaacttcgcttgggtcagtaaccatgtatcagcagacccccgactggttgaaagcctcattggctggctccctgaaacggcttggtgttgaccacattgataccctcctgattcaccggcctgacccgcttgctgaaaagcaagcaacagctgaagctttgcaaaaattaatagacgagaaagtcattggacgtgttggggtttctaatatgcacaccgcccagcttgaagcgtggagcaagtttattccgatatgcgcgaaccagttacagctttccttggctcgtcacgcattcgttgacgtcgaggtagattttaacaccgtcagggagccaacttttggtgctggcacgattgaatggtgtctggcccacgatgttgagttgcagtcttggagcccggtcgcccgtggcctatatgtcggcgatgcccccatcgacggcgacgaggctcaacgtggcgccgtggcgcgcactcgggagcttgtgcgtgaattagccgaacgctatgacgttgcgtcaacgacaatcgtgttggcgtgggtgttgcgtcaccccgcgaagattagacccgtgattggttccacgaacccgcagcgaatccgcgaatgcgcggctgccaaggacgtcgtcctaacccgcgaggagtggtatgcgctctacactgccgcgcggggcgtgccagtaccgtaagggttaaagggctcgtcccgccaagaacacgaaagcccgcacgaatgcgggcctcggaagtggagcgcgaaagcgcgtccaaatataggggctggggggttcaagctgaaagcaccaaacaggctcagccagtgtttgatctgcgatgagtcatcgaacggaaaagaaaagagccccgaagggctctggagcattcgacgtctcgaacgaggagacgcttactaagaatcagttcttattcaggatgcctttaagatagcgacaagtcaagtactgatcatgaaaaacccagggcaatgttgctgttaaacaaaaatgtcagtgccgttcgtcataatgagcgtcatggaaacaatgaagttaggtatagatgttggaactaactctgtcggactatgcgcgctaagcgttgatgcctcaggtcggccactaaagatcttgaactccatgacggtcatccacgattcgggcgtggatcctgaaaagcagaaacccgcagataccagacttgcaactgctggaactgcacgacgtatgaggcgtttgtatcgaaatagaagaaagcgtctacgtcagcttgatgagaaaataaaagagctcgggtggccaataataaacctcgaaactttgaatgatccgtacgctccatggaaaataagggcacggctggctaagtcgaaattacctaaagaagaactaccggctgctatgtcgatagcattacgccacctcgctaggcatagaggctggcgaagcccctacgagagggtcgaatcactacattccaagcacgacgacagcgagctatttcagcaactcaagcgtcgcgtgagcgacgaaattgggcgaccagttgatgagttatctactccggctcaggttatatgtgagtggggtttgagcccagccaagcggttacgaaacgcaggtaaaacaaaatatggctccgattcagtgaagaatggcgtatcagtatccggagacctaaaagccggcattctaggcggcaaactcatgcagtctgataatgcaaatgaaatcatgcgtataggaaaaatgcaggaattgccacaacatttaattctggaactaatcgatctggtttttcatgccgcaagccctgtgggatcagcgtcagcaaaaaccaagaaggatgcgctgccaggacaaggcaaatacccacgtgcatcgaaagcaaatttagagtttcagaggttccgcatcgtccaagtggtcgcgaacttgagactcactgaatccaagaccggcgagatacgtctcttaactccatcagagaagacgaaaatcatagatttcttgatgtcagctgacgaaactgacggaatcacctggggcgacgttgccgagctgctcggcgttgatcgagagcagttgaacggtacggcacagctatcgccagacggggaacgtgcatcatcgtttccgccaattaacgttacacaaaagcgcattattgaatctgagataaaaccgttgctgacatggtggcagacagctgacttcgagtccaagaatgcgctagtgcaagctatttcaaatgctgaggtcatcgatgaagattcccctggctttaaacaagcagaattatttctcagcagctgtggtgacgatatattaacgaagctagatggcattaaattacctgccggtcgcgccgcatactctgaagacagtctgaaacgtctaagcgacagaatggaaaaggattcagtcgatctgttcgaagctaggaaactcgaattcggggttccgaatgattgggtgtctccggcagacccgataggggagccggtcggaaatccctctgttgatcgagtaactaagatcgtcaaccgttggattctagccgtcaccaagaaatggggagttccggcttcggtaaatatcgaacatattcggtctgggttgatgtcaaaaagacaagtgcgtgcgtatgagcaagacgttaaaaataaacgagagcaaaacttacgaattatggaggaaataaacgagaaaatcaccggacataaatacgcatcaaggagcgacattacccgatatctggcggttcaacgtcagaattgtcagtgtgcttactgtggagaatgtataacttacgatacttgcgaaattgaccatatcgtccctagaaaaggacccggttcgaccaacgcccggaataatttggtagctgcatgtcttcgatgtaaccgagcaaaatcgaatacctcgttctctgtttgggccgaggaatgtggtctctctgcggtgagtgttgacgctgcaatcgaacgagtctggcaatggaatggagacgctggactttcggtacagcaattcaaaaattttcagaaggatgtcattgcacgtctgcgaaaaagaagcgaggacgacgccatagataaccgttcgattgaatcagtggcatggatggcgaatgagctacaccaccgaattcatgcccatttcaagcagcttggccatgatgtgcaagtaaatgtttttagaggcgctatcactgcggaagctagaaaagcgtcaggattcgaaggcaaagttaatttaatcggtggtcccggcaaaacccgcctagaccgtaggcaccatacgatggatgcggctgtgatcgctttgatgcgcccaaaggtagctcaagtattggctgaacgaatgaacattcgaactagccagcgtctaactaggtcgggtgagaattggaaagcatatcagggctctaccatagaagcccggcaactatatgcgcagtggcttagcaatatggataagttgcttgacttgtttaatttcgcaattgctaatgacgaaattcctgtgacacaaaatgtgaggttaagacttggtaacggcaacgcgcatgatgccagtgttaggaaacctgttcctaaacatgttggagactcgtgggcattagatgaaattgatcgggtaatcactgaagcggcgtgggtggctctgacacgtgatcctgactttgatcctggaagcggattacccgcgaacccaaatcgagaaattagagttaaaaatagttggttgaaggccggagacaatcttgggctcacacccaggaaaaccgccgttatagcggtaaggggtggatatgctaatctcggaaaggctattcaccacgtgcgtatttacaggtacggcaccaaatcgcccaaatatgcaatgttgcgagtctttgcgcacgatcttttacgggatagagataaaaacctgttcactatcccgctgagagaatcgagtattagcttacgcaccactaatgctaaaaccagaaaagcgattgttgatggcactgcgacgtacattggatggttagtgacgggagccgagctggagcttgatttatcaaatccgtatttcaaaaagggaattataggctctttcttagaagatttcccaaatacatctaaatgggtggtagatggcttcccggaccagaaccagttaagattacgtccacgtcagctagctggcgaaggaataaaaaacattgaagtgtctgatggatctaaagaaatactctccggtaaaggatggcgtcccagtgtcgacgcgcttctttcgaaagcgcttttcgcccacgtgatttggagaaccgcgttgggcggatcccgtaccaaatcctcagcaggtctgccagccagctttagcctgaaaaattagctatgtcttccaagtggcgggtgattgattgttcccagatggagggaacaatctcatctgcccgtggagcgataattattacgaagctggggcatcaaccatctgtgattccacgggctgatgtcgcagtgatgctcgtcggaatgaaagttaagttttctgccgcatcaatccatcgcttattgtcacaagacgttgcgattctattctgtgactggaaaggcgttccagaaggaggcacctacccgtggagttcgcatagccgtgttgccgcgcgccaccgtagtcaggctaagatgacggtgcccagacaaaagaatgcatggggacggatagtaaaagccaaagtccttggacaatctcaagttctaaaagatcaagggattcagcagtggcgacaactcagcgatttggcacggcacaccagatctggcgaccctgaaaacatcgaagcgcaagccgcaagattatattggcaagcattattcggtgccgaacattttctacgttcacctggaacgggaatttccgtccgaaatgctcaattggattacgcttacgcggttttaagagggcacggaattagagccgcgctgagcgccggactgtctactgcagtgggagtttttcatcgaggaagaagtaataacttcgctctcgtcgacgatctcatcgagccttttcggccagctatcgacgatgcggtcgcgcaactcggtgaagaggactcactagagaactcggaaatacggcactatctagtggctgcggcagacaggaaatttttggaggatggacgaacaattagttcagctttcagtgaactagcccagaactttggacagtatgcagaaggcgaaatcgataggctgcaggttcctcactggctaggcgcttccaatggctaacgatcccatgtggtgcctagtgatgtttgatttgccgactaaaactgctgcggagcggcgtaactatcaagagttccgtaacacgctcctcgacaacggtttcattttcgctcagttcagcgtttacgccaagtactcccccagcggagtgctctcaacgagagaagtcaacggaatcaaatcccaagttcctccaaaaggagaaatacggatcttgcacgttactgatcgacaatgggcgaataccgtcagattttccaacgcaaccgagatacctaactcaactgaaccaacacagctactgcttttttaacgaaaaaacgccgatatctcggtgttgccaaggggaaattacttccctctgaagtctatcaaagggaagtagaactgattcccagcttaaaatagtctgccgctgcccggtttagaagtctatcaaagggaagtagaactgattcccagcccttttcgcgagttaccgtctgtccaaggaagtctatcaaagggaagtagaactgattcccagctaccactgccgggtcgtcgagcggatcagaagtctatcaaagggaagtagaactgattcccagcgtaatcggcgcatcgagatcgagggtgagaagtctatcaaagggaagtagaactgattcccagcagtctgctggttggcgggcggtgtttgcgaagtctatcaaagggaagtagaactgattcccagccaaggtctagaccccgctgccaattggagaagtctatcaaagggaagtagaactgattcccagcggggtgtggaggtgccgaacgtggcgcggaagtctatcaaagggaagtagaactgattcccagccccatctcgccattcaggggcaaacgcggaagtctatcaaagggaagtagaactgattcccagcgcggattggctagaggaacgctgccagcgaagtctatcaaagggaagtagaactgattcccagcttgggcgtgagtgcatagggcttcatgagaagtctatcaaagggaagtagaactgattcccagcggcaaaagatgagcgacatgctatggtcaggcgcccagaaggtgagtccgcctaaccagttccgtaaactctagtaccagttgaactggtaggagtggtcgagggcttggcgccagcccccataccgattaagtacgtagttattgccccatctaagggcggttactgggtcggaccagttgtcgccgatcttagagcacggcaaagcctggacgagaccgcaagcaccgcttgaggcattaactgaggtggggttccagccggattcgcggaaaatcagaatgttggcggcctcgaaatcggagggtgaaatgccagcgtcgctcatccattgcattctttctgtgtggccagccatacccgcgatgaccatggtgccgaccagtttttcttcggtcaccgggttcttagtgactgtttcgcgcagtactgagcgcccagattccacgccgtccgtgtaggtgagcgtggcacgtacctctttagtgccgttgacgccagcaacctgcactttggtgactccctctggcagggtgctatcgggggtggttttcgtctcaaaaggaatatcttccacaaaatctgcggttttataggttattcgagttaccgtaatcgccaaatcggcgctcaacggggtgctttgagtcggttccaccttgtcagtggggtttattttgatgcctaactcgttaagtaaagcgcccactgaggcagccgatgagatgacttcgcgtgaactaccgtccacacttaactgaactcggtgtgggttagtagcagtcagcgtgataccttcgcgccccaacggcaaagagcgatccaccgataaccgggcggcagggtcaaataacccaatttgcttgagcgcatcatcgactgtcgtagcggttgtccaaaaagtcgttttcttaccatcgacggtaattgttaccggacgagcgaatttaacggcgatgaaatcagaatcgttaaccgtcgattccaaagagggggaaacgatgtcgtgctcggttagctcaatgccctcggcacgtaacgcgtctttaacatttgtgccaaagaaattaacttggcgaagttggccgtcaacactcatcacagcgcagcgatcaaaatgtgccgccatgccgcctaccccgaatgtggtcacggccgcaacagccaccaccaaccaggctggaaacttgtgcattaatccctctttcgctttgagtcgggcacgcaactcaaagccctatctaggaaatactaaagccaaattcttaaattatccaaagaaacttaaaggttgtggacacaaaaagacggcaaaccagcctggcttgccgtctttgaaatcttagagatttaagttattaagctacttcgcttgggctgcagtgaaacgctcagcaacgtctgtccagttgacgatattccagaaagccttgacgtagtcagccttgacgttcttgtactgcaagtagaaagcgtgctcccacatgtcaagcaatagcagcgggacagcgcctactggcaggttgttctggtgatcgtagaaagccaaagtgtttaacctcttgcccagtgggtcatagactaaagcgccccagccagatccttgaatcgacttagcggcctcactgaactgtgccactagattgtcgtagccaccaaagaattcgtcgattgcggcagctagctcgccttcaggacgctcaggggcgttgggggagagattcttccaaaaaatagagtggttctggtggccggcaaggttgaaagctagatctttctccaatttgctgatagcaccgaaatcgcccttctcgcggcattcagctagcttctccaaggcggtattggcgccgtcaacataagctttgtgatgcttatcgtggtgcaattgcataatttcaccgcagatatgcggctctagcgccccgtaatcgtagtcaagatcgggcagagtatagacagccatttttctcctaaaataatcacggcgatgtgatctgcgtcctggcccgctcgccgtaaaaaggccagcaatgaaaaacgccaggggcaaacagtttaactgccacccctggcgctacgctaatttacttcaagtcgtccttaatgtcctcgaccgcgtccttgatggactcgccaaccttagcggccttggccttgatctgctcggcgatgccctcggcctgagcctgctcattaccagcggccttgccaatattttccttggcttcgcccttgagctcgtcggccttgttcttaatgtcgtcgcctagtcccattactttctccttatttgttaggttgatggcggaattgccttaaccattctattgagattttgggtctcattaaaagcaacgctagcaaggaccagattattccgcccgtctggaattaaatactctaaaacctttagcgctacccactcgcacagtgttaaaaccctggtcagtgagccatttttgtaacggatccgcacctaaatttttcccgacgactaaccacgcattcccgttaggagccaacctgttcagccatttcaatagcattgtgtgcagcgcctctttgcctattcgaatgggcggatttgaccaaatttcgtcatattggacgaggggcaaatcatcgggttcagcaacgctgacttgctggctaaccccatagcgtttagcgttctcaagagttagttgcagagccaactggttgacgtcaacagcatcgatatgcgcccaggggcattcgttggccaaggcaatagctattggcccgtatccgcagccaagatctagaattcgtttgacatgctggccgggcgggctagtgcgtttcagcattaccgaagtgcccaaatctagccggtgagaactgaacaccccgtcggcgctaataaactcgtattcgcgaccccatattttcgcgaaaacgctgtgacgttcgccgctatcttcgctggtaacgaaatagtgactcataacgtttcctccaactctcgcttagccctggcttgtctggcgcgagtagccagtgcttcatcaggtgggtatccgaccgcctccaaagttagcccgcgccctgacattactggcacttcgttacttcttgtagttgctttggttagctgggttatccaggagatatctcgcttaccggctcccacttgacataaggcgcctactagagagcgcaccattgaatgacaaaaagcatctgagcgcacctgaacctcgatagtgttacccacgcgcgccacctgtaatctttccagattccgaatagttgtcgccccctcacggtgtttgcagaaagccacgaaatctctcaatccgcttaaggcttgtccggctagctgcattgcgtctaggtcgagacgtgcgcgcacttgagtggtaaacccgcgcagcagggggtcaggacgacaagtatcgtcccaaatccggtagacatagtgacgccaaatggcagaaaatcgggcatcaaaaccttccggggcaggacttatttggtagatagtgatgtcttccggcagcactcgagacagtcggtaacacagctgggcagggtcgatctcgtctaaatcaatatgagcaacttgcccgcgcgcatggacgccagcgtcagtgcgtccagcaacggttaactgggcaccggtctctagccgcaatatcttcgttatccactcttcgatggttccttgtacggtacgtaatccgtcctgactagcccaaccgtggaaattagtgccgtcataggctaaatcgagtcgatagcgtttcacctaggcgagtctagttgcactagctagctggttccagatgcttggcgcccaagaatgctaaaattaggtgctggtgccacctgggattcaatttggttttccccgcgattttgaccatggtctagccccgcgatatgctaaagcgctgttgcacttagagggaacgctgtgcgcgtagggttgtgccttaaatgttgggttggctctagagcgtcgcggtaactctggtcaactgaaatttggaagaacttaaactgtctagtggaagtggtctgcgaccgtgcctacctacagccctaagcctggtgaagtcaccagggattggctcgtcatcgacgctgaggacgtcatcctcggtcggttggcggccaccgctgccaacttgctgcgtggcaaacacaaggccacctatgcacctcatattgactgcggtgattttgttgtcattatcaacgcctccaaagttgccttaactggcaacaaagcggaaacctcgctgcgttataccgtctctggccgtcctggcggcttgaaagttaagacggctggcgaattacgcgagaatgatccgcgcactctagttgaacgtgcagtgtgggggatgatgcccaagaacaagctgagccgcaagcagatgggcaagctaaaggtatatgctggctcggatcatccgcacaccgctcagcagccaaaaccctatgagatgaagcaggtcgcgcagtaagcgcgagacgaaggacgtaacccgtgactgaaacgcagactgaagacttagagcttgaggagactggcaccacaggttttgtggacgagcaggatcgtcagattgcctatcgtgcggattcagcaccgcgaggtgcttccgccaatagcgagcgtccctcggtgattgcaccgggcggcggcactggccgtcgtaaggaggctgtcgctagggttaggttgattcctggcaccggcacattcaaaatcaatggccgcagcctagaggaatatttcccctctaaattgcaccagcagatcattaacgagccattcgtaaccacaggtcttgttggttcctatgacgttatcgcccgcatcgatggcggtggggtgaccggtcaggccggcgctttgcgtctaggtattgcccgcgcactaaacaagattgacgttgaggttaaccgcccaacgttgaagaaggccgggctattgacgcgcgacgccagagctaaggaacgtaagaaagctggtttgaagaaagcccgtaaggctccgcaatactcgaagcgttaatcggcttatcaaagctatttgggacggtgttacagcaagctgtggcaccgtccttttgctttgttagtgagtcgtaattgttcacagcatgccgtttggcggtaattttgccctatggcaagactatttggaaccgacggggtgcgcggcaaagctaatgcggacctgactgcggagttagctctcgatctttctgtagccgccgcacacgtgctcggtgaagccggcgctttcggcgataagcgtcctcgggcgttagttggacgtgatacccgaatatctggcgagttcctaggcgcggcggtgtgcgctggtctggcaagcgccggcgttgatgtgatagacgttggtgtcgtcccaacacctgggttagcctatttggtggccaccgagggcaccgaacttggggttatgctctcggcttcccacaacccgatgccagataacggaattaagttctttcaacgcggtggagtaaaactagacgacagcgttgaggatgctatcgaacaacaccttgaggagccctggcagcgtcctattggcggggcggttggccgtatcacccgcgacgaatccatgcttgacaagtacattcaacatctgatttcaactttgggcactacccgcttggatggtttgaaagttgttgtggatggcgcgaatggatcgtccgcgttaacagcggtgccagcctttgagagggtgggcgctcaagtgattggcattaacactcaaccaaacgggttaaatattaatgacaatgctggctcaacccatattgagggactgaagaaagctgttgtggaaaatggcgccgacgttggtttcgccatggacggtgacgctgaccgctgtctagcggtagctagcgacggctcgctcgtagatggcgatcagatcatggccattttggcgctggaattaaagcgtcagggcaagctttatcgcgacactttagtggccactgtaatgagtaaccttggtttgactttggcaatgaaagccaacggtatttctgttgcgcaaaccaaagtgggggatcgttatgtgctggaatctatgcaaaccaacgggtttagtcttggtggggaacaatctggccacgtcattatcaaacaattcgccaacactggcgacggcgtattaacggccttgcacgtggcggaaactatcgtaaaaactggcaagtccattggtgaattggcgcagtgcatggaaagactgccgcaggtgctaatcaacgtgcctaatgttgacaagctacgtgccgtggtagatccggacgtctcggcagccgtcaaagcggctaatcaagagttgggtgagcgtgggcgagtagttttgcgtccctcaggcacggaaccgctagtgcgcgtgatggttgaagctgatactcaagacaaggctcagcaggtagctgaaagcttggcgactattgttgcggacaaattggctttgtaggtggttaaatttttctgattcgcacgtgacgaatggtgtgatcttcagatttacgtaatacgacggtggctcgatctttagttggctcgatatttgccctaaggttcgggccatttgtcgtctcccaaatagctagcgcagtttcccgagcctcggaatcgcttaatagtgaatacttgtggaaataacttttggggtctgcaaaagcgccgttgcgcaacgctaagaatctggataaataccaatttctgatattggattcttcagcatttacgtaaaccgaaaaatcgaagaaatcgctgatggttatgctttgaccattgtgttttattgttgctggctgtaaaacattcaaaccttcgacgatgagaatgtctggctgctcaatgatgatttcttcgtctggaattatgtcgtaaatcaagtgagaatattttggggcactaaccctaggtttcccagattttacggcgataacgaattccaacatagaacggcgatcatagctttctgggaatccttttcgatctaaaattccgcgatgaatcaactcgtcgttaggtagtaaaaaaccgtctgtagtgattaaatccactttcggtttagaaggttggcgccgcagtaactcagctagcagtcgcgcagtagttgatttgccgactgccaccgacccggctacgccaattacgaacggggtggaggtggctgagatgtctaagaagttgttagattcggcaaacattcgggtggtattagcccgatacagctcaatcaactgcgtaagcggcagataaacctctttcacgtcgtcaagattggttggatcttgtaggccgcgcagtttatttagggtcgcgtcgtcaaggctgatgttggacgcttgagctagttgcgcccaacttgcccgaggcaatataagccacggctggttcggggattgtcgaactgctgtcatgaccccagtttctgctgtgaaatcttgtccatcccagcttaccgacacaatgtcgatgatttccatttacacttcttgcattaaactcggtgagtcaaaacttagctacgttactcggtcaagaaagatagaactatgtgcggaatcatcggttatgttggccctcgctcggctcaagacgtcgtccttggcgggcttagaagaatggaataccgtggctacgattcggctggcatagctatcgcagatcatggagaagttcgggttgttaaaaaggctggaaagctggttaatctagtcgaggagttggctgataatccgttgcctgaggttcatcaggcgatcggacacactcgttgggcaacccatggtggcccaacggacgctaatgctcacccacatacttcttttgatggacgtgtggctctcgtccataacggaatcatcgaaaattttgcgtcactacgtgcggggctaattgctgacggggttaagttcacctccgaaaccgatactgaggtggttgctcatctgttaggtgaagctttatcggaatctacagatttgctagccgcgatgag

SEQ ID NO: 3851 - DNA, 23372 bp, synthetic construct
  variation 15239..15288: note = note, n is a, c, g, or t
  misc_feature 1..23372: note = Synthetic
  source 1..23372: mol_type = other DNA
tatgcgattaacctgatgcgttcagctatcgccgggatttatgcgggggactttgcttataacttggtgataatcctggtgttcctgattccgaacttggtgctcgggctggttttgcggcatacgattgccgggcgtattcacgatatgaccaaagccattgaaaaacgaaggtcatgtagtcgggggctatccttacggggaccaattggcattgtctcgtttgtaaattaaccatcaaaatgccaaaagggcagaaaaccacaacacaacccggactaccacaaataattcgagaaatcctaggcaaactcggtcactaaagttgcacgagtagggttcagcggcgaccaaaggtacggagtcgcgactcgccaaaatctatcgcttatcacctttacggaatgtgtaaaggtgataagctgaggttatgagcaacgtcgctgattctttcgattcttttaattctaatttggactcgacgaattccgagtgtttggttcccctgcccccgatggagcacaacctgtggggaacaccagatgaatccaaagagctgtctgtctcggtgcaaaaactgctgcacaaactgctgggagtaggggagctgacgctgcatcgtcgcaccacagcacagacggaactgtccccaatccgtctgggcgatgctgaccttgcagcacttggggaaatcgtaggacccggctacgtcaccaccgacaaagagcaacgcatccgtcgcgcccgcggcaagtcctaccctgacctggtcgattggcggatgaaccgggtgattgaagctcccgacgcggttgtcgcgccgggaacagaaacggaagtctgggaggtcctcaagttctgcagccgcgaaaagattgcggtggttcctttcggagggggatcctctgtcgtaggtggtctcagtcccaagaaaggcgggatgcgggcagtcatcagcattgacctgcgccgctttgaccagcttgaggacgtggatccggtgtcttgtgaagcgaccttcggggcggggctctccggaccgcacgccgagttgctgctgggcgagtatggtttgcagattggtcactatccgcagtcttttccttatgcctccctgggtggattcgcggcgacgcggtcgtcgggacaaagctccgctggatatgggcgttttgacgagatggtgcgttcgctgaccgtggtgacccccaagggcattatggaagtcggatggaaagcgcctatgtcagccgccggccccgatttgcgtcacgtatttttaggttccgagggtagtttcgggattatcactaaactgcggttacaggtgcacaagattccgcagactaaacgttacgaggcttttcgattcccagattttgcagccggcgccgctgcggtgcgcgctgtagtacaggaaggctgcggtccaacggtgatacgcctctctgacgagattgaatcctcactgaacctgtccaataccgactcgatgggttccgctgcgaccagcaaagtcggatgcttgtgcttgaccatgtttgagggtagcgaaaatcacaccaagtcccgccatgaagaaacgcgggcagtgctgctggcgcacgggggcacgtcgttgggcgaaatgccggtgcgggaatgggaacagggacgttttggggctccggtactgcgtgacggattgattgacaacggagctatctgcgaaaccctggagaccgctactgactggtcaaacaccaccaggcttaagaccgccgtgacagaagccctaactacggagcttgctaaaaccggcacgatttcggtggttatgtgccacatcagtcacgtctatgcgggaggctgttccctttacttcacggtggtggcggcgcaaaagggcgatgacccccaagctcagtggtggcccgtgaaacacgcggcatcccaggcaattattgatgcgggagggacaactacacaccaccacggggtaggcacggatcaccgtccgttcctgaaaggcgaaatcggcacacccgcagtggagcttatccgtgcgattaaacacgaacttgatccggtagggatactgaacccagagaagctggtgtagtgatggaaaaaacgtttgatcgtcacgagattcggcatattgccctgctggtgaatccggctgcgggtaaagggaaaagcagtgccgcagcaaaactcgcccacagcgcttttgcggaggcgggagtgaaagtaacggtgttggcgggagcctccccccaggagtccgatgaactgattcggcgcagcattgacgataggtctctggatgccctggtggtgtgtgggggagatggtctggtcagcctggctttgcaagcgcaggcgaaaaccgctgtgccgttgggaataatcccagctggaactggaaacgatcatgctcgggagtatcgtattccgctcgatccccggcacgccgtcaaggtcattacttccggttacgccacccgcacggacctcggtctgatgcgcgatgaggaagggcgggagaagtatttcgggaccattgcctgcatggggtttgattcattgtcatcggctcgtgccaacacgatttcttttccgcggggagctacacgctacgttgtggcagctttgattgaatgggtacggtttcgcccgcacaatacccgcatttatgtcgatgggcaggaggtctgttccggtccaatcaccacctgcgtactggggaataccaagtcatacgggggaggtctgaaggtgtgcccccatgccaatcctcgagacggactgttggaactttccattttgggagacctgacgaaactgggaatgttgcgccatgcgggtgtctatagtaacggcacctggtggagattaccccaagcacagaccgctcgtggcaaggtaatgcgcatcgagatgcccgcagtcaccgcttatgcggacggagacgcctactttgattctgccatcgagtgcacagccgttccccacgccggatactacctggtgccacgctcatgaagacgccaggtttcagctccaaatccccgcagcgggaacacacgccggatgaaatggctatcgaccaggctattgaaaaggctgctcgagatagcctcatccgcaatgggttttcgcgcaccaccatcgctcaggtcgcccgcgaagctggggtatcgcgccccaccgtgtatgcccgctatcacaatgtgacgcagctcgctgctgacaccctgacacgagaattactgccattggcgcagcggctgcaaacggtaccacagacggtggaagatttggtgaaaatcctggtacaagccgctcatgatttgcagcaaaatgagctgctcgctgccatgattgagcgcgatccgcaactgttgcaaacctatcaattccaacgcttaggtcgggtacaaacccgatttatcgatttgctggcacagattttggaacagatgtcccgtaacactgagttgcgcgatgaagacccgcgtgtactcgctgcgattgtggtggtgtcagtgcagaccgccgccgtacaacaaaatattttccgagctgtgagagacgacgctgacgtgtggaccaaacagctagaagtactgctaaaggagtatttgttaccatgaaattttctgctgctctcaatgcgtcaaggcgtcgcaacgaccttgacgaggtgatgaatgcgaacgaaccggtggatttggtgataatcgggggaggaatcaccggggtaggtacggctttggacgcggtgacccgcgggcttaacacggtactaattgagaaacatgatttgggattcgggacgtcgcgctggtcgtccaagctggcacatggtggtttgcgatacctggccaagatggatcttcagattgcgcacaattcggcggtggaacgaggaatcttgatgacccgtacggcgccacacctgattcactctttgccgcaagtgacggccttgggggcggatacgaatttatttcagaagtccgcgatgcggcttggtttcatcgccggggatttgctgcggatttcggcagggacttcgaatcgagtcttgccccactcacactacgcgtcacctaaacagacattgtcgctgtgtcctgcggtttcacgagacagattgcgcggcgcttgggttaactacgatggtcaaatggtggatgatgcccgtattgtttctgccatcgcgcggaccgctgccggttacggagcgaaaattctgacccgcgtggaggcgttgcggatggctgctcacgaggtacaggtccgcgacacggtacgttgtcagacgggggtcattcccgctagagcggtcattaatgcgacgggcgtgtgggctgccggactggatacggatattcatatccgtccttctcgcggcacgcatttgattttcagtgccgaacgtctggggaatcctagaggttccctcacggtaccgttgccggggtcaatctctcgctatctgttcattttgccggcgccgcaccatcgggtgtacttgggattgacggatgaagataatcccggtccgattcctgacgtgcctgagactccggatgcggatatcgattttctgctgcgtaacatcaacctcgctcttgaacagcccttgagtcgcgatgatgtaatcgggacgtttaccgggctaagaccccttattgataacggtgagggaggggcaacggcagatgtatcgcgtaagcacgccctgattcgttcctgtgaaggcgcgttttctgtagtgggcgggaaatacacggagtaccgcctgatggctgagcagtgcttggatcgagtgctggctgcaagcgggattcgcgccggagcttgccgtaccagggacttgccgataatcggggcgcatcgtcacccggacttccggggagtttcgcgcgatgccctggtgggtttacccaagcctctggtgcgccggtttgggagggaagcgccgctggtggctcagacagagattgcccgacctttggaatacttggatggcaccgatgtgacgcgtgccgaggtagcctttgcgttgactcacgagggagctatgaatgttgcggatattttgcagcgtcgtaccaggttgggactggtgaaagacgatgcctctcgggtggatgcggaagtccaggagattattgccgaaatagccgaaaaggggaattacgatgtcattgcctaaatggatgcttatgttgatagcaaaggtacaggctcgtcatcccctggtggtggctcgggtgatacaccggttgaccgcaaagaagcatcataatgtcccaaatgttcctgccgctgcgccgcagcttcccagtaagggcacggcgcatctgactttgacccgcaccgatggggtgctggcagctaatcgcgccgcaagaatccccggtgcttgagggatactcgccttcgcccgggaaaaggctctcagctgtgcagtcgggcatgagttgatatctcaccgacctcatcggtgaacggtggggagaggacgtcacaagggtctggcgagtgggcttaacagtcagatagggtcgttcgggggtgaacgaccctatctgaatccagaattttgtttatatggttgttgctcagcccacacttacgggcgcggtcgtaacctctttctcaggttgtggggatttattcgttgatgtctcggcattgcgagcggcttcgcgttcagccatgcgacggtaaatgaccgagagcaatgccccagacaggttgtgccagatggaaaagatagcgccgggcagggcagcttcgggagtcatcgcaaagtgggtctttgccagagtggcagccatgccagagttttgcattccgacttcaatcgagaccgtgcgtgacacccggttatccgcccgcagcaacttcgagaagccgtatcccacgccgtaacccagcatgttatgcaggatgaccgcgaccaaaaccagcagcccggttgccttgatggcgtctacggaggcgctgaccacacctgctaaaaccgcggaaatacccagggtagagatccaggggagagccggcaggattcggttgatgaacttggggaaagccagtcgtagcaccaagccagccacaacgggaaccagcaccatcttcacgatgctcaccgccatcgccccggcatccaacggcatatatttaccagccagccactgcgtcagcagcggggtcatcacgggagcgagcagtgtagaaatcgcggtcatggtgacggaaagagctacgtcagctttcgcgaggtaagagatcacgttcgacgaggtgccaccgggggcgcatccgaccaggatcacacctacagctacggcatcggggagacgtagcacagtaacgattaataccgctagtgcgggcatgatgacgtattgggcgacaacacccagcaggatgggccacggtctggtgaataccaaacgaaaatccggcaacgttagggtcagacccattccgaacataatgacacccaaaagaatcgcgacgtgcggagtaagcatcccagctgtagcgggggaaaagaatccccacagggctgccgcaataatcagaactgggaaaatcgtcacggcctttagggcgctgcgatcttcgggggtaagcgcttttggcgctacggattggttatcagttcgagtattagtttgagtagtcatgctccgactatagtcgttttgtccatatagcggatagctgtatcaatatatgagataaagatggcgttaccaaaccaaagacgaggtttgaatttgattaaaatagcatttgtcggtcggtcaatgattgatgatgctcgctacgacgcggtatgccggtgggtgtgggtgtacctaataggttcctctaatggttatggagtttccgtagtgccgagtcaacgagtttcatttttgtgggttctgactgcaccatccaaggtaaatatttgttggtaattagagccatctgttcattaagcgtgagtgaattggagaagttgggccgaggaatgccggtgctagattcatcatcgagataccatcggagttgattgagtaaatgtactcctttgacggttcctatattgccaagtttaaagccgtggaagttatgagtcgctaatgctttagcaaaagcatctactttgagaaatgctttatcgttaccgatagactctgcatctgcatacattacacccaacagagctttttgatttgaagacaatgaatttgcaattgtatcgatgcgagatacgtattttgtaaaggtgtctgcaccttgcgtgagagtagttttacccaaggtgttcgctgcatcttcgatttgtagaccgaggcttggaccttcttcgggatcaagaccggtatatttgttatatacactggcggaggcgtcaaaacgacctagaatacgttttaacgcatctgaaaaaccgtctaaatgagaagtatcttcgaggcgtgctgcggcgatttggtaatcatgttgccaaactttaatatccaagcgtgtagcccagcgccaatcggatgaagcatatttagcggcaagtacatcattgtgaggacggttcttacgttcgtttgcttcgttaatcctgagattatcttgctgcatttgtttggatgaaactgtgcgggcgaacacttctagcttgtgaaaaaaagacgatccggttaagtctgcagcagtgagatattgaccatgataatcagagcgttggttgttttcagtggggatgttcccctttgaatcgctgagagcctgagtaaagaagctgatgatatcggttttgatgccgtgagcctctgaatcgcgcagaaatagtccttcgctacctttatatccggaaatccaatccatagccaccaagctggcgtcactagacgccgccttggtggcgacgttgttgatgagaccgacacaatcgtcggcgtagctagaaatgcgttccctaaattcagagtcgagagcttctaacaatttatgttcgttagctttataggcctcatttgctgagcaggctttaagtattaaatcccggcgatgattgtaatctgtgacaagttcagttagtgagtcctttgaacggtgtagaatagtatcaattttagatagattactaaaagcgtcagcgataaagtgcgcttcgctgttaatatctataacgtctcccagaatagcccgtaaacgagaattgcttagattcgactctgaagtagaatcgattctggtgtgagaaatctgctgggtgtatatcgacggattgttggatccaataaatatttcgctcacgtttataactcctcgtattttccattgttgtttagcaaaactatggagttttgggtggaggttacatttttcgctgttgtggcggtggtgagccctgtctcacccttgaaaccatctgcaaaagtgctggatgtgcccagtgaacaccctaggataaacgctgcgaccagggtaattaggcgacgcggaacgttaaacatttgaaatatcccttctggttcgcaccagtaatataatacctattttacggcgggttatttcaagtgtaaatacactattttcggcgtgtaatgtcgtgagtgctcagagtaacctatgcctacatatctttaatcgttggtttaaccaatctggacgcttagccaccagatgattaatttttttcctaaatgcagttaggctgcgactatatcgtcgaagaagtcgatgatgccccaggccactttgtctttgatgtccgtgtagttgtgaatttcgtggcgatatccgaaatagagctgcgcctgggtctggtgtcccgtatcctccagccagttcacgacctccatgaacccggtaccgaacatgccgatgggatcctcagagccggcaatcaggtaaacaggcaggtcctgggggaccgcctcggcccactgcggaccttcgacctgtttcagcatctgggcgaaatcgagcatggaacggttcgacgtcggcttggtgaaggcatcaaaagggtcctcggcgtgatccttttgcacgtaagggtcctcacaaatccactcgttgccaatctttacgccctcgggaatgcgcgcaaaagagaatccgaagaactgctggatgattccgggatcgctgttttcaccctcgccagccgccaccagctcttgcagccgtgctatcaccgcgtccgtttcggggaaacgccccgtcacgccgcacagggtgattcccgcgagttcgttgccatatttcaccatgtagtctcgtccaatcatcgagcccatagagtgaccgaaaaagaacagtggcaggtttgggtatttttctttcacaagcacggacaggcggtgctcgtcctccatcatcgtgtgtgggcccttgtcgccccagtcgccccaacggtcgttctcgacagcggttttaccgtggccaacgtggtcgtcagctgccacgatgtagcctgcctccaacagattgacgatgaggtgcagatagcggcgggaatgctcgccgaaaccgtgaacaagttggacgatacctttcggcttcgccgccggaacgtaaatccagccgtaaacagtatctcgttcgttaaaagaggggaaagtaatttcgtgcagcattgcgcgtcctttcgtggggtaacgtatcgggtggacgctcctatcctcacacattttcggtcgatttataccgggtttgcgggcattcgatacttcggtgcagacaatctttgccgaaacctaacgtgacgtagccgggtcacttgaatcaccatgagtagtatttagaaacctctaattacctgcggtaatgcgccaaatgctacttaagtactatttttccaaaattagtatttgctgcgagggaagccagttccacgcacgtcggcggagtgttcaagttgattttgtaaattgcgtgatgacagctctttggaagtggtgtaaaattgagcatgaactgattctcagtaagggacaccatgtttgtgtacctgaattctccgcggggcttcggtcccgcaacttttttaaccgatttaccccatttctgtatcatttttggtaataatgatttcatggacaatcgcaaatatcatgtgggcatagatgttggaactaactcggtgggttttgctgccgtggaggtaggcgattcgggttctcctatcaggtttctgaacactatggttgttattcacgattctggtgtcgatcccgaacaaaaaaagtacgccatcactcgtctcgcttccgcgggaacagcaaggcgcacgcgacgactatatcgaacgcgtagacaaagattacgcgagttggatgatttcatttccaacgaacttggttatcccctggtgaatctggaaaactttgcagacccctacgagccttggaaagttcgtgctgacctcgctacgataaaacttcctgccgatgaacttcccgaagcgatgtctattgcactccggcatatggcacgtcaccggggctggcgcagtccttaccaaagagtggaagctctccacctacacgcagaaatatcagaagaattttccgcccttaaaaagcgggtcatggagaaaaccggagatgtcttcagcgatgacgcgacaccagctgaagttttggtggacttgatgggcaggcaaaagattcgcggtgctgatggaatgctctctggaaagctgcgtcagagcgacaatgccaatgagctgcgcaaaattgcttccgttcaggggattgacgatgaaaccctgaatcgcattattgatagagtctttttcagtaggtcaccaaaaggtaaggcatcggagcgcgttgggatggatgcgttaccgggacaaggctcaaagcctcgcgctttaaaagccatgccgtcttttcaaaagttccgcatagtctcggtcatctgcaacctgcgtataaaggattctggagatgataatcgccccctatctatggaggaaaaagaacaacttattggttatctcatgtccagtactactgatgaccatgtcacttggacagatgttgccgaattgcttcacgttaagcgttctaatcttcagggaacagcaaaggaaggtcccgatggtgagcgtccttacactcgtcctccggtcaattcggcgtggagcaaaatcaaggattcaaaaataaagagcctggttgccttgtggaaaactggagatgtagatgtgcaatctgcaatcgtagaggccttatccaacgcttctgttttggaggacgcacgtccgggagcagacatagtggttgcctatttggagtctttggatgacaaagagctcgaaagcctggataaagtcggacttcctgcaggaagggcatcgtattcggaagattctctcgagcgccttaccgagagaatgttgcaagatgattgtgatttgtttgaagcccgtaagcgtgagttcggtgtatccgatgattggaaaccgcctgctgaccccatttatgccccggtgggcaatccaggagtcgatcgtgtactaaaaattgttaatcgtttgttgatggctgcggagcgagaatggggggctccaacgcaaatcaacatagaacatgtgcgttcgggctttagttcggaacttatgcaacgggagtttgagcgggagaatgagaggcgcagggctcaaaatgaggaagctgtcaaagcaatccttactgagaaaggcggaaattctcatgtctcaaagtatgatataatccgctattacgccgtgaaacggcagaattgtcaatgcctgtattgtggcacacccataacttttagtgactgtgaacttgaccatattgtccctcgaaaaggtgtcggctcaacgaactctcgagtcaacttggcggcagcatgccgtagttgtaaccgggataaatctaatctgccttttgctgtttgggcaggcaagaccagtaattttgatgtgagcatcgacggcgcagtttcacgtgtgaaacaatggcaacgctcgcaaaatgaaggtgcccgagaatttcgggcgttccaaaacgaggttatttcacgacttttgaaaacaaccgaggaccccgagatagactctcgttctctggagtccgtcgcctggatggctcgcgagctgcatcatagggttgaatattattttcaatctaaaggcgcacaaacgcaggtatccgtttatcgtggcgccgtcaccgcccaggcgcgtaagtcttctggtttggaagacaaggtgaagatgattggcggcggtggtaagacacgccttgatagacgtcatcatgcgatggatgctgccaccattgcactcatgacgcctgggatttcaaccactttgtctgaaaagaacaatctgcgtgatgctcaaaaatttaccggtcaatccgagacttggaaagactactgtgggcgtacagagacggctcgtgagcattttgctgtttggaagtcgaatatggagcgtctcacagatttgttcaatgacaagctcgaaaatgacgctattccagtcgtgcagccgctgcgccttaggctttccgacagtaaggctcacgatgacgggattggtaaacttgactcaaagaaactcggtagcgtctggagcttggcggatatagacagagctgccacgccacagatttggactgcccttaccaggtgtgatgattttgatcccactaagggtttacctgagaatgccaatcgggttatcagagctcagggagtgaagtacgaaagcgaagacaacattcctgtattcccctcaaatgttgcggctattgccgttcgtgacgggtatgcggagattggtagcaccatccatcatgcccggatttataggattgatgacggtaaaaagattttttacagcatgatacgcgtattcgctgttgatttgctaaaacaccaggctgaggatttgtttacagtcaaattgcctcctagcgctatatctatacgtacctgcgaagattctctgcggagggcactctctaatggtacagcggagtacctgggctggcttgtgccgggcgacgaaataatagttgatacgtctgataaggcttttcataccggacaaattggagatttgctcaggaatttccctgtcaattcgtttagactcacgggtttcccatctaattcaagattaagactaaaacctgttttgttggccggggagggattgcgtgatgatgccgaagactctatcaaaaaaattctgtcaggtcagggttggcggccagcaataaatgtactgttttccaagggcaaaccgcgcattgtgcggcgaaactctctcggaatcgaacgccccagttccaataacggattgccgttctcatgggaagcatagagatagagaagtggcagattcttgatttcaccggatttcgaggctctgtgagttctatccaaggcgccttggtagtcaagcctgaggagggcgaggaacgacgtgtcccgatttcagacgtggcagtggttctgtttggtgtagatacgcggttctctgcgggatcagtgcatcgcatcctgaaaaatgacactgccgtaatattttgtgactggaaaggtgttccctatggacacgcctatccatggggtgatcatacccgagttggtgcccgtcaaattgcccaagcaaacgccagtagtcctgctcggaagtctgtgtgggcgcgtctgattaaatctaaagttctgggccaggctgaggtacttgaattttttgggcgacctaacgggaaaaggcttaaggaactggtcaaagatatccgttccggtgacccctcaaatattgagggtcaagctgcacgcatttattgggaaagtctatgggatgaccaggattttcgccgtataccgggtggaggggacgataactttactataaatgccatgctggattatggctacacaattctacgtggtcacgctatgcgagctgtagcggcatcgggtttgatttcttcgctgggtgtagctcaccatggacgctcaaacccctggaatttggcagacgatttcatcgagccctttagacctgccattgattattctgtttatttgctggtgtctgaatgcgttgatgaagggtgcgaaattaggaaaagattggttaacgccgccggtgacgttttcacagccacccgaaagtcgattccagccgagatgaccctgctagctcaacattatgggcagttaattgagggcgacattgggaagttcggggttccatcttggaagccgcccagtaagttggggctctaagcaatgccgggagaaccagtgtggtgcatggtgatgttcgacctaccaaccaaaaccaagaagcagcggcgtgcatatacaggtttccggcgctatctgctagataatgggttttcgcaggtgcagttcagcgtttattcctggtactctcccgctggtcacttaagcgtcagacttttgaaaggtattaaagcccatttacctccaggtggagaggtcagaatctaccatctaacagatcatcagtgggcaactgcgttgagattttccaacgctaaggaggtaaaacaagaagaagcgcccacgcaactgatgcttttttaggtcgctaaatctcagtatttccttgatatatcagggaaaaatgccctctactaagtatatcaaggattatgtgaactgattcccagcatggacgctaatggcctatctgcgcgaataagtatatcaaggattatgtgaactgattcccagccatcttgtgatgacaatcttccagcgcctaagtatatcaaggattatgtgaactgattcccagcttagggcggcgatttcggaaaccagccttaagtatatcaaggattatgtgaactgattcccagcgggtgttgcgtagccagacctttgtaggtaagtatatcaaggattatgtgaactgattcccagcgcgtggtacgggacgtaaaacggctaagtaagtatatcaaggattatgtgaactgattcccagcggggaaagtcgaatacctgggcagggactaagtatatcaaggattatgtgaactgattcccagcccatcccgcattcacaggtgtggattataagtatatcaaggattatgtgaactgattcccagccgaggaggcggctaagcgcgaggctgagtaagtatatcaaggattatgtgaactgattcccagctagagacgatactaacacccactatgtnnnnnnnnnnnnnnnnnnnnnnnnnnnnnnnnnnnnnnnnnnnnnnnnnngtaagtatatcaaggattatatgaactcatttctattagaatttacaattaataagttgcaaaaaagacagttatatttgagattataaacgagaatcattagcgacacatataggcagtgtttatacatatccacttcgtatatatttcagtctttgtgtaagtcgatgcctcgtcttatgcaagagggaggagatagggcgtggacttctgtcatcttgcacagcgaacacgttgcctcggtgatggtgccagtgcagcagggcgaacgggtcactgtcatgatgcgtcgtgagttatcggggatttcgggtacagcagaactatgcccgctgtgcatgaacgaccgatttcaaagtgggatttgtgttcatgccgatgcgctctttggtaaagatgcaggtagggatgattcgggctatagagaattccgtacgggagaagtgaaactggtcgttcgcgtctcaagctcgaaagcttcgcttttgtagtggaaaatttctcggtctttgggtgcgcaacctgctgcgcggcttgcgcaccatttcctcgttttgtcactaggtctgggtgcgcaacccgccgttttcacgtcggcttgcgcatcccttagccgaagcggcaaatgccttgcggctttttcgtggcgggcgttgcccgccgcgcgcctctcccaacaagccgcttacgtaagcaagcttacgacgcgcttgtcgagagaggctctgcctgctgtgcaggcacgaaaaaaccggtcaaggcgcatgccttgaccggcgtctgggtattagcaaggactcgctccgctcgccttgcataccctccctcgttcgcgtctcgagctcgaaagcttcgctttttcggcttgagacgctctctcagtcgggtggctgacgagattcgaactcgcgacatcctgaaccacaatcaggtgctctaccactgaactacagccaccatcgcttgcgaaaagcaacccccctatcttaccggattttgccgctcaggcgaaactcgtgccccgcctactgcgaaaccgttgtttgcctaccgccttgccgggggaacttgtgcaaaaaacctctgtttacttgaaaggcgaagtctgcaaaatgtgggcggctgcactctgaagttcttccgtgctgggaccctcgcctgccggcagcagtaccgaacggtaatagcgcagttcgttgagggaatcaatgatgtcgcccaaagctcgatgattgccggttttttccggagctaaaccgtacacctttggataccagcgcatcgccagttctttcagagtagacacgtcaataatccgatagtgcaaccagttgatgagctccggcatctgtttcgccaagaacgctttatcagaatgtaccgaattgcctgccagctgggcttttccgggttcagggaccaggcgtttcacgtagtccagaacttgacgaccggcttcctccacgctcaaaccggtatcaagtttcgccagcagccctgacttagtgtgcatttcgcggacaaattctcccatgtgattcatcgcggtcgcgctgggcttaatcagcaaatcgataccggaatccagcgggttcagttcggcatcggtgacaatcacagcgacctcaatcagctcgtcaacatgcaaatcgagtccggtcatctcgcaatcaatccacaccatcgggtcgtttttttgtttcccatacggtactcatctcccattcaatagttgtttctggtggcgaaatcttcgcctaccagcaaaaggcttagttgctttcgtcagccaggaatcgttgcaaaatcacgtcaagatccaccatcgaaactgctttcgccatcgcgccacgcaggggagcggacgaacctaaagcgctcagacgcaacgttgtgtcggcggcgcaatccggcagggcgaattggttaatcgtctcccgaatctggtttaagaaactctcgcctgcaaaggacagctcgcccccgataacaatcatctttgggttcaaaatgttgcacacttgcgccaagacgtaaccgatagcacgaccggcttcttgaatacgccgagtgacccgcacgtcgccctcttcaatcagtcgatagaggtccctcaacgtgtggactggaatctccaagctgcgcagcgaagccataatcgcgctgaccgaggcaatcatctccagacagccactgcctccacatttacataactcatgatggctcggaatcgggaagtgtccgatttctcccgaaatcccgccggttccgtacaggattttgccacctgccataatgccggcgccaatcccggacgaggcttcaacatagacgaaatcatcgacgtcctttgcgactccccacatgtgctcagctaaagccccggcattagcgtcgttttcggtcagaattgggaaaggggaaacttcttgagcgatgtcttccaggttgattccgttaagtcctggaatcatggaagtgtagttggacatgcgaccatctgaacgcaccgcatcggcaactacgatgcaaccagccacaatctgagcgttttccagccccttggctgccatcatcgagtcgaacagggcaactgacatttccttattaatggttgcgttagcctctggaggaagggggatgacttgcgtatccacaatatcgtgatccagagtgacaatcccgactcgtacctgttcacgttccagagacacacccatggcgtaaccaatttcgggggcgaacgcaatcgtgttgccgcgtcgacctgatgcggcctccgccagacgcaaaatttcggcttcggtcagctcgcgaacgatgttagaaacggtcgcgggggccagaccggtgcgacggctaatctcggcctgtgaaatccctccggcatcaataatggcagacaaaactcgcttttggttcgctacgcgcagagacgagggggagccggggcctaaaaggttttccatagtcacgaaccccattttagtgatttttccctatcaatggtcagcctccccccacaaactgaataccggtatcggtatatttcgggagggttggtgccctcggtgggactcgaacccacaacctacggattagaaggccgttgctctatccattgagctacgaaggcttaccggttaaacaaaatctgttaactcgaccagtttagcctatttccgcggttttttcccctgtgcataaaagggttatccacaggcaaaaaaatatttagttggacatgacaaacctttgcgaaaccctcgaactgagagctgtttgcttgacagctatcgacagtaacgagcgcagagacgttcgggaaaggaaaacaaaatgagctccatgacagtaacagtaagcggatatttgggaaacactccatttttgcgcaagacctccgccggtacgcactgggtccgattctctctggcctgcaacgccagttatcgtgatgttaacggcaactggaccagcggggaaaccacgtggttcaactgcaaagcttgggggactttcgccgtcaacattgcggaatcgctgcacaagggcgatccggtggttgcgcagggacgtttagtgcccgggacttacgaacatgccgataaaacgactggcgtcgtcgaaaaacgtccagaattggctctgcacctgacccatattggggtagacctggtacgtactccttccataaacatcaaatatgccaaggaaaccagcgccgaggaaaactccgcgaaatcgagcaagttcgatatttctgcggactctttgaacaccgtgagggatacgggatttgcgcagacggagtcagacctcgtggagagtgtggatattcttgacgaattagacgttgaaatggaagctgccgatgaggaatctttaatcagcgtcgggactgacgcggtaccattctgaaaaagatttgcgatttccgttagcatattgggggtgcgggtttttaccccacccccaatagacctccgggccagatgttgctcggctcaccgaaactgtaaggaagttgtatgtcagagtacatttattcgatgttaaaggcccgcaagaaagtcggcgataagctcattttggatgacgtaacgatggcattcctgcctggagccaagattggcatggtaggtcccaacggagccggtaagtcgaccatcctgaaaatcatggcaggtttggatgaacccagcaatggtgaagccatcctcagtcccggatatacggtaggtatcctcttgcaggaacctccgcttaatgaggaaaaggacgtgctgggcaacgtcgaggaaggcgtgggggaaatcaaagccaagctggatcgatacaacgagatttcagcccaaatggcagacccggacgcagatttcgatgccctgatggaagaaatgggtcagctccaagaagctattgatgctgctgatgcctgggacctcgacagccagttggaacaggcgatggacgcgctgcgctgcccgccggcagacgcggacgtgaaaaccctctccggaggggaacgccgccgggtcgccttgtgcaagctgctgctggaagcccctgatttgctgctgcttgacgagccaaccaaccacttggacgccgagtcggtgctgtggctagagcagcatttgagccaatacaagggagcggttattgccgtcacccacgaccggtatttcctggatcacgtggcggggtggattgcggaggtcgaccgcggtcatctgtacccctatgagggcaactactccacctacttggaaaagaaacaggagcgtttggaagtccaaggtcgtaaagacgccaagctccaaaaacggttgaaagaagagttggagtgggtgcgccaatccgctaaggggcgtcaagccaagtcaaaggctcgtttgcaggcatatgaagcgatggcagcggaggctgagaagtcacggaaacttgatttcgaagaaatccagattccgccggggccgcggttgggcactttggtgctggaggcaactaaccttaagaaaggctttggtgaccgcaccctgattgatggtttgagtttcagcttgccccgaaacggcatcgtgggagttatcggacctaacggggtcgggaaaacgaccctgtttaagaccatcgtcgggctggagcccctcgacggcggtgacttgaaaatcggggaaaccgtgaaaatctcttatgtcgatcagactcgcgcgggcattgacccggaaaagacactgtgggaggtcgtctccgacggggcagattatattgaggtgggtaaggtccagatgccgtcgcgtgcttacgtgtccgctttcgggttcaagggagctgaccagcagaagcctgcgggtgttttgtccggcggggaacgtaaccgcctgaacctggctctgaccttgaaagaaggcggaaacctgctgctgctcgacgaaccaacgaacgacttggacgttgaaaccttgggatcgttggaaaacgccctgttgcagttccccggttgtgctgtggtcgtcacccacgaccgctggttcctggaccgagtggcgacgcacattttggcttatgagggtaccgaggaagatccggctaaatggttctggtttgaaggcaactttgagggctacgaagccaataagattcagcgtctgggaccggaagctgcccgaccgcatcgggtggtttatcggaaactgacccgcgggtgagggtaaccgtacccaaaagtcactggaaaacgttatagcaccccgtgtgcttgcccactaacgggtttgaacggttagaattagttaatgtaaaccgtccagtgtcgtaccggtagtggttgcgacgtgtggcaatcagcgagcggatttttgaggaatcgatacagtggccgaaacaacgcactatcttgaaggatatttgccccaagtccaggacttagcccgtcgactgggggtggacacggactattgggattttgcgggcaactaccatgaggtgtcgcaatcgactttggttcgagtcattgatgctctcggctttacgctgcaaagctgtgatgacattgggcgtgcctatgagtcgctggatcgagaatactggttttccacgcttccgaaagggctggtggtacggcagtctcacggggcgaacattccggttcacgtgcctgatggcaccagtttggaagtttggctggagactgaaaacggcgataccagaccgctggaacagctagatatttgggttccgccccgtgactttggtcccgaaggcaggcgtggcgaggccacgttccgcctgcctgaaggcaccgaatggggctaccataccctgcacgccaagaccgtggaaggcgaattttcccaacaggttgcggtcgttccggatcggctgcctttggggaatctggagcattcccgctcttggggcgtgatgacgcaactgtattcagtgtcttctcgcggttcctgggggatgggagacttccacgatttaggtcatatcgctgaaattttcgggcgccaaggcgcagacttcgtgctgaccaatccgttgcatgcgggcgagcccaacgtgcctctcacgccctctccttacctgccggtgtcgcggcgtttcctgaacccgctatacatccgccctgatgacattgcggaatatagccagttagattccacttctgaatctctggtgaaagtcgctttcgctcaagcctccaatgaaattttccccgttgatgcggtgaaatacattgatcgggatcgctcgtggaaagctaaacgtgaagccctggaagtcatttttaaggtaaaacgcagcccctcccgcgaagcagagttcagcgattttgtggcagtgcgaggtcaggacttgcaaaactttgctttgtggtgcgccctgtatgaccgtttcggcccgggaccttgggaagatgacgttgccgatgtttccagccctcgtgtggcggcgctgcgggaggaactcgccaaacgagtcgagttctattgctggctgcaatggattgcctccacgcagcttcacgcggctcaagaatctgccaagaactccggtatgacgattggcatcatgaacgaccttgcggtcggggtgcacaagtgcggtgctgacgtgtggtccatcccggacgctttcgtgcgtactatgagcgtgggtgcgccaccggatatgtacaatcagctgggtcaagactggtcccagccaccgatgaacccgcgttatatggcgactcacgattgggaacctttgcgagggattattcaccgtgccttagccgattgcggggctttgcgcatcgatcatgtgatggggctgcttcgcctgtggtggattccgcaaggaactgaccccaacgagggtacttacgttcgttacaaccacgaagctaccgtgggcatcatgctgttggaagccgccagagctaacgccgtagtggtcggggaggacttgggaacagtagaggactgggtccgtgattacctgaaagatcgcggtattctgggcacctcggtgctgtggtttgaacgcaacggtagtgatttcagatatccggatcaataccgcgaaatgtgcatggcagctgtcaatactcacgatttgcccccgaccttgggattcctccgtgccgtccacctggaagtacaggacagtttggggattctgccacagcccctcgaacaagccaaggacgctctgtatgacgacatctcgaagttggtggaaatgctgcggaacatggggctgctggaaaatgaatatccgaccgagtccgagctcattttggcgctacaccgtttcattggcatgaccccggcaaagctgtctgtagtcagcttggtcgacgcagtgggagacctgcggatgcaaaaccagcccggtacgaataacgaatacccgaactggcggattccgctaacggattctctgggacgttcggtcaaagtggaggagctggaatactacgtgggagtaggcgaaatctgcgaagcgatgcgcgaattggtgaatccgcagcatacggaaaacactgaaaactaatgttctgaaaggaattatattttcaaagccta

SEQ ID NO: 3852 - DNA, 23363 bp, synthetic construct
  source 1..23363: mol_type = other DNA
  misc_feature 1..23363: note = Synthetic
atcgccagcgattgcctctgctgcgtactggaatgggtatgctccgacgataatttttggcttctgcgcagaagtctcgtttgattcagcggagcagccagttgctagtgcgagcgagccggcagcgaaaagtaggaaggtagtcttaaaaaacttgttaaacacgataatcattctcatattattttggttagttttcaaattcataaaaactcgattcgagacaacattgtcgaacagataacctatatatgttgtgtcggttctttcaccgaccaggctcggtgccagccaggtatcgagaaatagccctaatggggcctgcgtagatgaggatttaatggctgaaagcaagctggataaggtaatcaacctttgtaagcgtcgcggttttgttttcccctgtggtgagatttacggcggaactcgtgccgcctgggactacggcccgcttggtgtagagctgaagaccaacattaggcgtcagtggtggcagcacatggtcacctctcgtagtgacgtcgtaggtttggattcgtcggtaattttgcctcgagaggtctgggttgcttccggtcacgtaggagtattcaccgacccgctgattgagtgcctgagctgccacaagcgttggcgcgcagaccagttgatggaagaatttgcggctcgcaagaacatatccgaggacgacgttgcgttgaccgacgtgccttgcccaagctgcggcaaccgcggcgaatacaccgagcctcgcgacttcaatatgatgctcaagaccaccctcggtccggtcgaggatgagtcgggtctgcactacctgcgtcccgagacagctcaaggcatcttcgtgaacttcaagaatgtgctcaattcttcgcgcataaagcctccgtttggcattgcccagatcggtaaaagtttccgcaacgagatcaccccaggcaacttcatcttccgaacccgtgagtttgaacagatggagctcgagttcttcgtagagccgggaaccgatgaggaatggcaccagtactggatcgataaccgtaaggcctggtatatggacctgggcatcagcgaagaaaacttgcgtttctacgagcacccgcaggagaagctgtcgcactactcgaagcgcacggtggacatcgaataccgcttcggattccagaacagcgatttcggtgagctcgagggtatcgcgaaccgcacagactttgacctgaagacccactccgagcactccggcactaacctcgagtactacgatcaggctcagaacaagcactacattccgtacgtgatcgagccttccgctggtttgacccgttccttgatggcattcatggtcgaggcttacaccgaagacgaagctcccaacactaagggcggcgtagataagcgcgttgttctcaagctagacccgcgcctgtcgcccgttaaggccgctgttctaccactctcgcgcaatgagaagctttctccgaaggcgcgtgatctagcagctgagttgcgtaagtactggaacgtcgacttcgacgacgcacaggcaattggtaagcgctatcgtcgtcaagacgagatcggcactccctactgcatcacggtggacttcgacactcttgacgacgatgccgtgacgatccgcgagcgcgacaccatgcgtcaggaacgcatcggaatcgacaaggtcaaggaattcctggccggcaagttggtcgactgctaataatcaaccggggtgcgttccttggaacgcaccccattatttttctttttgcctagtgaatcttctacctccgctaaaactcagcgcaccttctaacccagacgcgctagtcgtaaacactcctgttatcctcgcgcctatggcgggggtaaccaatgccgctttccgtcagctttgcgcagagcagggcgcgggcctgtacgtgtgcgaaatgatcacggctcgaggcctagtgatgggtgactggaaaaccgcggacatgctcacgttcgccgataatgaggtcttcaggagcgttcaaacttatggcgcagaccccgagtccatctatgtcgcagtcggcatattgtgcgagtcgttcaacgtcagccatattgatctcaactttggctgcccggtgcctaaagtaactagaaaaggcgggggtggcgccttgccatggaagctcgacttgatgcgagctgtgctgaaggccgctgtaaattctgcagaccgatatggggttccggtaaccgccaagactagaatcggaatcgaccagaatcacatcacatatcgcgatttcgggcagatcgctcaggacgtcggcatcgccgcggtttgcctgcacgggcgaacagtatccgaatattacggcgggcacgccaactgggagcccatcgcagatctggtggagcttcttgatattccagtcatcggcaacggagacatttgggaagcttccgatgcagttgagatggttaagcaaaccaactgtgctggcgttgaagtgggcaggggctgtttaggaaggccttggatattcagggatctcgccgatgcaatggcaggcaagcagacgcttacactgccaaacctggggcagattgctgcattggccagaagacacgcccagctgctgatcaaatataggggagagcgacacggtatgccggatttccgaaagcacactgcctggtatttcaagggattcccaatcggcggcgaaatgcgacacgctttcggaatggtcagtactctagacgaatacgacgatctcgttagtcagcttgatccgcaaatggagttcccagagaagctgttagggaaagccaggggaagaacagggcgagcaaaacgagtcgcgcttccagacggctggctagagactcgcagcgtcgaaggattcgatatgagcggtgccgaagaacacgtcgacggcgggtagttcctgcaggcaggaattttctttcttcaggtggcaagctggatgtgtggcaaagctagaacctaattcccgcacgaaagcatgggcaaaaacgatgagtggccatggtggtggagaattcatcaccgcgcataatgatacgcatgccgaactcgaacctggaaagacggtaggacgcgtagcaagggaagagttagaggccgccactttgcgacccggtgcgacgctttccaaaggtgcgggtaatcgggcgcgcccggaagaaccagatccggagcgaacgtgtttcgagcgagacagggacagaatcgtccactcgaccccttttcgacgcctagcgggtaaaacgcaggcagtcgttttccccactgaccatcagcgcactcgacttacacacgcactcgaagtcgctcaagtggctacgtcaattgccagggggataggcgtaaacgttgcgctggcagatgccatggctcttggccatgattgcggtcatggtccaggaggtcatgcctccgaggaggccttcgatatgtttattccagaaggattcgatcacgggccttggggtgcggatgtttctttagcgcatctgaatttgtgtgaagagacgttggatggaatccgtaatcactcttggtcgaggccggctcctttcactgtcgagggtgagatttgcagctgggccgacaggattgcttattgctgccacgatctagaggacgcgattcatgccggcgtcgtctcagaatcggatctgccgtcagatatctctggtgtgctgggtatatcccgtcgtgaacagttgtctgtgctgattcgctccgtgatcgacaccactaacgagcacggcgtagtggcgatgtcggcggagatatttgaggcaatggccgccttgcgtaggttcaactacgaccagatctacaccaggcaagagtctcttgatcagtcgttgacagtgataaaagttctgcagtcgctcgtaagttactacatcgataaccctgcctacctgccagattcatacagagacccaaaagatccggttaaggccgcggttatctatacgtcgggcatgacggaccggtttgcgttcgatcaagccgagaagctcctaggctgggatcctgcgaagctgcctaaggggatcggaagaggagcttaggggtgaagggctgccttgaggtagggaggaagcagctttgtcctcttaattagctcatgggaaactgccacacagcagacctggccggccatgatgccaagcagtaccaatacttgtgatgcgcctgcttgcagggctgttcctccgccaagcaggactccgatgaaagcacctggaagcgtcaccaggcctgcggttttggtcgagtcgatgttagggatgagtgcttcttttcgttctggttttatgacgatccagactgcttgggggcgtttgaaacccagagctaaggctgcctcgtaaatgccgatattttctctcaacgtgccgaaaattcgtcgtccggtgagggtttgagccttcatcacgttaccgatgatgattgagccgatcggcaccaaagaaaagccattgaaaggggcagttccagacaggaaaattaccgccaaaaccggcagcacacctgagcccattgccacacaaacccataggaaagagttcctgttttttactgtgccagtcgttgtccagaccgcatacaagaacattgcgatgataaaaagcagcccactccaccagcgctgaaccgcaagcacaactatgaatgaaacggccgccagctgcaagatggagcggatcgcggcaataatgatttgtttgctgagagttagcttcgcgaacctggcaactgtcgctgccaatgcgcacagtgcaatcagagcaattgctagctgccaggtcggatctatctgcatgattgtcattatgccgttttagccgggctgtttcgtctttcattcagattgggctaaccatagtttctctcgctagctagacttcaatccatggcaggccttatcagcaacgacgacatagcgcttgttcgcgagcgagcaaatatcgttagcgtggtcagtgactacgtgacgctccgtcctgccggttccgactccatgaagggcctttgcccgtttcacgacgaaaaaacgcccagtttccaggtgaccccttctcgcgggcttttctactgttttggctgcggcgaaggcggggacgtgatcacgttcttgcgcaaaattaacaatctggatttcgtcgaggcggttcagctgctcgccgacaaagtcggggtcgaattaagacagactgaagactctgggccgcgcgtcaacgttggggccagggcgaggattcttgccgctaatggcgccgcagcagatttttatgcttcccagatcgaaaaatccgataacgatgtattccgtgaattcgcgatgggcaggggattcaacaaacaagcctgccgacactttggcatggggtacgcgcctaaaggcggtagggcgttgcacaatgccctcaaccatgcaggtttcgacgacaagaccctcgtgcaagccggcctgatccgccaaaacggttgggactattttcagggcagggtcgtttggccaatccgcgactccgctaactccgtgctcggcttcggcgcaagaagggtattcgacgacgatcgcatgcctgcaaaatacttaaacaccccagaaacgccggtctacaaaaaatctaatgttctctacggtctcgacctagcgcgtcgacagattggcaaacaagcccaagcggtcatcgtcgaggggtacacggacgtcatggcggctcacctttcgggcgtagagaccgctgttgcttcttgcggcactgcgtttggtgaaggtcacgctcgtctcattagaaggctgatgggtgccagcgacgccttccacggagaagtaatcttcacatttgatggcgatgcggccggccagaaggcggcgctaaaggttttcgatctagatcaggaattcacttctcagacctacgtcgccgtggaaccaagcggtttagacccgtgtgatctacgtcttcaacacggtgaggccgcggtgcgagagctaatcggtaggcgggttccgctctatagattcgtcatggataatatcgtcagcaaatacgatcttgatcgcgcagacggcaggctcgacgcggtccgcgaagcatccggtttgatcaaatccgtcagagaccaatcactaattcccggatatttgcgtgagttagcccaaatggtgggcatggatccaaatgacgttaggcagatagtcaacagaaccaaccgagtcaacattccgcccgaaaaccagcggcgcagaaggtcagctcaaatcagcgcagcacagaacgcagcgacgctgatgccgatgcccgacaggaacgatcgtagaatcggcgtcgaaagaggcacactgaaactgatgctgcaggctcccaccactttcgacacttcctggaatagtcttaccccggaagatttcacgcaccccgcttaccgggcgctggctgaaaacatcttgaacgttggcttccaggcaagtaactggccacaagccgtcaacgattcgctcgaggacgaatctctcagaaagctacagctttcgttgatcgttgaggaagtcttagctcagcccagcgaggattacgcaactgcatacgtggcaaggctgaagctgattaccaccaaccgaaaactcgccaatctgcgttcaaaactgcagcgcctgaacccggtacaaaaccctcaagagcacaaagatctttttgctcaactcctaactctcgaaaccgatagacgtagataccaggctgagtctctcggagttgaagaatagctgtggataactaagtttttggctcaacacgcggcccaaaatttagggcatgagtatttgcaaactagctatagatccactgacccaccctgaagagatagaactggccaaaactctcgaatcaggcgtatatgcaaaacacctgcttaactcgggcagtgcggttcccactggattgctggaagcagtcatagctctgggcgaagacgccagatccacgctataccgagccaacctgcttttggcttcaaaactcgccaacgactggtctcgaaaagcaggactgccgaacaacgagctgctgcaagaggcgtgcatcgggctaggggaggcgatcaaacgctgggactgggcaaaagggcatagattcaccaccttcgcttggaacaccataaatgggactctggcacaagctgctgcgctacgttgtggagagctagatacttctattaatgcggcacgaaaaatatggcaggcaagaaaagcatggaatagacggcaagccgaagctgacgaaacaatctcagatggcaggttcgccagagaagcaaagctaggcgcttacgcgcacttggtgatgagcgcaggacggcaccttgagcttgtcccggagatggcagaaaacattgtcgagctgaaaattgaaaaacccgatctgccacctgggtggtcgagcgtgctgacccaaaaagaaaatcagatagtccgaatgcattacggtttgggctgcaaacgcaggacaaggaactacatcgcagagcaaatgcaactgagcgtcagcagcgtacgtagaattgaacttaaagcgttaagaaagcttcgcggctacattcaacaagccgcgtaaccaacggtagacactggaaggcaaatgaaagtatcacgagacgacctgcaagcccttcgcgagaaattgcctaaagcgagaatcattgtttccgctaaaggcctcaaggggacagcggccattctcgaagatcactttgcgttacttggctcagttggttgggacatcatcgcttggcaagagatccagtcaggatcttgggacgcaaaaaacggtgttctagcttgggaactgcttgacggcgctcgtggtggaataaagctagatgatcccggagatcttcccctcgtattcgccgaaaaaataagggcatcgataatcaccgaaactaacgtcgatctgggtgacggtctcggaaaaataacgattgccggccgtcgcgcgcccggcggcggcaagataacttggacggtctacgcgcttggtgccactgatcttgcagatgaagcggtcaaaaagcgtgtaatcgagaagacgaaactcattcagaaggagtacggcaactaggcagttcaagctccggaacggtcgattttgaatcttcgccaacatgttgctagtgtttctttctgcaccgagcgatcccctgtagctcaacggcagagcatctgactgttaatcagagggttcctggttcgaatccaggcgggggagccacaaggctcaggcttagtgatctgaataatttcagttctgtttggccaatattttgctcaccttttaggtgagcaatttttttgctcgaaaaccgtttaattatcgttagtaatgtgtgatgacggctttcggggtgaatactttgaagatatccgtataggagtcacatattgtctgttaaaagaacggtatcgatagctttcgcatttattggattgatggtcggggctggtttcgcaactggtcaggaaaccattcagtacttcatatctgcaggatccattggcatcatcggtgcggtaatcgcgggttcggtgattgcggttgcgggcgtcgttattttgcaattgggctcgtactatctagccgatgaacataacgaggtattcacatctatcgcacacaagactgtggctaagtgtctagatgtggcagtaatcgtcactttgttcgcgtttggatttgtaatgcttgccggagcaggatctacgctggctcaggcattcgattggccagtttggatcggctctaccgtgatgctcgggttagtgctgatctccggtttcctagatgtcgaaaagatcactaacgtcatcggtacgttaactccactagtgttcgtgattgttatcggtgcattcgtctactcgatgaccaagctccctctcgatttcaatgttttgaatcaagccgcattcagcgcgagcgcgccggtttcaccttggtggctttctgccatcaactatgcgggtctttccctgatcctaggtgtgtcgatggttttggttatcggcggtaactacctcgatcctcgtgagacgggcaagggcggaatgctcggcgggatcatttacatgtgcctgttagcgatggttgccgtggctattttcttgaacgtcgacgaggtggttggcactgacgttccaatgctggctctgtttcagaacatcaggccttggatgggctatgtggtggtgtttatcgtctacgccatgatctacaacacctgtatcggcatgttttacgccttgggccgtcgcctggccgctggaaatcaggttaagttcaagattttctttaccatctccgcgattgctggttgggcggtcagcttcatcgggttccaagacctaatgggagtcatctatcccgctctcggctacctagggatggttttgatcaccatcctcgtggtcgcttatttgcgtgagcgtccgaagatctccaaggagagcgagcgtcgtgtccgcatcaggtcgttgttctacaagcatgagaaccccgatactgacgatttgagtcgcaaagagcgtaaagagttaaacaggctgatggacgcatcggtgatcgaaaattctgagcttgaacagaccgttacccgagaggtcgtagcggatttggatggagatgacgagatcgactactcggcaaacgtagaaggtaaagaagcaggattcaaagaaatctaaccaggcttattagaagtgcaagcataaaaatagggccccgaggggccctatggagcattcggaacctcaaacgtggaggttcttactgagaatcagttctgaattgagtttaacatcacattaatttctttgaaggtaaaaccctgaatcaggggtttacctttttctggtttgtggcagttatataaaaaatcatcggttgcgtctcttatcatctgaatatgagtcatgagatcgattacaaagttggtattgacgtaggaacaaattctgtggggttctgcgccctacaggttgatgctaacggtatgccagtcaagctgctaagcagcatggttaagatccatgattctggagtagaccctgaaaaagttaaaagcgcagttacgaggctcgcttccgcagggtttgctcgtcgtactagaaggctctatcgacgtcgtaagaagcgtttggctgagctcgatcgaaagcttgtcgagctaggcatgccaataatcgatctagagagtctacccgacccgtatgcgccatggaaggcgaggcttctcctggtacaggagaagcttgaagcctctgaacaaaagcgcgaattatccattgcgctaaggcatatcgctaggcatagaggctggaagaatccttatgagcgcatcgaatccctctaccatgtgcaagaagacagtgatcttttcgaggatctgaaaaagagagttagcgagaagaccggcgctgttttcgttggcggcgagacgttgccggaggtgctttcgcacgttggtttcaatgcctctgaaaggcttaggagcgccccatccgtcaagtacggtcagcgctcactcatcgacggagaaaacgtagaaggcgagactaaggacggcatcatcggcgggaaactgatgcagtctgataacgcgaacgagatacataaaattgcgcaggttcaggagattcctgacgaaatcgtaaaaaccttgatcgatcttgtatttaaagctgaaagtcctaaaggctcagctagtaaacgagtcaagaaggattctttgcctggccagaacaataaacctcgagcagagaaggcgcatctgtcttttcagaggttccggattgtttctgtcattgcaaatatgcgtttgatagatcctgagaatggagagctacgcaagctaaacgctgctgagaaatctaagttaatagattttctaatgctcccagatgattctgatggcatcacctggggagatgttgccgagattctcgatgtccctcgagaatgtctccaaggcacctccaaactcgcgcccgaaggtgagcgcgcttcgtcctttccgccggttaatgtaacgcactcgagggttacgaagtgcggggttaaaccaatagtcgaatggtgggaagaagcaaactttgaagagaagaacgctctgataacacttttgtctaatgccgacgaactagatcctgatgttcccggagcggatagtgcaaataaattaatggaaagtctgagcgacaaacagctcgaaaatttagacaaaataaaacttccggccggcagggcagcatattccatcgatagtcttgatcggttgacagaaaaaatgatttcagattctctagaacttcacaaggctaggaaagctgaattcggtgtgcctgacgactggaggccgccgagtgatccgattggagagcctgtcggaaatcctgctgtcgaccgcgttcttaaggctgtcaaccgatggctgctagccgcagaacgtgagtggggcgctcctctgtcagtgaacatcgaacacgccagatcgggcttcacttccgagtctcaggttagagagtacgaaagagaccttaagcggaggagagaacgtaatcagcgcgtcgtttccgaagcaaatagaaagcttggctctcaaatggttgagagaagaagcgacataactcgttatgtttctgttcgtaggcagaattgtcagtgcgcttactgcggagagccgatcacttatcagtcctgcgaaatggaccacatagtccccagaaaggggccaggttcgacgaacacgagggacaatctggttgctgtttgtgtgcgttgtaatagggcaaaaacgaatatcccgtttgctgtttgggtggaaagcactaccatccccagcgtaagcgtaaaggaagctatcgctcgcgttcgttattggatcaaagacgaaggtcttacactaaagcaacaacggaatttccagaacgatgtcatcaatagattgaaaaagaaaagcgcggacgaagagatcgataatagatccatcgagtctgttgcttggatggccaacgagcttcatgcgagagttaagggacacttcgaatctgttggagctgaaacaaaagttaccgtattccgtggtgctattacagctgaagctaggaaagctacaggattcgagggcaaagtaaatctgattgatggccacgtgaagactcgttttgataggcgacaccatgcgatggatgcagccgtaatatcgcttatgaggccttctgtggctaaaacattggctgaacgatcaaatattaaacaaagccagagaattactcgtcgggctgaggattggaaaaactacagaggtcgtgatgaggggtcgagaaatatcttcgatcgttggtcgcgccaaatggatcaaatgctcgtgttgtttaatatcgcgttggctgaagatgccattccggtgactcaagatgttcggctaagggttggtaacggaagagcgcacgatgacacaattcggccattagctgctaaacgagtgggcgattcatggacgcttcaagaaattgacagggccgctacagaacaaatgtggtgtgcgctgactcagcagtccgatttcgatccggttgaaggactgccagaaaatcaattacgaaaagttagagtcaagaatattttctacgaagccaacgatgaattgcggattttgccaaaacagatagcggctatcccggtgagaaatggttacgcagaaatcggaaacactattcaccacgctcgcatttataaattcggttctaaaaagcctaaatacggcatgattcgagtgtttacccatgatttattgaaaaataaatcagacgacgttttcaccgttgaactgaagccatctagcgtaagtatgagaaacgctgaatcttctgtaagaaaagccgttctcaaaggtgaagcagaatatctaggctggttagtgactgggtctgagcttgaacttgatctgagcgatagctatttcagtcaaaaggcaatcggcgagttgttaaaagattttcctgaaacgaatcgctgggttgtctcgggattcgactcgaacaagcaacttaaactcaggccaagattattagctgctgaaggaagcgagaaagttgcacttaatgatggaagtaaagtcattatttgcgataaagggtggcgtccttccgttaatttgctgttctcgaaagctagctttttgagaaaaatttgcagaccggctttaggtcgtgagagaactaaatcagactcaggattaccgatcagcgtaactttgaaggagtcgtaatgagtttgcgctggcgggtagttgattgttctctcatggagggaaggatatcttctgcccgcggcgctctgcttatagaaaaagacaatttagagccaacaaacttgccattggcagatgtttcagtattactcgtcggcgtaaaagttagattctctgcggcagccatgcacaggctattttctcaagatattgctgtcgtcttttgcgattggaagggcgtacccgaaggcgctgcttactcatggggaactcacaaccgtatagcagcaaggcacagggctcaggccaaattgtctgttcctcgccagaagaatgcctggggccgattaattaaagccaagatttctggtcaagctgccgtgttgaaagaccaaggtaggcaagaccatagacagcttgaagcgttagttcccaaagttcgatctggagacccggataatttggaggccagggctgcaagaatatattggcattcgctttggggaagtgaagattttgttcggatccctggacaaggaatttctaacagaaatgctcacctggattatgcctatacggtgctaagaggcttgggcattagggcagtggtaggtgcggggctatctgcagcagtcggcatttttcatagaaatagaagtaacaacttttctttggtcgacgacctgatcgaacctttccggcctgcggttgatgatgcagtagctgatctcccttgcgatgctccgattgaggatccagaagttagaaaatgtttggttgctgcctcttcaagaaagttcctacgagacggcagaactattagctcagcgtttgacgagctggcgcaaagatttggccagtacgttgagggcgatatttcgaaactaacggttgttccctggcaggggaggtcttgagatggcagatgatcctatgtggtgcatatgcatgttcgacttaccaacaaagacgaagaggcagcgcaggcgatattcagagttcaggaacatgctccttgacaatggattcgtgttcacgcagctgagtgtctatgcaaagtattctcccagcggcgttctcaccaaccgtgaggtagccgaaataaagaatcaggttccttctgagggagagattaggttgatgcatatatctgatcgccaatgggcaaataccatcagattttgcaacgcaatagagatggaacaagaaaaagctccagaacagttgctactttttaattgaaaagaagcaaaaaaattgtccctggcaagggaattaatccccttgctcaagtctaacaaggggattaagaactgattcccagcttcagattcaacttggctaaaaggatggcaagtctaacaaggggattaagaactgatttccagccagattgtgtatgccacctatagtcaggcaagtctaacaaggggattaagaactgattcccagcatgtatctttcatgcatacaaataagcacaagtctaacaaggggattaagaactgattcccagcatatcgacttgatggccgaacagttcaacaagtctaacaaggggattaagaactgattattatccttgcggtctgcttagttaggccttctggcttgtacggcaattcagatttttacctcttccgtgtcagggaagcgctttatatgtggttaggtaaatctgtcgaagagcataaaaattgggacctgctttgcagatcccaattcccttcgtagcgggggcaggatttgaacctgcgacctccgggttatgagcccggcgagctaccgaactgctccaccccgcggcgtctgatcaactataaggcatgttttataaaatgcaaaattgagacgcagtgagaattctctgtataacctaacgttgttaggcgctaaactatcccaagactacaatcacctggtggtcggtgtaatacgcgatgagcgtttggaggatcatgtttcgcaaagctttggtgtgcctggtcgcattgctcctagtcttaagtgggtgtggctctaattccaacgttgccccacaagacagggttcttatagtcggcacccataccacaccaagcacgttggacttatcggcaaatgatgctgccgctatctctgaggtgctcctatataacgtttaccaaaccctcgtacgtacagatgatcagggacaactacagaagctcttagcaagcgactaccagatctctagcgatcgcaagacttacaccttcacgctacgccccggggcaaagttctctagcggcgctccagttaacgctgaagcggtagtgaagtcgatcaactacataatcaacgacgagaatacttctaaaacacgtaagaaagagatggcagtagtcgattctgtcgaggctaaagactcagacactgttgagttcaagttgaagcgtccaagcaacttctggctatacagcatggctggccccgccggcgtgatttatgaccctgcgacgcttgactctggcgacttggcaacacagccggtcggatctgggccctacaaacttgatacttggctgcagggcgaagaaatcaggctcatccgtgatcctggatattggggtaccccagctcgtgttgccggcgtcaacttcaaatattttgccgacccgaatgctatgaacaatgcgatggcatcaggcagcatcgacatcatccgcaatgtaactgctccgcaggctctcggacagttcgaaaacaacgaccagtacaaggtgctagagggctacaccaatggcgaggttgttcttggaatgaaccagcagcgtgagccgctcaaagaccttagagtccgtcaggcaatcaactacgccattgacaggcaggctctactggacgcggtttgggcaggaaaaggaacgctgatcggttccatggttccaccgttcgagccttggttcgaggatctttccgatgcttatccttacaacccagaaaaggctaaagaacttctggccgaagctggatacggtgacggcttgactcttaccatgcgcgtaccgacactgccgtatgccactgactctgccgcttacatctccagcgttctttcccaggtcggtatcacgctgaacatcgaacagctagagtttccagcgcgctggatcgatgaggttatggtcaagtcgaactacgatctgaccatcgtttcgcacgtggaaccgcgagatatcgtgcgtttcgcgacccccgactactactggcacttcgataacgaagaactacgtcaagtcatggcacaggccgatcagtctccagagccagagcagattgaacttttgaagaaggccgcaaggataatttccgaccaagctggcgccgatttcctttggctgctgcccaacttggtcgtcaccaagccggaaattgttgggatcagctcaaacgcaactaatctcagcttcgatctgacgaacgtggcgatcaacgagtaactcatgtctgcgcaaaccgcgaaagccacctggggctctaggctcaggctgctaggaataaaaatcctttctttgttcgtcagcctggtagcggcatctttagttgtctttttacttgtcaacctgctcccgggtgacgtcgcgggagtcatcctcggccaaaacgctgatccaacttccgttgcagccttgcgtgagacgatgaatctagatcagccttggccggcacgttatctggcatgggtaggaggcctactccaaggcgatttggggtcttcgatcttcactagccaacctatttccatgcagctcggcagaaggctgggcgtgactttcagcctcgtcattctaggaatgctttttgctgttggcatttcgctgccgttaggggcgtatgccgcggcgagaagaaacaaggccactggtgttgcggtttcaatactcagccagctcggaatggcagtgccagctttccttgccggtctgttgctcgtcatcgtgtttgcggtatggctcggctggctgccagcaaacgggtacatagagttcagaacgaacccgcttatgtgggcgaggaatctcgttctgccggtcgcatccttggctatggttcagggggcaattctcactagatacactcgatcggcattcgttgaggtactcaatcaggactactttcggacggcacgcgctgtcggatggaggtttcgcccggccatcatccggcatggcatccgaaatgccagtcttcaggtgatcacagtgctagggctccagctagctagcctgcttgttggctcgatcgttgtggaacgagttttcagccttccgggactcggtagctatctgatcgctgccgtggggcagagagacctgcctgttgtgcaatctgtcgtgatgatcctcgttgcgctggttctaattattaacacggtggtcgacatcatctaccacctgctagatccccgactaaaagcagccgagggggtagagcggtgaaaagggcaaacttatatatcggcgctgtattggtaggcatcgtgattttgctcggcataatctcgtttttctggatgccgtttgatcctacccaggtctcgacagaccgattgcagcttccgagcgctcagcacctgttcggaaccgacgactttggtcgagacatcttctccaggatcttgtctggcgcaggcatatgcctgctggtcggaatcgtctctgtaggaattggcgccataatcggagttccgatgggtatgatcgctgctgttaaaggcggtctattcgaacgatttgtcatgcgagttgcggacatcatgtacgcctttcctgcgatactcttggcgattttgcttgcagccgcgagaggatctggctcaacctggacggcaatggtggcgattggcgtagcgtcgattcctgctttcgctagggtttctcgcgcatcgactctccaagtgcttaaccaggactacatggttgcttctagggcctgcggaacgcctaggtacgtctcgatctttacacacgttctgcccaacgttgctcctacgattatggttcaggggtccgtcagcttcgcactggcgattcttgctgaggcagctttgagttatctgggcttgggcgcgtccccagaccacccgacatggggcctgatgctatttgatgcgcagaagtccatcctggttgaaccaaaccttgcgctatggcccgcgatatttatcgcaattacagttctcggctttaacctgcttggagacggcctgcgtgagattctcgaccctcgtcttcgggagcagggacagtgatggtaagcaagaacttattagaagtcaggaatcttcgagttagcttcaaaggcaaagaagcggttcgaggtatcgatttagaaattaggcctggtcagcgagtcggcctaattggagagtcaggatccggaaagtccgtcacagcccttgccttgatgaagctgctgcctcctaacgcaacaatcgagggctccataaaactagctgacgtagagctctcgaatcgaaatgatgcgcagatgtcttcgatcaggggcagcaaaatcggcatgattttccaggagcccatgaccgcgctagaccccactatgcaggttgggcggcaggtggcagaggctcttttgctccactctgagcgacaaggtaaatcatctgatcgtgtttgtcagatgctggagcaggccggacttcccgacccacagagaatcgctaagagctacccgcatcagctttccggtgggcagcggcagcgagtcctaatcgcaatggcgttaattaatgctccttcgcttcttatctgtgacgaacccaccactgcgctggatgtgaccgtgcaggataaagtcttaaaattgctagataaagaacttgctaaggtaaacgccgcatgcttgttcatcagccacgatttggcggtagtctcgcagatctgcgaatacctcatggtcatgtacaagggtgaaatcgtggaaagcggacgaaggacaaaaatcttgaatgatcctcagcacccttacacaaaggggctgctggccgccgctaactttgttagcgccaatcctggacagccattaagagttctggatgatttttggagcggaaatgatctatagggctcgtggcctgcgaaaaatttacaagcacggcaagaatgaagttaccgctgtcgacgacgttagcttagatatcgctgctggcgaacgccttggaatagtaggggaatcaggttccggcaaatccacactgatcagaatgctcgcgggactaagcaaacccacttccggcgaaatctttcttgatgatgaaaggataaccggcaaaaaagagcgcgagctggctccgatgcgggcaagagtccaagtcgtattccaggatccgcgcagctcgcttgatccgcgaatgaaaattcgcaaaatcgtcacagaggcacttaggtccccgtgggttaaggggaggctgggaatcaccgatgatcctgatgcgcgctgtgcacaagtgctagaacaagtagagctcgatccagcagatgcagacaaatacccacacgaatttagcggtggacagcgccaacgaatagctatagcacgagcgctggcatcacatccggacgtccttatcgctgacgaggcggtttcagcgctggacgtttccgtgcgggctcaagtgcttaaccttttgaaccgcattgctgaccaggagaaccttacactgctattcgtcagccacgacttagcggttgtcagatacctttgcgacagggtcatagtaatgcgaaacggcaagatcgtagagtcaggcgatacctcgaaagtcctttacgagccggaggcagaatacacgaagaatttgctctcagctatcccacgtttgagagtcgattagcgactgagagttttcttactagaatctcatgtcatgaaggctttacttttagagaacatcgataaaaccgcagttgacgctttcgaagccgccggatttgaagtcgactaccgcaaaggcgccttagaaggtgacgaattaattcaggctcttcaggatgtgaatgtcgtcggtgttcgatccaggactaacctgacgacagatgtcatcgagcagatgccagagcaactggtggccatcggagccttcagcattggcactaaccagattgctttggacgcggccgccaagcgtggaatcgtatgcttcaacgctccatattccaacactcgctctgtcgtcgaactcgcgatgggtgaaatcgtagttatggcccgcaggctcttcgacaagagccaacagatgcacaacggtgtctggcagaagtccgccgacggcagccatgaggttcgtggccgcacgctcggcatcatcggctacggaaatattggttcgcaactatctatcctggctgagtctttcggtatgaacgtcaacttctacgatgtagccgacaaactcgccctaggaaacgctcaccgctgcgatagcctagaagaactgctcagcatcagcgagaccgtctctatccacgtcgatggtcgaaacgagaaccacgacattttcggtgaaaaagaattcgccctaatgccggagcgttcgctattcctcaacctctcgcgaggattcgtcgtagacgaggaagctctagccgagaacctgcgctcaggacatatcgcaggcgcagctgtcgacgtctaccacaacgagcccaagaagagcggagacccattcactaacccgcttcagggcattccaaatgtgattttgacaccgcacgttggtggatctactcgcgaagcacagtctgatattggtggctacgtttccggaaagctaatcgactacgtcaggacgggtaacacctccatgagcgttaatatgcctgaggttcaggttcagcccatttctggccaccggattctgcacatccaccacaacgtgccgggcgttatggcggatcttaactcgatcctcagcaaccacaacgctaacattgcttaccaggcgctatcgaccatcggcgaggtcggattcgtagtgatggacattacagccagcactcctgggctaaccgaagaattagcccaggttcctcacaccatcagggttagggaagttagctagttggacgcagacgatccagcatctctcggtgaagcatcccgttcgtagcaagtgcccccgggccaaacggaccatcttcaccgtcgatgctggtgaacctgcctccagcctcacggacaattacgtctagtgccgccatatcgtgcagggaaagttctggctcacaggcgatgtccacgacgccttcggcgacaagcatgtagctccagaagtctccgaaagcgcgggtcctgcctgcgtcccttagcacgtctacaaatccttggccgcggccggatgagatccacccgtgcagtgaggagtaagaaacaaacgcatccgacaagctagaaatgccggaaacgtgtattctttcggccttcatcagcgaacggccggtccacgcgcctaggccctcgccggcccaccagcgttttcctagcattggtgcggaaaccagaccaaccttcatttctccttcgacttcgagaccaatcagcgtagcccagacgggtacgcctcgaacgaagttggccgttccatcaataggatctatgatccaacgccgaggcccgtagccggtatcttcgaattcttctccgtgcactgcatctcttggacgggtgctcgaaatcatcgaacgtattgttttttcgacgctacggtcagcatcggtaacttctgtgtgatccggcttcgtctcgattttgagatcttgggcgcggaagcgttcttcggtgatcgcatcagcgctatctgcaagcagatgagcgaggcgaatatcttcagtgtagtcagccacgaatccaggctagctgcccggaacgtcatttgcctgcaacgcctcgaggatcctgcgtaatgatacgagcctattttcgtctatggcctcgtcctgtagcgctttgtctagtccgcactcgctttcgcctgtttcgtgtgtacagccacgagggcaaagatccaagtattcggctagtccgctgaatgcggccaggactgattcgggggtaacgtgggataacccgaaactacgtaccccaggggtgtctattacccaaccttccgaatcgggaagcctgagcgcttgtgcagaagtggaggtgtgcctgccacgacctgtgttctcattaacgcttccagtctgacgattagcgtttggcacaatccgatttattagggtcgattttcctacgcctgaatggccaatgaatacagttacgtgaccggcaagcgcttcgagaagttcgtcgatttccacatccggcccaactacgaagatagtcaggtctaggggagcgtaagtatcaatcagatgctgtgggctggctagatccgccttggtcagacacagtatcggcttcattccagcgtcgtaagcggaaaccagaattcgatcaatcattccctctcgtggcgggggatccgccagcgcggtaacgatcagtagctggtcggcgttggcgacgattggccgttccagggggctatcgtcatctgctgtcctgcgtaatactgtttgtcttgggacgatctcgacgattcgggcgagcgtaccaactttcccagaagtatcgccaacaacccgagccttgtctccaacgattactcccttacggcctagctgccttgccttagtggcaatgaccaggttcccggtggattccatcacgcactggtaacgaccgcgatcgatcgtgatgaccctgcctatctctgcatcagagtaatctggcctgacctttgtcctgggcctgctacgtttttttggcctaccaaagttgaagtcgtcgacgtctaaatcgcgaatattgcggccggcatatttccggctcattcggcattcaccatttttgtccagcgctcgacaaaatctggcattgtcttagaggcagccttgggatcttccacctcgaggtttgagcactttaaggctaa

SEQ ID NO: 3853 - DNA, 23363 bp, synthetic construct
  source 1..23363: mol_type = other DNA
  misc_feature 1..23363: note = Synthetic
cgtacagggcacaccaaaacgcgaaatcctctaacccctgaccctcgtttttacggtacaactcaaaaccgcgttgacgcgcctgggaacgcggaagcttaaaaataacttccaacgcgctcttctttgccttccacaccgcgtcgcgatcaatctccgtgttgcgcaaactcgactgcttcaccggctcgcccgcccaagaaataattgcccgctgagcagaatccatgtaggcaacctcgcgaatatcctccgggcgaatataaatggggttaaagaaacgacgagatacgggcaaataaggcgatggcgtcatcggagcagaaggctccgccgcatgaagcggattaataaggaagaactgcgccccaaacgagccccacatggacagcaactcgcacaaatcagccgtatcgccaataccccaagattcacggctacgcaaggaatagagttgccccatcgcgccccacccggaagtctcagtttcttgaggagaaggcaagcgttgaggaaccacaataagagcttcctcatagtcgtgactttcctgagtgcccggcactgtcacctgcgcacaaatcgtgtgataccccaaaggaagagtcgatggtacgacgaaagaggcctgcccggtttgaatcccgtcaatcatacggggttgttcataatcttcagcttgacgaacttcaacacgttcaccctcctcggttatgatgtggagaacaacctgtgcgccgtgcggaacatgaacctgcacagtgtattcattgccttgacgcaccactgttgtggaaggaagaacttttcgccattggcggtgttcggcatactccaacgcaacccgcgtggcgccctcagtggatgcatccacacccatagctgcaagtattcgaaccagggtgtccggttgaacttttacgcattgccctgaaaaactccagtatttaggtgcaacaccataagcatccgcaatacgatgtaataattcttccggaggcaactccgccataaaccctcctacgcgcaacgggacatcccgtgtcaacaaacatccttatcaaggataacccagataaccttacgaaacctatgcatcccatatgttttccagatattttcactcctaggttagatttttccgttcgccacccgcaccagttttccgttcgccaccagcagtaattttgtgtttgtaaccggagcgagtttctattcgtaaccgccaatatttttgtgttcacaacaggctctacttttgtgttcacaaccgccactaactttgtgttgacagtaggtgcgttttttactttttgtcatcgccatttttcttttttgacgcctgagaacttttctttcatcgacgaccaccacaaacacacatttgttttggcaaatatgtacacttctgagcactcgactacaatagagagaagatagctacttgcaaaggggcaacaatgaattcaactaatcgcgtagatattccaaaaacgtacacggaaccgctggcatcgattctcaataacctacgcctcgaaagaattcagcccgggttgtaccgcggagataatcttgttcaagtcacggggcgagtttatgggggtcaagtttttgggcaggcaactgttgccgccgctgatcacgtgaagcgcaccttggatatcgacgacgatgaacggctttgccattccatgacggcagcttttttgaggccgggacgccttgacgctcccctgcttttccacgtcgaacaaacgaatgacggccattctttctccacgcgcaccgttcacgccattcaggacgacaacgttattttttcggcacgtatttctttccagctccgccaacctagcgtgagcttggggctcactcagcctgaggtgacgggtccagataatttgcgttcatctgttgattattttgcgtcgatggatcactggtgggcaaaaaatatgtcctcaactaacgcgattgatatgcggtgggttgagggtgatatttatgcaaaacccgatcctgtgcgtaggccacatcaatatttatggcttaaaagccgttcagcaatgccggagggaacctcgcgaacagttcagcgtgcggttcttgggtattctgccgaccagttcatgttagaaccggcgatgcgtgcgatgggtttgcattggatgagtcgtaatattagcgtggcaaccttggatcatgaaatttggtggcatcgtaatttcgatatgtccgactggattcttgcagatatgacctgcctttcagcacaaaacggacgcgctctatgtaccgcatccttcttccaaaatgacaaacatattgcgacgatgaaccaggaaggcatggttcgttttaagcacctgtcaagttccgtacccacagaataagaaagccgtttatcacgctcacatgagattattgccttcggaacacgcttatgccggtatctcggaacccatgtagctattcgttcgagataccggcataagcgtgagataattccggattaggttaattcctatcgggtgaggcgtcgatgagcgcccgcgccgggcgtcaatgctgcttcacctaggcgttccgccttgttcttttcgtagccttcgaagtttccttcataccagtaccattgtgatggatcttcttccgtgccttcccaggcaagaatatgggtggcgactcgatcaaggaaccagcgatcgtgtgtaataaccaccgcacaacctgggaattgcaggagagcgttttccaaagatccgagggtttcgacgtccaaatcgttggtcggttcgtcgagaagaagaaggtttccgccctgcttgagtgttaaagcgagattcaaacggttgcgttcaccaccggaaagaataccggctttcttctgctgatctgggcctttgaagccgaatgcggaaacataggcacgcgacggcatttcgacgtttccaacctgaatgtaatctaaaccgtcagaaacaacttcccacaacggcatttctggatcaataccttcacggttctgatcaacataggaaatttttacggtttcaccgattttcagttcgccgccgtcgagtttttccataccaacaattgttttgaacagggttgatttaccaacaccgttaggcccgatgattcccacaatgccgttgcgtggcaaggagaaggaaaggttgtcgataagaacacgctccccaaaacctttcttgatgtttttaccttcaaggacaaggtttccaaggcgaggcccgggtggaatctggatttcttcaaaatcaagcttacgggtacgttcggcttctgccgccatttcttcgtagcgttccaaacgcgccttggatttcgcctgacgtccttttgctgaggagcgaacccattcgagttcttccttcaggcgctttgctagtttagcgtctttcttaccctgaacttccaaacgatcctttttggtttccaaataggtcgagtagttgccttcataggggtacaggcgcccgcgatcaacttcagcaatccactgcgccatgttatccaggaagtaacgatcgtgggtgaccgcaataacggcaccttcgtaactttgcagatgcttttcgagccacaacacggattctgcatccaggtggttcgtaggttcgtcgagaagaagcaaatctggtgcttccaaaaggagacggcacagtgcaacacggcggcgttccccaccggaaagaacattcacgggcatgtctccgggagggcaacgcaaagcttccattgcttgcccaagctgggaatccaaatcccacgcattagccgcatcaatttcggtttggagtttacccatttcgtccatgagtttatcgaaatcggcatctggatcagccatttcttcaccgatttggttgaaacggtgaagtttgtcaatcatgtccttacgtccaagttgaacgttttccaatacggttttatcctcatcgagaggtggttcctgcaggagaatacccaccgtatatcccggactcaaccgtgcttcaccattcgatgcttcatccaagcccgccatgattttcaaaatcgtggacttaccggcaccgttggggccaaccataccgattttcgcccccgggaagaacgccatggtaacgtcatcgagaattgttttatcccccacgcgcttggacgcatggatcatttgataaatgaattcagccacttatttatcccgccttaaaattatcgtttacggcgctttatagcggttttccgcttgccaacctaactaatcctacctggttgggcacgtattgtcagttgagaaaataacctcacatcttcacgtgtttccgcttgcgcagtgtaaccatatgcacgacgtaaccacacacatttccgcctccacagcgtaaccacatgcacagcgtaaccacacacgcactatagtcacatgcgtagctacaccatgaacgtatgtgaattatcgggaatcacaacccaatcacgcgggaaccttatcgtcaaagtgttcccattcgttgctgcaaaccacagcgttaccgtcaaaagggggctgatcgccgccttcctccgctacggcttgcgaactcatcgcactgcctgcgcccgagctcccaacggccttcccggcttcaaacacaccagccgagttcgattcaccattcccagcaccgccagaaccagtacctgcgccagaaccagccacgccaccggaaacagtagcgccatcactcgcaaccttcggttgcttcacccgcacaaaatgcgcttccccggtgttgagatcgattcccacagaatcaacggcaagcgttagtcgcgtatttgtttgcccgttatcccccacccaggtgcgctccgtcagtttcccgcgcgccaacagcggagttcccgtttttacgctcgctgccatattcgtcgccaaactgccccgtgcccgcagggaataccacacggtttgcccttcttcgtaactttgcgacgtcggggaaaaatatgaggaagtcaccccaacgttcacggttgccgtccggctcccgtccttattgttgtacagcgttaccgccgacccagcaaaaccccgaattgttacgattgtatcgtttgccattgcgcatcctttcgctctgtttcttgcttacaaggcatatctttaggatgcacgacgaatgagttccgtgtttccgtcgtccctcaatctgtggataacgcagaaacctcaccatcttgtggataacttttatccccaagcaactcgtgacgaacgttcatatagtcgccctggattttttgtactggaacaagaagattttccgtaacaacatgattgacagcgtcgcgtgcggattggatgtatgcaacacgtgccgtacgtctagcgcgcacacgtaacgcacgcgcccagagaccgccacacaacagcatcgcacagcccaccatccagaacagccattgcatctggggactaacgaagaaaggcagagcccagagcacgcatgtaacacacacaaaaatcaaaagaacagcaaagctacccgtgtcagaaacccgcggaatatcaacctttgccagggctttacccgtctcccgtcgtaaaatttcgggactgggaatagcatcgtcaacgcctttcacccacgaatcgggcatcccgcgcccagctttcacaacccacgcagagcgcaaagccgtcgttacagaaatcgccggtggctgaggtttagggagaactttggaggccgaaccgccttcaacaagtgcctcggcaactgccggcacacccgctgcatcatacagttcttccgaaatttgctgaacatagtcggcagaaatgtcctgtgctggttgcgaataggcatgccccacacctcgtttgatatctttcaactccaacgtggccgtcaccgatgcgctatcttctttgcgtcccgcgctttcaagatactcccacaactgtggtagcccctcctcggttaaggcggagactttcagtacgggaatgtccccaatgccgtcggcaaccagcaacttatgaacatcctccgccaccaaatcgacactggattcgggaagcgtatcgatttggttcagaaccgcaaccatgcgattcttacgagttttcatgttttcaatatagctggagtgaatcaaatcatcggcgtatttttgcggatcgaacacccacaccaaaacatccacctgcggcaaaatcgaatccaccaaaagactattttcaaaagcaatcgaatcgtgatcgggaagatccaacagaatagtgtggttcacgtcgtaatcaaccgtgcgcaggatagtatccgcgataacggtattccgcgtagaaatacccattgtgcgcaggacctctttggcgccctcgtcccacacgcacgcgcttacctccatacttgttggtcgaatatcgcccacctgagcgaaattccagcccacaatcttgttaaataacgaggattttccagaacccgtgccgcctacgagtgccacaaccgtgtagccgctccccgcttgggcgcgttcgcgaagtttttctacatcttttgtggcacgatccagaatgtaggggctgaaatgctcggaatgtttgtccaatgtcgttaagaacgacgcgacctcttcttcgttccaagcggttgggttgctcgcttttttcggagttacgacggacggctcgttcttctcgccagtttcgtgagcaacgtcagtttcacgagcgtcgccagtttcgttaccacccgcttcatgaacaccagtttcgcgcccgtcgtcgacactttcaccatcaaccgcacgtcgatccgacacgtggcgtttttcgtcgtccattgtgtgagaatcctcagcaacacggcgcaccctacgccacgcacgtttccctcgctgttctttcatctttaccacctaaaaccgatctttaaaatcaacggcgcgcaaccgcaaggttcgcccgctcccgagtgtcacatctaccaattgttcacaatacgtatccacaacacgaccacacgcctctgcgcatcgttgcgcaagattgcttcgagccatttccagcgtcgcatccgaacacaaagccaccgcaattttcacggcgcccgcaacgcctcccgcgccagcacctaaaacggacgccattcccgccgcaccaaaccaacccttgccgtccttattcgcaacaagtgttttaatgtcgcccatccacgcacgtaaagcttcgtgcgaaatttcctcaacattaacggcgtcccgagcgcgcgaggccaactccgggacattcacatcttgtgttgtccacgcctggtaaatttcttgcacaagaagttcgagcgcctgagtgagggccaggtgaatcgctgcacgaaccgaatcaaaaacaagagttgcggaggtatcacgcctagcaagcccgcccctacggcggaatttcgcggatttcgccggctgtatatccgccagcggcccgccagaactcgccaccgacaaccacgtggttgtgggcgcaccgctcccgtaccctccctgctcggcatgttcctgaagtttcgccaacgtttgctcagaaatatcgtgaacaatttttttcaattgttcgacggcagatgcctgcatatccacagcctggctaataatctcaaggtgtgttgccaaacgaggcatcatgagcgagttcgaccgctgaatcagggcgtgcccaaaatgcgaattcgaaattgaacggagccagccgtagggttcacggataatatcagccggcaacagaccctcggttgggccattatccgaaacaacaagaagcggggcatccttcattccttcctgccccattctctgcacaagatcgcgacgcacagtttccagcgcactatcgcgcacacggttcaaaacaatcgcaacagttaagccccggttatacgcatcgagcacaacactccacgctatagcgtctccgtagcggttcgccgtcgtcacaaataaccacaaatccgcgcaatccagcaacgtacgggacaatgcgcgattctcttcatccacggaatccaaatcgggtgcatccacaagaacgacccccgggatagccgaatcgagaacgtggacgtcgcctaattcaagaactgcgtgcccggccatgtgcgcgacatcgtcgggatgcatggcaataacgggtgttcgagttgttgggcgaagaacggatgcgggggaaatctcctgccccacaaaagaattaaaaagcgtggatttccctgctcccgaagaccccccaaggacgacgatagcggggacttctgggttgcgtaaacgtggaagaacgcggttttttaattgggtaataagctgctgggcttgggcgttaatgttttgtgcgccggggatattgaggggcatgcgggcgttttcgagagcctcaatggttctttcgatgagtgttgagaggtttcgcttgtcttccacgattactattgtcgcttattcattgcgttatgtcatacatcggcgcgttttgcgcaacggtgggaggtgtaatggaggtgggaactttggaaaggcgcgatggatgcactacacaacgaagtttttattcacagtgtacgaaaaatacggtatatttatgtagttgcatttttagcccccgtagctcaacggatagagcgacagacttctaatctgcaggttgtgagttcgattctcgccgggggcgcagattgtaagtttaattccagccaagggcacagattgtaaattagattcccgccaaaggcgcaggctgtgaattcgatccccgccgaaggcgaaaattttgagtcatgagataatctaccgggaaggttattttctgggaaggcgctccaattcgttgtgaaaaatttgcgtcgcttcatcgctgaatagtgcgaaaataattttgtgcggtaaggcaacaccgtttttcggaacccacgaatgtagtgtgttcacagcgatgcgtgcgacgtcgtgcatatcccatccgtacacgccacccgaaattgcgggaaacgcaatggtttgcgctcccaggcgagccgcgcattccgcgctgttgcggaaagcgttggcaagtagtgcggggtcggtttgcccgcggtggcgattcgggccgacggtgtggataacccagcgcgcgggcaggcggaagccggaagtcgccacggcctcgcccacaggcaggccatccggccattgcttgaggcggatttttctgcaggcctcgaggagtaacgggcccgcggctttgtgaatcgcgccgtcaacgcccccgccaccaagaagcgacgaatttgcggcattcacaatcgcgtccacgtggagcgtcgtaatatcggcgcgcatggcttccatgatcatggtggtcctttgcgtcattactttaacgttagcaggagttggtcctcgttcacggaactttcttctacgacaattctgaactcgaaatcaaacagcaattaagggttgaccaaactgcagtagttcagtaccttagatattgaactaattctcaataaggaaacttcgagttaaagtttctgagtgctccagcctttaggctttttcaaacgggagatgctacgcgctctcccgttttgttttcccaaatcggtaagtggcaaaagggacttggcatattggggataagtgtcaaaatgtgggatgtaggccattttgtgtgtaatggttcggcgtggcgtgtgttatgtggtgcgtcctgcccagccttttcggggccagaggccttcttcgattatggcgatgtctttgaggtgttggggtgttagttgtttgcttggttgactacttcgtttttggcgtataggaaaaacaagggcggtagctggttaagggttaaagtttgaataaacctctgtgtaagctagcaattatttatgtctttcacaattttcactaggggcaaaaataaagcacggtcaaggtactctataaataacttatcgcgtatcatatacacatgaatgcattttgcacatatcgcgtcggaatcgacgttggaactaattcagtgggtttcgcggccatcaaagttgatgaacacaacacaccccaaaaggttcttaataatttggtagtgttacacgattctggtgtcgatccaaaaaaggcaacaaatgcaaaaacgcgtttagccacttcaggtgtagcacgtcgcactcgtaggttataccaacaacggcgtaagcgcctccaagatttggataaccacattcaagcattaggatggccaattattgaccatgaagaatctccagacccctatctcccatggaaaactcgcgcttcacttgccacagaacccatggaggaagacaaactaggcgaagcgttatctattgctgttcgccacatggctcgtcacagagggtggcgttccccctatgaacggattgagaatctttttattgaaaaacctgcaagttcacaattcgaagccatgaaaacagaagcgactaaagctaccggcgttctttttgatgacgacgtaacacccgcccaagtcgtcgtcgaaatgggtttatgccccgacatacggttgcgaacttccgcaggtaacaaatactctgcaaattcagtcaaaggcggtgaaaatgtcgcaggaaaagacaaaataggtatttttgcaggcaagctcatgcagtcagataatgctggcgaattattgaaaatcgggaaaattcaaaaccttaatgaatcactcgttaaagatttgattcgatgggtgttccaagcaaaaagccctaaaggagccgctactcaaagagctggttttgacgagcttcccggacaagaaaaattcaaacgactcgctaaagatcacccagaattccaagaatttaaaatcattcaagtcgtcgcaaacattcgcgtaaaagacggaagtggccttcgcgccctctcccccgaagaaaagaataccgtcattgatttcctcatggatgaccacggcgaagatggtataacatggtccgacgtagccgatcttcttggactcaagcgcaggcaacttcatggagtttcctcgcaaagcccagacggagaacgcccttcaacatatcctccttcaaactcaacgaaccgcgctatttatcgatcaaaaatcaaatccttaattgagtggtggaaaaatgcggataccgatgagcagaacgcgatggtaaaacttctttctaactcggatgttctcgatacagatgaacccggatcagagagcgctgaagcgttcctgtcatccctagacgaaaacactctggcaaaaatagatactgatgtgaaacttcccgcagggcgtgcatcctactcgcttgattcaattcgtcgccttaaccagtgcatgtttaaaaattctgtcgatttgcacgaagcaaggaagattgaatttggagtagacgattcctgggtcccaccgactgaacctattggagcgcctgtaggaaatcccgctgttgacagggtcttgaaaatcgttaaccgatggattacagctactgaaaagaaatggggcacccctatatcggtcaatattgaacatgttcgcgacgctctccagtcagaaaaacgtgtacgtgaatacgagaaagagaacaaacagcgatatgaacgtaatcaaaaaatcgttcaagaagcacacgatacatttggaataactattaagccgggaaggtacgacataactcgttatgttgccttgcgacgacaaaactgccaatgcgtctactgtggtactccaattgatttccataacgcccaaatggatcatattatccctcgcaaaggtgtggggtcaacgagtactcgtgacaacctcgtcgccatttgcgaagtatgtaataaaaccaaatctaatcttccctttggagtgtgggcagaaagttctgcacgccccggcgtcagtgtaaaagaggctgtggttcgtgtacgcgcttggaaaagagacgatggtttaaccgcaaagcaagaagccaatttcaaaaaggacgttattgcacggctaacccgaactgtagaagatgcccctattgataatcgctctatcgaatcggttgcatggatggctcgcgaactacgtgaacgcatagctggccattatcgtcaacaaggaaacgaaactaccgttaatgtatataggggatggattacaagcgaagctagaaaagcttcaggttttgaaaataaggttaattttattggtggtcatggcaaaattcgtttggacaggcgccaccacgcaatggacgcagcaacgatagcactcatgtccgataccgttgcacaagtgttaaccgaacgcaatagtattcgagaagcagaatatattaaaaatgttcctacaaaaacatggaaagagtaccgaggtagcacacccacacaaagagtgatttatggtaagtggttaaactctatgaatcagttacttttcctattcaatgaagagctttaccacgattccatccccgttatgcagagtttgcgactgcgtttaggaaacggaaccgcccacgatgcgataattcggaaaatggttggaaaacaggttggatctgcttggagcaaagatgaaattgaccgcgctagtaccccgcaaatgtggatagctctttcacgagatcctgatttctctgaaaaagacggattacctgaaaatcctcatcgcgaactacgcattaaaaatgagtggttcaaggcgaatgaaacaattcccgttttccctaaaaaaatcgccgcaattgctgtacgaaacggctatgcggaagttggggacacaattcaccatgtccgtttatatgcaattccaggaaagaaaaccacgtatggcatggtacgcgttttcggattcgatttggtacaacacaaagacaaagacttgtttaacgttcctcttggcccggaaaccctgtccatgcgcgatgcaaaacctgtcacacgcaatgccattctcgaaggtaaagcagaatacttggggtggcttgttcgtggaacagagttagaacttgatctttcacattcctatttccacaaaaatgcaattggggaattcctaaacgatttcccagacaacaagaggtgggttgttaaaagacatgacagcaattcaaccataacattacggcctcttatcatttcttctgaagggttggataaatttgatttaagtgacggatctcttcaaatcattagcacaaaaggcaaaggatggaaaattgcagtcaatgcactcttagggaattctctcgtgaaaaaaatccatagaaacgctcttggcgaagaaagggaaacaagtaattgcaaccttccggtaacaaccgttcttaaggactaatcatggaaaagtggcgtattatcgattgctcttcaatggaaggttctattaagagtgtacgtggaggcatagaaattcatcgggactcacaggagccagtaaaggttcctgttgcagatgtagctgtagttctcgttgggattaatgtttctttttcttccgccactatgcaccgtcttctttcacaggatgttgcggttcttttctgtgattggaagggtgtccctgaaggtggcgcttactcgtggtctacgcatggacgggtaggcgcacgccatcaggcacaatcacgactttctgaaccacgtaggaaaaatgcgtggggaaggctcgtgcaagctaaggttaaaggtcaagccaatgtgctaaaaaaccacggcttggtagaaagcgttgaactttttgcccttgctcgggatgttcgctctggggatcctggaaatattgaggcacgcgccgctcgtatttattggaaagctttatggggacatgaagattttcgtcgtttaccaggttctggtaaggattcttatgggatgaggaattctcatcttgattatgcctacacggttttgcgggggcatggcataagagctgttttaggagctggcctttctccctcgatgggcatcttccatcgtgggcgtgccaataatttcgctcttgtcgatgatcttattgaacctttcaggccagctattgaccatatggtttctcaactttcccctgatgatgatattagtgattcccttgtaaggaaaaagcttgttcagtctgcttctcagacttttgcctcaaatggtttcacaatcactacagttttcgtcgaattagctcaacaattcggtctctatgtagagggcgatatagataaattaacggtccctttttggcaaggagagttttaagatggcagaggatcctatgtggtgtcttgtaatgttcgatttaccgacagaaactacacaaaataaacgcgactaccgcgcatttcgaaacctgctgattgactccggatttttacttacccagtacagcgtgtacacaaaatattctcctaggggatacttgacacaacaatctatcaatttcatcaaggattcagtgccacctcaaggagaagtttgcatcttacacgtcacagatagacagtgggctaacatgatccgttttttcaacgcaaaggagaaaaagaatccggaacagccggaacaactcactattttctaacgtgaaatagtgagttatccctgaaaattcgcggaaattttttccttctaaagtctatcagaaggaaattgaactaattcccaacaccatatgtacatataacccccatataaaaagtctatcagaaggaaattgaactaattcccaacattgtggtgttgggggtcaaacgatagtaaagtctatcagaaggaaattgaactaattcccaacagcctattgtaggtataacacttatgacaaagtctatcagaaggaaattgaactaattcccaatgattttacacctattcccgtttcgactcgaagtctatcagaaagaatttgaactaattcccaatacaccttttgcaaataaaactgttatttgaagtctatcagaaagaatttgaactaattcccaatacttatcctccggcaccgcattagatgaagaagtctatcagaaagaatttgaactaattcccaacgagggtgggtgttccgtagccttgctgtaaagtctatcagaaggaaattgaactaattcccaacctcgcgcgcgcgcacgcgcgttacgtaaaaagtctatcagaaggaaattgaactaattcccaacttccggcgcgaatgagtgccgtaatgtcaaagtctatcagaaggaaattgaactaattcccaacatacaacaatcgcttcctccaccggcgtgaaagtctatcagaaggaaattgaactaattcccaacctccaccagtagccaccagataggctcaaaagtctatcagaaggaaattgaactaattcccaactttgtgtcggtagatgttttttcggtggtcgatgtctacagcgtagatggttaattctttgtcttgtatgttgcaaatgattcgatagtttcccacgcggtagcgccataagcctttgaggttgccttgtagggcttttccagtgcttctgggattatctataaactcgagttgttttaggtagctcataatggcgtcaaagggttttttgtcgagtttcagcacctgtttttctgctttgctggacaacttgacacgccatttagcctgcatatttcgctcgtacttcatcaagggtatatgtgcgtgattttccggtacgaacgtcttctacttcttgaagaatgtccatttcccacatgagttgttctagtccgcgttcgatgagttcccggacgtaaaagcttttagacctgttggtttttttcgccaaaagatctagctggtttccggtttccgcgtttatgcgtaggtttagcgctactgttccttgagtactcatgtaacaactgtaacatgtgtattacgaattttaaagtctatcagaaggaaattgaactaattcccaacctcatccccacgtgcgtaggaaaaatcagagcacttttgagaaaaattaacccatttaaaacaagcaccttgtaatagcttacggtaaagtttatcaaaggaagtaatagagcaatcccttccatccactaactcacgtttttgcctgcaaaaaactccctttaaaccggttcggggccgaaacgcgcgcttcgctacggcttattttgcacacattacgcaacaaagcgcgcgtttctttacatcacctttacttcaaatctttgaaaacatcgcgctttacgtcgtcaatgggcatgtccacgccgaaccagattttttcgccgagggcgccctgggcaacgagcattgtcaggccggtgatcggcgtcgccccagcagcttccgcgcgccgtagcaactcggtgataacgggaatgtaggtcgtgtcaacaatcatttgtcccggacgcatccattcctgctcgaggttggactggtcggcaagatcgcccatccctacgcgggttgcgtccacaacgatgtcggcttcgcccactgtggccttcagagcctccttatcggctaaatccacgagctagatcgtcgccccggtttcttcggaaatgtgggcgaggtgcttgcgtgttggctcaaagaattgatcgtttgcgttgaaaactttgaggtgtttaacgcctttgattgtggccgccacaaacacggcggaacctgcgcctcccgcgccgaggacaaccatttttgcacccggaaggtccacgcctgtggcctccaaaacttcaagcagccccaggccgtccgtgttgtgcccaatcattttgccgtctttgaactccacggtgttcacggcgcccatgagcgcggcggtgggcgtgagttcgtccaaatatttcagcgcgattgttttgtatggcattgtcacgttcgcacccgcatagccgagcgccatcattccccggagcgcagcctcgaaatcttttccctactacttggggtacggaaggctaaaactcacccgtaaaaaccaacccgtcaccaagttcgctcaccaagatccggcttgcctctaccatgcacacggggcacccacgccaagggtgcaaaaaacgggcgggtaactcggaagagttacccgcccgttcgttaaacatacgccattagtgcttcacacggttgagtgtatgcgggaaagccccaggcactcacggtggccggcaggccttgcgcgctatttaacgcacctcccggccactagccttcactacccgaatcagcaccaaaagccttacatcgattagcaagcccgaccactaaccgccagcaccagactcaacagcaaaagcctcgcgctatttagcgagcagcctggccgtcgacgtaatcggcgtccacatcagtgttccatgcgaacatggaacgaacttcccgcccggtcttttcgatcggatggttctggtgttcttcacggaacttcttgaattcgggtgcgccggcgccctgatcatccatgaagcgcttagcgaatgcgccactctggatatctgcgagaacttccttcatgttctccttcacaacaggtgtgataacgcgcgggccggaaacgtaatcgccatattctgccgtgtcggagcaggaccagcgttgcttggtgaggccaccttcgttgatgaggtcaacgatgagcttcaattcgtggcagacttcgaagtatgccatttcgggctggtatccggcttccacgagggtttcaaaaccgtaggcaataagctgggaaacgccaccgcaaagaacggtctgttcaccgaagaggtcggtttctgtttcttccttgaaggtcgtcttaatggcgcctgcacgggtaccgccgatagcggccgcgtatgcgagggcaatatcccatgcctggccggacgcatcctgttccacgcacacgagcacgggaacgccacggccttcttcgtactggcgacgaacggtgtggcccggccccttgggggcgaccatgcacacgtcgtgtcccgctgccggcttaacataaccgaagtgaatgttgaaaccgtgtgcgaagaaaatagctgcgttcggcttgaggtttggttcaatttcggacttccacagtgttgcctgagtctgatccggaacgagaatcatcacaacgtccgcttccttcacggcatccgcgacggacttaacgacgagaccctgttcctttgccttttcaacagacttggaaccttcgcgaaggccaacaacgacctccacaccggaatcacgcaggttgagcgcgtgggcatgtccctgcgaaccgtaaccaataatggctactttcttgttctggatgagggacaaatcggcatctttatcatggaagatttccgccatgagtttctcctttatttgtttgttggaaactttgtgaactttgtaaacttgttgattttatgaatttgtaaggtgggcaaaaaacgtgcgcacctcattcggcacctcatcggctcttaatcgaaacgcgaggtttttcgtcgtaacacatctgtgttccatttgcggcacgagcccgcacacgatacaagcgtacttatgcgcttaacagtcggtattttcgtcccatcccttcacgacgggttcggcgaactcggctcgtgttgcttccatttccgcagcggcgcgctccgatagtgaacgggctccacgcgcgacggcaacggttcccgactgcacaatttctttgaccccatagggattcaacgccgccagcagtgcctcgattttctgtcggcttccggtcgcctcaatggtgagggcctcgggaaccatgtctaccacgtgtgcgcggaaaagatcggcaacttgaagcacgtttgcgcgtgtttcgtcggttgcgcgaactttaatcaaaatgagtctgcggtgaacggattgagcatcgggaagttcgacgattttaatgacgttgaccagcttgttgagctgttttgtcacctgttcgagggggtgcgcatctccgtcgacgacgagggtaatccgggaaagaagcggattttcggtttgccccacggcgagggagtggatgttgaatgcgcgccgtgcaaacaagccggcaacacgggtaaggacgccgggcttgttttccacgagcacggacagggtgtaacgagttgacatgttattcctctctttaactgtgctcgttatgcttgatcttcgcctgcgacgggacgtattccgcgggcgtattggatttccgaattggatacgccggctggaaccatgggccacacttcggcatctggtgatgttatgaagtcgataaccaccgggcggtcgttaatactcatcgctttttcgatggtggcgtccacgtcctccgccttgtccacacgccatgctacgcagtcgtatgactcggagagtttgacgaagtctggaatatagtgcggggtcacgtcgctatcgaggttggtgaacgagtagcgttcgttgtagaacagggtttgccattggcgaaccatgccgaggctggagttgttaataatggcaactttaatgttgatgccgttgagacggcatgttgccagttcttggtttgtcatctggaaggagccgtcgccgtcaataacccacacggttttttctggcttcccgacttttgctcccatacctgcgggaattccgtaacccattgttccggcaccgcccgagctgaggaactggtggggtttttcgaacttaatgaactgggctgcccacatttggtgttggcccacgccggttacccaaataacgtcgtcgcttcccacgacttcgctgaggcgttcaataacgtactggccggacatgagcccatccgtcgtttcaccgtatccgagcgggaatttctttcgcaaaccgttgaggtacgcccaccattgttcaaggtcagcttcgccgtattgtttttgggcgtttttcacttcctgtacaaggatgggaaccgtaagtgcaagatcgccgacgatgggtacgtctgcctcgcggtttttactgatttctgccgggtcgatatcgatgtggaccacgcgcgcgtggggtgcgaaatcgtcaagttttcctgtcacgcggtcgtcgaatcgggcgccaaggcacacgataagatcggaacgttgcaacgcaccaaccgccggaactgttccgtgcatgcccggcattccgaggttattcggatgcgaatccgccacgactccgcgcgctgggagcgttgtcacaacgggtgcgtgtgtaatgtcggagagatacgtaatcgctttggagacgtgtgcacgtgaggcgccaccaccaacgtagagaaccggacgggatgatgtggcaatcaggcgcgctgcttcgcgaacctggcgtgcgttgggacgtaacaccggcttgtatccgggcaagtccatcacgggtggccacacaaattcgatttcttcaccctgtgctgattttgcgacgtccacaagcacgggccctgggcgtcccgtggttgcgatgtggaaggcttcagcaatacgtgctggaatatctttaccttctgtcacaaggaaggagtgtttgaccatgggcattgttgcccccacaatatcggcttcctggaaggcgtcggtgccaattgctgaggcacctacctgtccggtgatgcacacaagagggacggaatccatgttggcgtcgagtagcggggtgataaggtttgttgcgccgggccccgatgttgcaatcatgacgccgggcagtccggttgcgagcgcgtatccttctgccgcatgcccgccaccttgttcgtggcgaacgaggatatggcgcagttgttctacatcgtagagtggatcgtaggtgtgcaaaattgcgccacctggtagaccgaaggcaactttcacgcccaattcttcgagtgaacgaacaattgcttgtgcgcccgtcattcgttcgcgaatctgggggtgagtttcgttctcaccagcatcgctttcgcgctgtgtcggcatgcgtcctccttacatattcttttcgtcgcgttatgtggattcttgcgttttcgcaatcttttccaaaaatatagcccctccatgttgaggggcgcgcactacgtgattgcctcacggcggtagtgcgctacataatgacgacgagaattttttccatggttcatagagtacctgaactttgggtataagcgaagtaaaaatgatgaaatctcacatcgtggattatggtcttatagcgtgagactatttacggggtttctgttagcttatttcagcgttttatcgacgacgattttcggcgcttttcaatgactttgtggcaaaattgcaatgtttccgtcgtaaaatttttcgaccctgatgggccactcatacacgtcactgagcctctcgcttgtgagcacttgcatgggattcccgcatgttactgttcctccgtttttcatgagggcgatgcggtggcaatattgtgccgcaagttggatgtcgtgcatgatggcgataaccgtgtgcccgcgtagggcgagggtgtgggcgatggacataatgcgttgttgatgtgagatgtcgagcgccgcggtgggttcgtcaaggagaataacgcgcgcattttgtgcaaggactcgcgcgaaggtgacacgcgcctgctcgccaccggaaaggcgcatgacatcgcgatcctccgcatattcgacgccacttgctttcaaagcggcgcttaccgggtcattatcgtaactaggtgcgagcgcattcgtctgatcattatcgtcgtaactagctttacgatcgttgtatcctttaacgtttcctatatttaacgtggctgcgctttcacggccgtgcgtaggcgcgttttctccgttgcttgctgtgctgtttgctgtgctgtttgctgcgttgtttgttgcactgcttgcaatattggttgttgtattacttgttgtattacttgctgtattgcttgctgtgttgcttgctacgttgctttgctcagcgtttatgtcatcccatatgaatggtttttcggcaacgtctgcacccatggcgacgacgtcgcgaacaagatacgcgaagggaaattcgctactttgtggcatgacgcttcgttgatgttcggggtgtttgtagtgcgcgagatttttccctgcgtaggtaattgttccccgctccggctggagatctccagcgataaggcgcaacagtgttgattttccggctccgttggggccgagcacgccaagaatttcacctgggaatacgtcaagatcaacgccacgaactatcggggtgtttccgtaggaaaaacacacattacgcaatgcgagtccgtgtttattttcgccaacctgctcactcacttttcccccaaactgctcgttttcgccaaaccgctcgcccgcttttccgtcagactgtacttttcctctatactgctcactcacttttccctccccaaactgctcgctcattttttctccgtcgttttctgcacttttatagtccttgtcgcccgcgtcgcaggttgcgtcgtagaagtatgaagaaggtcggcccgcctaccaatgcagtgaagatccctatgggcatttcgctgaaggggacgagggtgcgggctgcgaggtcggcgtaggtaatgagcactgccccaccgaggaatgatatgggtatgagccatcggttgacggggccgatgagtaggcggatgacgtgcgggacgatgagtccaacgaatccgataactccagcgaaggctacggctgatgcggtcaggagcgcggtgaggaggattgccactattctcagtgcgtctacgttcaccccgaggtgtgtggcttcccgttctccgagtgcgagaatatcgagtttttttgagatgacgacggaaaaggcggttcctatgacggttgcgagggtaacgagtcctacgctttgccaatttgccccggcgagtgaacccatttgccagaagatgatgtggtcgcgggcgttggtgtctgctatgtatatggcgatggatgtgagggcgcttccgacggctgtgacggcgattcctgtcaggacgagtgtgagtgattcggcgcgaccgtcatttttggcgaggaggtagacgagtaggcaggcaataaggccgaaaataaaggcaaatatggggacaagtgctccgcctaaaatggttgggaaaaagacaatggcgagagcggctcccatggcacttcctgtggaaacgccgatgattcccggctccgctagggggttggagaacatggcttgcataagtgccccggcaactgcgaggctaccgcctaccactattccgagggctatacgcgggaaacgtattgcccataatgccgccatggcgttgtcttggttgggcggttctgttagcccaaaacctgccac

SEQ ID NO: 3854 - DNA, 23285 bp, synthetic construct
  source 1..23285: mol_type = other DNA
  misc_feature 1..23285: note = Synthetic
aacatctgaagtagctttggctggttatcattcgaatgagattgtggatttgagtgctggcccgaagcggtatgctggctggtctacctgttaccggcgtgaagctggctcgtatggtcgtgatactcgtggaattattcgtgttcaccagttcaacaaggttgaaatgttttctttctgtgctgaagaggatgctgtggaagaacatcagcggttcttagcatgggaagaggagatgattaataaggtggaattaccgtatcgggtaattaacactgcggctggggatcttggttcatcagcggctcaaaagtttgattgtgaagcttggttgccgacgcagaatcgttatatggaagtgacgtcgacgtcgaattgtacgaccttccaagcccgccgtcttggtatccgggaacgttttgcgggtgctacccgggcagttgctacgttaaatggtacgttggcaacgactcggtggttggtggctatgttagaaaaccaccagcagcctgatggttctctttatattcctgcggcgttgcgtccatatttgggtggccgggaattagtaagcccgattggttctggtcagtaacgtgactggtgtggattttgcgcggtccgggagtagtgctcccggaccgctaccctattttactgaggcattagcgcaacggcagttaccttcagctggcccacagttaatggttgccctagatattgatggcacaacgattcgtcatgatacgtctctttcgccgcgggttcgggatgcgattcatgctcatcttgatgctgggacacatctcgtgttcgctaccggccggggtattactggcactcagattgcgctggccgatgttggttttaatcgtgggattacggtgatgtgcaatggggcagtgactgcctcagttgggggcgaattaccagattcggtcactaccgcgttgcctgattttttagacgatgacgggccagtgtatcggctagtcgaagcgcatacgtttaatccgcggcgcgagattgaggttctgtctgccggattaccagatgacgtgtggtatgcgttagagacgctagatgaaccgacccgtgtgacgtatccatttcccgcagatgagctatcggggccgagccggcttgtctcgattgacgaattagcctctgatcaagctactcgactaaccgtgcgggcagccaaaatgagtgctcatgaactgttagaggcagttaaccagctaggtttgcgtggtgtggagtatgccgttggctggtctgcctggatggatattactccggaaggggtttcgaaggcatccgcgttggagtcagttcgccggcgttggggtatcgatctggcgcacaccgtgtgtgttggcgattctggtaacgatgtggacatgttggcgtgggctggcttaggaattgcgatgggtaacgcgccggattacgttcgcgattatgctgacgcgttcactgatcacgttgacgacgacgggtgcgctgctgtccttgagtctctcttgccgtgagggacgctgggcagcttgcccggcgatcatggctgatagggccggcaaggcgatatataggccttctttgatcattattgcgcccgaatcgttaatcggtacggcaacaagaatacctactgcaatcccgatagctaccggaatgaaaccatatccagaggttagggtgtgtagtgaagaaagatggatacctgagacgttattcaagtagcgggtggcatagatggcaagcacaccagcgatcaggaataacgcgataaggataagcagatctggccggcctacaaaagagcgggtcacgtcacggatttttccaccgataatcgcccagctttctgcggttccaaactttgcccagaaacgaccgatatgtgattcgccgccacggcgagcatcaacaaaaccgactgctcccatcacagctaccgtgctagcaacccacacaagcagatgccaccatcgtaattttttccgtgtgatcacaaggatcgcaacaccaaaaccggcgataagtccaggtgggccaccaaaatcggcaccccatagcgggatagcgtcgatggcaactgcaataaccccgatagtggcgaatacccaggtggaaacgcgggtatcgtcgtcgattgcacgccgtaactgaagccagttaatgatcaataacgagcctactaagccgcccacaaccaaaatcaagtaggtacggttagagatgccgtagtagcgccgggaagtcaaaatgagtgaccccataaatccattgcgttgatgtggcgaaccggcaataatatcgatgctgagcacactgaacgctacaagggctataaatccggcgcgatgcacactcaggtgtgagatagcaacaagagccacggcaatcaaagatgttatgccgattgcccatgcctgcattgcgccaggcccgccaggcaaatcccaccacggtaagaagttcaggatgaaggcggcaggcacccaagcaaaagcccacaagttaacctgttcaagaacagaccagattttgcgtggcgcgccccagcggtgtccttgcgggccgggttgggcgaggaagcacaggagcactccggcgattccgataagaactaccatgttgaagaattgataccatttggccgacgatgacgccgccgtgtaggcgtggtgtgccacatcaagaactggaaccattgcggcagttaacgatggcttactttcagtgcgtagccccgaatagttgccggtgatgaggtttcgtacgtcggcaatggtgatgaacccggtggcgcgcgtaaggtcggaatggattgtggcggggccgctagcgccgtcgatatctatattggtggcgaagaagtgcaggtgggcacggcgccattggtctccgagggaggcgataataacttttcgtggatggtcactatgcttgtttgcggtgaggatgttgataagtttttgttccacgaaggtgtgctgggtggcaacatcgaggtttcgtggggctccgcggatggagccgatatcaacaacgacgtcggccggaactgtatctaatatccgggtaagttctgtttgggatttttcttggttttcggcaaaaccggcgtcaggtagcgggtaccagtgatccactgtgccgtctttgctggccactggaattactgcgttgcgtccaatagctgtgacgttctcggaaaatagtggtttatcaggccattgagtttgtcccaagcgccccgcaaagttacgaatatgtactggggcgtggtcagcatctatcgatgctggatcttcaataatgctcgccgggtagcattcgtcaccggaggagacaacgaaggattctggcagacggtcagaaacatcacgtgaggtacgtaactgcatccatccttcggaaggacacgtgagagtggacactgatcggggggttaaagccgctaccgagtaatcgtctagcaatctggaaagagctggattgctcaggtcgatatcggctggtttaactcctgccataccgatgaaaagtacggaatcacgggaagaagtcggcgccgtcgttgataaagctgaagctaaaacaccagtactgactatgccaataacgcctagtatcccaactagtatggcaatcaaacgagcacgcacgtccaccccttcaaacggttccttattccatactagagcaaaattcttccgtaccagtttttacttgagagacaattcccttacaataatgagagcgttaagtttcctgcaggtttcttgaggctaaggagagttgtcagagcggccgaatgagctggtcttgaaaaccagtatgcagtaaccctgcatcaagggttcgaatcccttactctccgctggttatcacggtacacactctgaattggtgaaaactttttcagaccggtatggtggacaacctggagacatggctgagtggtcgaaagcgctcccctgctaagggagtagtcgcctaaaagcggctcgagggttcaaatccctctgtctccgccaaaaccccggcagaagtatctgccggggttttattatttgctaggcccacaaccccagtctaccgatccgattagcccggttagtgtgaaccgtcatcccctgccagcagggaaccctacacaaaatctcgccagacgggacagcagtactctatatgatactgctgtgccgaatcccgagattttgcgcgcgtcaaattactggatttagctcacagcttggtagggatgcattctctaccacgctgtgtctatatttagcaatggcgacgatacgcgtgtatcacttaagcgagactatgaaggagctagctatgactgagcagacctcaaacccagtaacccctgttaagcctccctatatcgaccaggttcttccggatgtttataacgcgatggagggtgtcgcggtggcattaggtaaggcctatgatgatgtcgaccttccgcgcactcttgttgagcttgcttatttgcgggcttcgcagctcaatgggtgcgcaacgtgcttgtctgttcatgtaccgcgggcattgcaggccggagtttcgcagtgtcagatcgacatgttgccggcatggcgtcactctcagcgggtattttctgatcaggagatcatggcgatccggttagcggaaacaattactcggcttccggaagatgctgattacagtgcgctaatcggtgaagcactatcggttttcactaaagaacagcttgtcgctttggagtggggaattatctccattaatgcttttaaccgggtgtcagtggtgtcccaacacccaactcggaagtacccaaagaactagtcgttcctttttggtcctgcgagggcgtaccgttttcacttgtgaaatacggtacgcctttttatttgtatctacttatttgtctttattttcaataggacgtatattttcgaggaaatgaccacaagatgttgaataaacattcttttcgataattgactaatatctactatgttcctgtattagcaaaaaattcattatattttagcgatatatatagtaacatttacgcattttccataaatatagggagtctgtatgaaatgcaataaacgcctcgttggcacggctttggggctgtgtcttttaacgtcatcgttgcagactggaataattgatgtttttcggaacacaattgactgctcatgcggctgttgttcaagatgatagtcaacaacaagttgtcccacaagaagtgaaagattatctagcccaaaagatcaattggagaactcaacacttgcccccaagaggaaaattgatgtcgcaacagtgcaagagtacctcgtaaaaggcatttctgagatgcaaggtgccatcgtttttatggtgactgcgatctttccgataaagcaatcgctccccttatttatagctatccctatggttcgctgattaagcatgttgctggcgaatggaaagttgacaaagaagaaacctctttcgaaaaggggttatataagcatactgtgcggtttgcttaccttgtgaagaaagacgatgcgatccgcgccgatcagcgtattgatgaaatcgctcagtatttgactgctaagctcaaggaccaaaaggacgcatctaaatcaggtgacagcgaggattatcgcaaagctcgactcatccatgattacatcattaaaaacgttgaaccagaagcagacgataagacctctagcggacagtattatgttgactctgctgagggcgacggcaagaagtatgaaatccactccctcgaagctggattgttcgcccataaaggcgtctgccaaacgtatgccatcatgtttgatcgtattgcttctcgaatggggctagacactcgttacattcgtggcaagaagacctttggttactatgccgaagacgatactcgagcaaaggaacgcattgagaagcagattgaagccggtaggaagatcgcggctaaaggcggacgctggccagatgctaaccattcatggaaccaagtaaaaattgatgggcagtggtaccacctcgatctgacggttgacgctgttgctgcacgtgtagcctataagtacacgtatggcggattcttgctcacagatgaggagtttggaaagcctgcgtcgtggtggcttggcgttttcaacaataagagctactacacatacgtagacgttatgtggaaccagagcgaggctcaaccagcaaccacgccaatgaacttcggttcattattcaacgcgaaacatttttcacgcccgatattgcctcacctagacggaaaataccatccattaggtagctttaacgatttgactcaaggcaccatttctactcataccacttctgagcaagcacaaccagtgacccagattgtctctgcgtacggggctgacgaaaaggcggagatagctgctggcacatcagcagatgagttactaaagcttctcaaggtacagggaatcactacccagactcaagcagaatatgttcttggcacgattgaagattctccagtgtcactcgaaacacccgatgaatggactgcggtcaaggatacaattgactcacaggtcgatcttcattcagtagctgaaaatggcgccaaacttacaatcccagtagctgttgttaaaccgggaacggaatctcacgcgctagcccgtatccaggcgaagaatggcagcgcacatatcgatcagattcatccacaaggcgagagctatgacgaacgagtggataaagatgcctatgaggcacagcgtaaagttgccgaggcaacaatcctttctgatattacatcttcttatacagacggtgacaccaacacatcaaccattcacgtctctgttcaaggactagataccatcaagctcgatactcctggcgaatacccggtagtcgtggttgctcagggtaaagatggcttgtggacgaagcttgattaccaggtcgtcgtcgacgaaaaacaacgcccaagtagcgtaacgattaccaccaaggataatgcggacgtgttgaacgttgcctcggataccaaatattatgttgatccgtcatcgttccatagcttcttaggtaaacgcgaaggcgttaacttaattgccaagcgcaccaattcattcgggctaacgtcccaggtcgacgaaactatctctttcgttgattccgccggcaaagagtggccacacaacgaaagcgaagatatatttatcgacgctgatggcaaccggttgtttaacgacataaagatggttgacctggttcgtaaagcaggttcataccggattaaagtaaccgctcagtacgctcaagaagccccgaaggttcgttacatcaccgtcaatattacgaatggcgacgatcaggcatctgaggcagcacagcatgaggctattatgaccgttgaccggcttgagaatctttcgatgacgtcgaagatcaagtatgagaatgaaattcgggagctttcttcggcaagcgctattgctgatgttgttaagcgagctacgaatgatctctcagaaaagacgtctgtttcatacattgtggaacacgttgacaaggaaactggtcaagctctcacttacccagtgaagaaaatcgacttcgttggggctacggtaaaagagcaggccgacagctatcttttgagcaagggacacctggttgatctgacagaacaagagctgcggttaactggcggaggtcaaaagattactttcacgtattcgcgtcaggctgatccggcaaaccagaccgatactgtagcagaataagccaactataatcacaaatatcacggtggggagcaggccgattttacagtactataggaatgtatttcctcgcaaatgagaaacgacaacctattatgataactttcgctattttagccattatcggtaccgcaattattcttctttcagtgattttgatggcgtctttgacctcattattcctgatgatttcttaggttttccgcttctgctatctgctggtttagcattcacgctgattgggtgttctggcgccatcgctatgggtagtggagcacgtggcggtacggtttatgccgttatttgcgttgtgacgattattggactattaatttttgccaggttttaccggctgttagcttctgcggcgaaaaagtccgagattgaagaatcagttgttggaaaagaatttattgttgtttcgacgatggacaacattgttcgtggcacagtacgttttcgtggatccgacgttgaattcttagctcatgcaccgcacgatgaaactagtatcgcacctggcgataagttcactgttttatctgatgttcgcccctacattacaattacccgcattgacgaatgcctaaagaagacactgtcactgtttgaaaagaaagactatggacattatggaagctattttacttctaccccgtttttgttgcgctagcaattatcgccgtgctagctgcactccaccttcttgtttctcgcctacgaatcgctggccctgatgaggctcttgttatttccggtgctggggaatctggggcgatgaaaattgttcctccgggtggcaaagtttttgttgtgccgattttgcagagcacttctaagatttcgttggaagcctacaagattccgttgtgattgactgccttgaccggtccacaattccactcgatattgaagcagtggcaatggtcaagattggtcgtcgaactcatcgattcgggctgcatcagaacgtttcaatggccgtcaagaaacactgccagactccgtcgtcgaagttctttccggaactctacgttcggtcgctggccgattgtctgtatcggaacttatttctgatcgtgaaacgttctccagccaggtcgcgcaaggcgccgaagaagatctcgcacgtatgggcatccctgttgatacgctacaaatcaaagatatctcggataaaaacgactacatcatggcgttaagtgccccagaagcacaacgagtctcacgtattgcgcgcgtagcaacggcagaaaatgagacgcaggcaaacgaagctgaagctgaatcaaagcgtaagatcgctgaacagaacaaggatctggaagtctaccaggccgaaatgaagcgcatgacgatggaagcccgggcgattgcggatgcggctgagccgatcgaacgcgcgaagcaagaaaagctgattacgttgcgcgagcaggaagtcgccgagcaaaaggctgttttgaaggaacgcgaactggaagccagcgttcgcaaaccggctgatgcggaacgttaccgcgttgaggttcaaactgaggctcgcaaggttgaggccgtgttgaaggcagaagccgatgcggaagcaatcaagaagaccggtaatgctcaagcagaagcaagcaaggctcttggtttggcgcaggcagaagcagacaaggctcaaggtttggcacgtgctgaggccgacaaggctcaaggtttggcagaagcaactgcgatggacgccaaggcgtacgaatgcatcgataagatgaccgtcatttcaaccgatggcacaaccgccctcacccgtggagtgaccaacaacgtcagccagctcaacgaagttatcaacgatctgttaggcatcaacttgggaacgctcaccagcggaatcttgcaatccaccaagctattccaaacagaagatcatcaggccgagacagagggccatgatgctgagctatccgccccgaaaaccgggctggatgaggagtaactttctgtttctgctagaccatctggagaaaaggattgacagttgacatacgccaaaatatgatgggtgtgtaactgatttctcagtaagctctaccatgtttgtagagttgaatgctccaccggtttccggttttatattcgggctgtgtttttcaacacggcccgaatatttttgccataatagtgtcatgtctgatgttattaattttcgtgtaggtattgatgttggcactaattcagtgggtttagccgctatagaaattgggccagataatttgccgtcgaaaatccttaattctgtagtttttacgcatgatggtggcgtggatccacaaaatcgcaaaacagcagcgactcggttagctgtctcgggagtggcccgtcgaacacgtagactcattcgacggagaaaacaacgtctccgtgctcttgatgttttcctacaatcccatggatatccttgcccaaaccttgaagagttcgacgatcctcactttccgtggcatgctcgcgctcaactggtttctgagcctgttgcacaagaagaactacctgaacttttttccgttgcgatacggcatatagcccgccatcggggatggcgtaatccttattcacgagtagaatcactgcatctgccaacaccgccttcagaggaattgaataacctcaaaaatagactgattgaagaaaccggagtcgtactagatgaagatgcgacacctgcagaaataatcactgaagttatctcagatatgcgaaagatacgtggtcctgaaggaatcctcggtggaaaacttcgccagtcagataacgcaaatgagattcgtaaaattggcgaagttcaaggattggattcctcttttattaatgacgttattgatcatgtgttcgctgccgaatctcctaaaggaagttccgcaaaacgtgccgggaaggatgaacttccaggccagcacgacaagttccgtgccgaaaaggcgcatcctgcattccaggagttccgaattgtttcagtagtagcaaatctacgtatcaaagatcttgagacaggaagtatccgtaagcttacccgcgatgagatggatacagttgttacatatttaatgaatgcttctgctgaagattctgttacatgggatgacgttgctaccaaattagagatttctagagattgtttatctggaacagcttcacctggcccagatggtgatcgcccttatttgatcccaccaactaacacaacaaatcaacgcatacttgagtctaagctaaaaccgcttattgctttttggaagaatgcagatctagatactcggtctacactgattaacgagatgtcgaattcatcagagattaccgatgattccccaggagcagaagaagttcatgacttcttgacttctttagcagacacagaattagaaaaactatcaacaattagtcttcccgccggaagagcggcttattcggtagattcacttcaacgcttgtctcggcggatgcttaacgatggcgttgatcttttcaccgcacgcaaattagagtttgatgtgcctgatgattggcgcccatcagctgcccctataggcgatccagttggcaatcctggagttgatagagttcttaaaattgttaaccgctggttaatgaatgttaccgacaaatggggagttccagccacagtaaatatcgagcatattcgcggtggatttggttccgaagctatggctcgtgaatatgaacgtgaagttggacagcgcttcaagcgcaatcaaatgattatcgccaaaatacaaaaagataatgacattagtggacctgtccgttccgcagatattacccgctacttggccgttaagcgccaaaatggggcatgcgcgtattgtggtacaactatttctctgggaacttgcgaaatggatcatattgttccacgaaagggacaaggctctacaaatagtcgatccaatttattggctacctgccgttcttgtaaccatagcaagggaaataggttgtttaacttatgggctaaagaacagaacaaccctaatatctcatttgaaaaagcaaaggatagaatcacgttctggattaaggatgacggcttatcaccaaaacaatggaaccagtttaagcgtgatatcattatgcgacttggtcgagttaccgaagatgacgaacttgattcacgctctatcgaatcagttgcttggatggcgagagagcttcgccatcgtattgagtctcattatttgtctacaggttccgatacaaaagttaacgtttttaagggaatgataacgtcagaagctcgcaaggcttctggctttgaaatgcaagtagagatgataggcgatcgtggaaaaacacgattggatcgacgtcatcatgctatggatgcttgcactatcgcactaatgtctccttatgttgcacaggtgttggctgagcgcattaatttacgagagtaccagcaacttactcgtgaacgattcacctggaaagagtaccgaggaaaggatgaaactcatcgtatttcctatggtaagtggcttaactctatgaatcgtctgttagttctgttcaacgaggcactgcgctctgattcgattccaattatggaagatcttcgtttacgtcttggaaatggtactgctcatgatgccactatccataagtttggcaagaaacgccttggtgacgcatggtcattcgaagatatcgacaaggcttcaaccccacaaatgtggctagcattaactcgttgttctgattttgaccaaaaggatggtcttccagaaaatcctgagcgaactatacgagtcaaagatgtctactatactgctgatgatgaactggagttgttccgaactaaggcagcactactttcggtacgcggaggttatgcagaaattggtaatactattcaccatgctcgcatttaccgtatcaacggaaagaagatctcctatgcgatggtacgagttttcgcagtagatcttcataaacaccgccatgaggatttatttaatgttgtccttcctccggaatctatttcaataagaactgctgcgccaaaaattaagcaggcattggctgatggaactgctgagtatcttggttgggttgttgctggggatgaaattgaaatcattccgtcagatcctaaggccttcgccaaaggcgctataggtgaattatttgaggatttccctgggttgacacgttttaagctagttggattcgactctccttcaaaactacgtttgcgaccagtcaagctttctagcgaaggcctcaatgacaactttacttcaggtagccacgacattattgctaaagctgggtggcgtccagaaatcaatgtcgtatttagcaaagctcaagtacgcgtcatccgaagaactactttaggaaacattcggaataccagtagttcacatcttccatcatcatggcaggtctaactactgaaagatggaggtccttggactttagtcagttcaggggctctatctcagctgttcgtggagcgttgtcggttaaaaatgatgaattagatctgactgtcccaacagctgatgttagtgtcgttcttattggcgttggcacaaaactatctgccggagctatgcaccgtctcttagaagatgatgttgcagttattttttgtgattggaagggcgttccctatggtggttcttttggatggagcgatcatagccgagtaggtgctcgccatcgtgcccaagcttctctctcggagccaaaaagaaaatcgacctgggctcgtatcgtaaaggcaaaaattttaggtcaagcggccgtgcttgactactgttcacgtcccgggggctccttactgcgtaacctatcaaaaaatgtacgatctggtgatacttctaatgttgaaggtcaagcggcaagatcttattggcaatatttgtggggtgatgaaggatttaaacggcagccgggaatacgggatcaagttcttccaagtaactcaatgcttgactacggttatacaattcttagaggtcacgcgatacgggcggtttttagcgcaggtttatcgccaactattgggttgtttcatcatgggcgttccaattattttgcacttgcagatgacattattgagccatttcgccctgcgatagatgcgtgtatcgcatcagagttttccggtgaatcaattgaaagtcctgacattcgcagagctatcgttgaggttgcacattccactttcggacagactgggaattccattccaactgaaatgacagctcttgctcaacgtttaggacaattaatcgaaggggatccacagaagctattggttaatgtgtggtcgcctattatgaccttaggcatcacagatgagtagtgatcccatgtggtgtcttgtaatgtttgacttaccaacgaaaacagcttcacaaaaacgtgagtattcgtcatttcgaaattatttgttagatattggtttttctcgtgtgcaatatagtgtttacgtacactactcccccacagggcttattggtactcgtctagtcaagggaatcaaagctaatcttccgcctggtggcgaggttaggattgttcacatcagcgatagacaatggtccaaagcatttcgttttgctaatgcaattgaagaaaaaccagaagaagctccccagcaattaatgattttttagtgtttggggcaccattttttgttgaaatagtgccccaaacactaactccttaagtctatcaaggagttatgtaactgactcccagccctcgattttagctgctctggcatcgtctaagtctatcaaggagttatgtaactgactcccagccctgaacagctccatgcgaatactcgattaagtctatcaaggagttatgtaactgactcccagcacgccaccctggcttactgaacgtgccgtaagtctatcaaggagttatgtaactgactcccagcgctgcggcgcgaaccagaagcagaagcttaagtctatcaaggagttatgtaactgactcccagcctggccttgcacttgttgcatttcgatctaagtctatcaaggagttatgtaactgactcccagccgcggtatctgggaaatcccggacgttgtaagtctatcaaggagttatgtaactgactcccagcctaacgataacaggatcggcaaagcccataagtctatcaaggagttatgtaactgactcccagccactctttcaggcatcgcacaaaagttctaagtctatcaaggagttatgtaactgactcccagctagaagaagctatcgaacagattggcgctaagtctatcaaggagttatgtaactgactcccagcggcgaaaatagttaggtttacagcgtcttaagtctatcaaggagttatgtaactgactcccagcctattctaggggttccacgcgtgatacttaagtctatcaaggagttatgtaactgactcccagcaaccgcaacaaatcaacgaaaaggcgcgtaagccccttaaggaattacgcagccagatcccaacactagcgaagatacattcttggaacgccccaaccaaatcgctcctattttcaagcacaatcatcttcttttcaagcgcaattatcttcgcgcttggtgtaaattttatttggaactcatatacgttccgagcaattgtagctcggctgacggtatgagttttctgttttctaaattaactccaagtgaacgcccttaaccccaagcaaacaccgcctttggtcttagtttactttctcaatgttcccgattctaatacgatcatcacgcctacccaccctgccgacatagtggataccggtttctcaatgcggcactcttcctttgtgcattattaaatgcgttatggatttatattctctttcaaaggcttcactacaaggagacaaatcgcttcccgctacattgcgggagcagctgagtcgcatcttgttgatgtagaatcgttgcaaaattactcaaggtttgaacaatcaattggtttatttaatgcttgaccagtcagccagataaaggggctaagagccatgtcaaataggtcatttttatgcgatgcagagcaacagcctttgccagacggtgaaaacggcaagtgtggcaggtgtcgtttattgatgacgatggcatgctgttgtttgacaatggcggtgtcactttcgataagaaaacagcgttctcattgttccgttcttttccccatgattttacgcaagaacagatagaaattattaaaaggcagttgccgcactggtatgacttcttttctgatcgcttataaaacgccttaacatcccccacagcaagccgagatatcgatcaatacacgaagaccataccgatacccgagctacgattgctcggctcagtatgggcttcatttctaacagtagcagggaaactcaccgtcgtcgaaaaatcgttcttgattgacgacgacggcctgccactttcgttctacttcctctccgccccgtcgtagacccgatcagctatcgcacacatctgttcatatttgcgttcaatatctgcaaccaaagcgatctggttacgggcacggactagattgtgttccggatagtcagtagcaaagtaaatatcgccgtcgaggtaatcggttaagaaccgcataccacattccgccgtcatcaacttcgccgaaaaagcaaacaagtcgagttcagcgggagtgagagtttcccgcaaagccgggatgaaaccttcgcagtatgcggtgtaaagatcgaggctgaaacctactttcgaacgatctttttcgtcttcatcggcaagggcagcgccggtacgtagcgcatcgccgaaatcgtagagtaaggaaccgggcatgacggtgtcaagatcgatcactgctcgggcttcgccggtatctgcatcaagcaagatgttgttgatcttggtgtcattatgggtgacgcgagagggaatctccccgctagccatcaggtctgtcacacgcgaatactcagcggcccgctccataaagaacgcgatctcgtctggcacatcagccactcgcccagccgtatctttttcgatcgacgtcaacaagttctggtatcgagtcggagtgtggtggaagaacggaatcgtttcagtcaacatagtagcatcgaaatccgccaaatcgcgctggaattgaccaaacgtagcagcaactgaacgaaccatatctggcgaggttgccaaactgtaggagcgcgaattatcgatataccgatacattcggaagaactcatcgccatgctttaagtaaagcgcgccatcgagcgtcggaataatctccaacgtctctttgccttttttcaccaaatgttccgtaacaagtttgatgttattcatcaaactatcgacgtcggtaaacactgtcgtattaatctgctgaacaatatagtcagcactatcggttgttactcgataggtgcggttaatatgaccatcaccccagcgatcacacgatgtaatatccccagaaatacggaactgacgtgcaatatctataacgtcattcatgccaattccttccatacgattgccgaaggcgccaaatcaaagttctcactctgaccccttggcaagctgaccacggtttgttgtggcttctcggaattattcattacagcatagatgttcttatccgcaaaataggcgacttcacattcggggtttgatgagccccaaacagcatactggtcttccttatgtgccgcatagaacaaggcgcgctctagcaaccgtgcattcagcgccgaatatggcagaccagaaagatagacgcctcgcccgtcgtcgtacgtattaactgcgagctgaacctgcccgtcaagcccagaaatcacggttgtttcctccgaaattgggaaggtgtttattaccgcttcaccaaaatcgaggctttcgcgcggaatatcttggataacaaaatgatcttccgtcaggtcaggccagtatttgtcgacgttgaggctacggtagatttcttgatcgacgccgaggatatccgcaagttggaaataacgtccaccatgttcgacggcgctcggctggccaactcccacaaatcccttgccggagcttacccacgaacggataagcgaaaccagttgcggattcttccaggcttgcgcacccgagtatgcggttccttgcggaccggcgttaataataacgtcaatctccgggtcaataccgttggcgaggacgtcgtcgaaactcaagaaacgtacgttgactcgcataccagaaagagcttcaagaataccgtagaacgaacggttgtacttgttcggcaatgcgtgggcgactgtaaactcttgccaggatcggcgagcaccccacgcatccaacagcgccacggtcaattgtgtttgcgcacccttgccactacacttgtcataaatatcgcggaattcgttcgcaattgttgctacgtcgtcgacgaacttcgggaacttcgctgccaaagacaggtagccaccgtaccccatgcgctcaagtggcgaacgtaaaatagcacgccgggctttgcgccaattatcccacgcttcgatagacggatcagcaccctcatagaacgaatccgggaagaagtacggcaagaaacgaccctcgtgatacttaacgcccttaatgtcagcgatcatgcgggtggtggtgccgtcacctaccgaacctacgatcgcatccatacccacattcgggaatgttgaactgtatggttctgtgccgatccactggtcgccgaggaacatcatggcttctttgccagcggcttgaactcgctcaaccatttgtttcattaatgagtggacgaaattggcggtgaaatcaagccagtcgcgttgttctttgctggggtagacgaaggaggaaccgtaggagccgccgtcgacgaagtgttctggacgcatccgataaccatactcacgttcgaactcatcgagcgcacgcggcgaaaccgtcaccgcaaaaccagtccagtccacgatcttttctttgcgttcgttgttgaaaatcagcatgaactggtagaagaacgtagtgaagcgaacgacgtcgacatgcgggttatccaccaaccacttatccaaggtgttcagcataaaatcttggatttccgggtgacgtggatcgaacgcgatttcgtgttccttatcgccccaatcgttggtgatgtggttgtacatctgcaccggatcccaaatgacgtacgccaagaatgtcacggtgtattcgtgcatcggatgagcgttgtgaatatgaacgacgtcggtgtgcggatcgagctcccactggtcgatgggcaggacttcaccggaagtacggtcaataacttcccagaaacgttgcggcgcagcgtcccggttaatggtgagctgctcggcaaaataggtgaccatcaacggcacatcaaccgtggtgtccgtggcgcgggtacgttccgacatcaggtagaccatgggcacgcagtccatatgatctttcataaaatagttgtgaccgcggttagggaaatatgccgaatatatacgtttgcccatgttgatgacgtcgtcatcgaggtgggtgccgtctgaattacggatagcatccgcaccccatttttcggctaactcagtggactgctgaataaagttttcttcggtaggtatagtaaagcgaccaacgctcatatttactccctcataacaggtactcacggcaaggtataagcatccctcagctgtgccagtggaacgatcagcgactggcttggagagtccacgatgacactccacaactgcaaaaatcgtagcacaaaataaacctatgcttcgtcgtcgaaatcagcctcttcgctatcaactttcacatgtaacggatcgtcaaggttgtccggaggaggaagaacacactgccgaatcccatccacatgttcacttagacttggagcgattttggcccacatcggatcaagaataaagtctattcccgaccgtcgagcatgcttagcagcaggcacaaaatcagaatctcccgaaatcataataatttgattggcaaactgtcgttcagcaagagaggcaatatcaagtccaattctcatatcaacatccttttgcacaatatcaagctcgaaatctctctcagataagtcttcgatagctattctgcctgcaagtaacttttttaggattacaggtcttagtcgataaccactctgtgtttccagctcttcccctagacgaagagctacttttcgtttcttcgtaagttcttcgaaaaagtttgtactccatcggtacttgtcagttttgcgaagatcaacttgtttctttaaaagcggatgataaaaaactttatccgacggcgggcagtcatagtaaaaaattcggtaaagactgctacgagatttggatatgtgccggtggcaatatttcaaaagttcatctgcacgatctttttccgtcttatcgccaaaaagcgaataagcccttcttcgataaaagccaccatcgaccaatattgcagtcacgattggccgggtagcatgagttaacgttcgccgttgtaaccccattgttactatcccatttcatcaaagatatgctcctgtcatcggcactatccttataggtggatggtcaacggcaggagctccttatgcaaataagctactttatttccgccccaaaagcaagtattaagtccatctggtcaactattgattactcatccatcgatccactgcgtcatagaacttttccggctgatcgcggcgcacacaatggctcgccccagcgatacgttccacagtaattgccggattagtgatactcgcaagccgttcgacgtcgaacaaaatattgtccctatccccggctacaagcaacgtcggtacggatagtttgtcaaacaaactctcgtccgttgtcccaaccacaccactttcaaccaggcgcatatccacttgggttttcccctgcacccatccagcacactcacacgccgaccacgccggatgcgcgacgcgaatatccgtcaacgcctgccctggatcagcacacaacccacgcaccccagcagctaactccggcgcagcttcccgataatggtctgcctggcaggcggtcaaaatcgccggatcttctaacaccaccccagccaccaaatccgggtaattcactgccacccacgcggcaatcgcgccacccatcgaatggccgatcatcaccactcgtccgctttcagcttgcgccgcgtatcgtttgacgacggcactggcagcttcacatgaggcagtgaacggatcgcgcagatcgtcgtcggaaaaccgctcagaaaaaccgtgccctagagaatcaactaataccacctgccatgtgtccccaaaataaatggtcagatcagcaagggatgctccgctatcagtaacgccgtgaaaagcaacaataatgccggttacgttctgtccagtttccgtcacagataaacgcacgatcaatccttaaataccagcacgacttacgccgcacatattactcgcccccgattacccgtgccaggcatacgtgagcagttcgcgcaaaaccgcacgatcgacgtcggcaagcgaagcaaatgaaatacacgctcggccacaatgaacattgcctagacgggtcgaaaattcttcataatagctcgcatagtgtcgcaaatatagaaagagacgatcgggacgtgccgcgaagccgatttctagaccgtcgcacaggcagtcgggttttgcaccgggattcgtttccccatagccgacgatagccggcccccacatgatgggttcgtggccggtaacgtcgcaaaaaatatgggcgagttcggcggcatcaggggcgattgtttcggggagtcgggcaagaaattcggggacggtaaccggcttgccaaatgagcaagctggtccgattcgcatccactcccccttgccatacgtcattgaatgatcgccagataccttccatcgtttcataggtagccctaatttgctcgttctcaacaatagtcacgttatagcattttgcaactaatcagatgtatgacctttaataactttcctaaaatcagtaccaaagtcctatgatgtgggttacagttttcctatgacgacctgctagcactccttaagacaaaaactggaggaccccatgcgcaccccaatcacccacaaaagcaccgccatttccgcaggctcacaagcccaacccgaaattggaaatacgctcatccgccacttccttcccgtggtcggcggactcctcctaggagcactcatctacttcatcttcccagacgccatctccgaccagctacgcgaaacattcgccgccaaagacatgactgttacccggcacgatctcgccatcaccgccgcgatcgccgtcgtcatgggcctgtggtggatgaccgaagcaatacccctgcccgcaaccgcactcctcccacttattgcgttcccggcgttcgacgtcgtccccatcaaagccgcggccgcgccctacgcttcagacaccatcttcctcttcatgggtggattcttcctcgcactcaccatgcaacgttggaacctgcaacgccgcatcgcccttatcacggtactactcgttggcacccgcccaaagcgcctcatcctcggcttcatgatcgccaccggcttcctctccatgtgggtatcaaacaccgccaccgccgtgatgatgctgccgatcggcctgtcaatcttgaacacagttgggaacgtttccgacgacggcgccaaccccaccttgcgctacccgaaattcgcgaccgctctcatgctcggaatcgcctactcagcttcaattgcttctctatccaccctgatcggaaccccgccgaacgttctcctacgcgcctacctccaagaaacccacggaattaccttgagttttggacagtggatgctcttcgctgcgccaatggcatggacgttcctacttgtcgcatgggcagtgctggttcgcatctacaagccagaaattgacgagattcctggcggaaaagcaattattcagcgcgaacttgctgcgatgggcaagatgacagtgcaagaaataatggtaggtgtgatttttgttggcgccggattggcgtggattttcctgccggtcatctggcctgaaactccgattaacgattccggcatcgccatgatcgtttccctactgctcttcgtgacgccagctaagccgaaacaaggcatcgcattactggattgggatactgcgaaagatattccatgggacatcctaattctgttcggtggcgggttatcgctttccgccgcgttcggctcatccggcctgtcactgtggatcggcgatcacgcccaaatcctcgccggcctgccgttggtag

SEQ ID NO: 3855 - DNA, 23276 bp, synthetic construct
  source 1..23276: mol_type = other DNA
  misc_feature 1..23276: note = Synthetic
atgcccaaacgaatccgtgggtgaagggttatgagctgtcaccgaaatctatcgtccgtgcaatgatcgaagaggcaatgactttttctgagttcatttcacgctacgatcttgcccgttctgaggggattttgttgcgctatttaaccgatacgtatcgcgcgttgaagcaaataattccactggatgcacgaaccgaggaagtcgataacataatttcttggctcggcagactggttcgatccgttgattcctcgcttctagacgagtgggaggcactcgcagatggacgagtgacgctcgacgagctcgacgcacttggagacgacgatgccagcacgggtgaggaggcggcattcggtgccgacgagaacggcaacgtagttttcagtcgaaataaacacgcacttcgaaccattattagaaatgctctgtttgatagaatcatcgcctttgatcgtgaggactatgatctcctgggcgagtgggatgcctcttccggatggaatagtgaccgctgggcagatgccggagatgactactacgacgagtacgaatacgttggaacagacacgaatgcccgttccgctaagtatttccagatcctcaccgatccttctcttgccgatcttatccaagcaggtttggatgacgacgccgcaaccaccttgctcgagacgcatcagcccgaacgcctctggctcgcgattcagattatcgacgacggtgaagacgaccttgcctgggcactatgggcaacaattgacctcgataaatctgacgaaactgattcactagcattgagtatcatcaatgtgggagctcgatagattctgtagaggatagcaagtaaagaaaaagaggatgtccaatgactacgatcgacatcgaaggaaatatcgcggctttgcgtgagcggatggcagaagctgccgtgaataacgaccgtgatcctcatagcgtaaagctcatgctggcggccaagtatcagccactggaaaatcttatccgtgccatcgaatgtggcgaaactttgtttggccacaatctcattaaccagcttgaggattcggaatcggcattgcgttttgcggctaccaaaatgccttctgatctaagccaccgcaccacagttatcggtcacgtacagtccaataaactgagcactgctatggagtatgcgcagcgaattgacacggttgattcactcaaaaatgccaaacgaattaaccgtaggcaggaagccaaggtcgaatcaggagaaacgagcctaccttatccaattctgctccaagttaattcatcaggtgcacagactcagttcggatgcgatccaaaagaccttttggagcttgcggctcatgtagcaagcttgccattcgtctccgtcgaagggttaatgacaatcggtgcgaactcctctgatcccatggttgttgatcgcagcttcgagattactcagagcctgcttaccgagatgaagaaaatcgctgggctcgaaaatgcgtctgagctgtctatgggcatgacgaacgacgtcgagaacgcaattaaatacggttcaaccgttgtgcgcgtaggaacagcaattttcggtcctaggcagaccaccgctaattaacagtgtatgagttacctctataagagaagaggcaaccattagtgacataaaactaaaagggcccggactccgttgtccgggctaacatgttactttcagcctaaccgcctttgacttatatcacaaattagcaatgccctttgagaaatggtgcgccgaaattgtaacgatatttcagttgttagtacgccatgtaagataacaagaagttgatttagtgcaagagcaataagaaaagataaaagtgatagctcttcgattgttttcgaagagctatcacttaaacatcttgaaatcagtgaacggacaatcctcgtgaacggaagatttcgcgcacagcttctgtttcttcgttagaaggcggcgtcacatcgtctaattcatattccattccaagggtctcccacttatcgcgccccatttggtgaaatggcaaaacctcaacacgctcaaccgttgaccacttgctaacaatgtcagcaacagcattaacgttttctggtgaatcagtcaaagttggtactaaaacgaaacgaatccagatcttctttcctgcagcagctaggcgatcaccaaatcgaagtgttggctctagctcacgacccgtcgtcttcttataaatttcgggaattccgctcttgacatcgagtaacactaaatcaatgttgtccatcatgtcatcggtaagcgctgagccgaggaatccagaggtatcaattgccgtatgaatacccatttctttacaaccacgcaataatttcgccaagaacgctggttgaaacaatggctcaccacctgagaaggtgactccaccgtcggtggccttgaacacagagcgatagcgcttgattcgattcagcaagtcttcagtacggaccgctgtaccgtcacgcatcttcatcgtatctggattatggcagtagaggcagcgaagtgggcaaccggcgaagaacgtcgtcatacgagttcctggcccatccactgcggtaacgagctcccaagaatgaaccgatccaacttctccggcacgaactgccatcatctgttcggaatgactcatctgcccggcgaaagtaacacctgaaagcccagctcctccaagtcgaggaacttcgatatcaagaggctcgggacggtactcccctgttgaaccctcagttgcccgagtctttaacatagtcataccgccccgatccttgaaatgaatgattataggtcactacacagctacaagagttgcgtaggtaaatctcacataccttggtggaaggtacgagagatgacgtcgagttgctgctcgcgggtcaaacgaacgaagttcactgcgtaacccgagacgcgcacagtaagctgtgggtatttctctggatgttccatagcatcctcaagggtgtcgcggttaagaacgttaatgtttgcgtgataaagaccttggataccgcccttaacttcgcggctagccttcatcgaagcttcgcgctctgcgtatgattttgttgccattggattctcctcaacaatctttattttttacgtttttcctataaccgagtctagctggttggcagcatctaaatgccaccaaccaacgtgttctctgactcagtcttgcttaatgaagcctgcatccatgatgccgacaaggttttcgatttgctcctgctgggtacgaccgagcgaggaaggaacaattgtgttcgtcaatgagatgccatcgagagcatcgtcgtagtcgagtttgccgaccgaaagcatcgaagcaagcattccgtgggtatctgcaccattttctgggtttgcacctggagcgaatggagtacctgcacgatgacccgatgggaagttacccgttgccttgccgtagacgacgttcgaagtaatcgtcaaaacggactgggttggaattgcatcgcgatacatcggaatggacttgatcttgctcattacggtgtgaacgatggttgcagcgatatcatctgcacgatcgtcgtcatttccgtaacgcgggaagtcgccttcggtcttgtagtcaacgattagaccggactcgtcacgaatcggagttacctttgcatacttaattgcggaaagcgaatcggcaacgatggataggccagcgattccacaacccatcgtgcgaacgatgtcagaatcatgaagagccatttccattgcttcgtaggcgtacttgtcatggctgtagtggatgatgttgagtgcctcaacgtaggttccaactacccaatcaagcatgtcttcatacttctcccaaacctggtcgaagtcgagtggagcatcgccctcaactgggtcatatccggtaacgatttgcttaccggacatttcatcgcgtccaccgttcatagcgtagagaagagccttagcggcattcacacgagcaccgaagaactgcatctgctttcccacacgcattggggaaacacagcaagcgatcgcggcgtcgtcaccccagtgacaacgaatttgctcgtccgcttcgtactgaatcgacgaggtttcgatcgaaacgcgtgcacagaagttcttgtatccaactgggagctgagcggaccagaaaatcgtgatgtttggctctggtgctgggccgaggttcatcagagtctggagcaagcggaaagaagtcttggtaacgagggtacgaccgtcttctgagaagccaccgtccgaccaagtcgcccagtaaggatcaccggagaagatctggtcgtaagcttcggtacgaaggaaacgaacaattcggagcttaataacaagtgcatcgataatttcctgagcttcagactctgtaaggattccacgcttgaagtcacgctcgaagtaaacatcaaagaagccggagagacgaccaaagctcatcgctgctccgtcttgggacttcacagaagcgagataaccgaaataggtccactgtactgcttctttagcagtggttgctggttcagaaatatcaaaaccgtatgattcagccatacgcttgagtttcttgagtgccttgatctgctctgagtgctcttcgcgataacgagcccagtgctctgagaaaggctgatcagcaacggcgtcgcgagcagcagctttctcgttgattagatagtcaacaccgtaaagtgcaacacggcggtaatcgccgatgatgcggccacggccgtatgcgtctggcaaaccggtgatgatgtgcgaagaacgagctgcacgaatgcgtggagtgtagatatcaaacacgccttcgttgtgggtcttacggtacttcgtgaagatttccttcacgcgtgggttaacctctttgccagcttcgttaatagccgcctcaaccatgcgccatccgccgttaggcatcatcgcacgcttcaatggaacatcggtttgaagaccaacgacgacgtcgtcttcttcacagatgtatccggggccgaacgcgtcgacatcggcgggggtgtctacgtcaacgtcgtagacacgcttttcacgctcaaccgaaaggtacttctcatcgagagtcttccatagattaagtgtcttgtctgttggtccagccaagaaggaatcatcaccttcataaggtgtgtagttttcttggatgaagtcacggacatcaatttctgatttccaggtttctccggcgaaaccttcccatccagcaaactgtgcctcttcagctgagtttagacctgcattcacgctcacagcgcttctctccttagataaagttttaccttcaatcccatcctaagaacaccagttcaaaggttctaaagctcagacgcagatcacattctccatttagtacatttccgacttttcggacagagctatattttccatttagttttaacaggactatcggccctaacatgcgttgatgctgatcacaaagaaacgcactttccccactaaaactcgcattttttcgcaaaatccaagctgaacgaattatctgggaccttttgtgaattcgctcaacttttactactcgaataaagaataaggcatatcagagtcgtcaatactgtccatagcgccgatataccagcaatatgtgaacgttgcccgagcctaattcgccattctcaaatttgtggctttacgtggttacgtaacagtccaaagatgtagccatcagttagcgcttccaacgaagcttcaataacgtcaaccccaactccaaccgtggtccacgtacctgatccatctttcaatgtgatcaggacccgggtggttgccccagtaccactctttgagtccaaaatacgtactttgaagtcgatcaactcgaaggttttcagtagagggtagacgtttttcaaggccgtcttcaatgccgaatcaagagcgttaactggaccaacaccttctccgatacgcataatacgccgtccaccagcgtggatttttacgttcgcttcagaataagtttcagatacatcgtggcgagtcgttgccacatgggtagaccaagattcgatttcgaagaacttcggtcgcttcccttctacgatttcgcgagtcagcaactcgaatgaagcatcagcagcgtcaaaagtataaccttgcgcctcagcggcttttacgtggtcagtaatccgtacaactgcctctgggttgaattttagatcgattccgaattctttggcttttaactcgacggaggctcggccagccatatccgataccaacatccgcataccattaccaactgccattggatcaatatgttgatagagatctggatttactcggattgccgaggcgtggagtccagctttgtgcgcgaaagcggaaataccaatatacggctgacgcgatgccggcgagatattggttatctcggacaccgcgaacgcaacacgggcgaaattcgatagttcttcagccgtgaccaacgaatagttcgccttcatctgaagatttgccacacaagtaatgaggttagcgtttcctgtgcgctccccatagccgttaatcgttccttggatctggcggcatccagcttcaacagcagcaatggtattcgcaaccgcacatccaccgtcgtcatgggtatggatgcctagctgtggatcagaaataccgttcgcacctaaaacggctcgaagctgagttacgatttcggtgatttgcgatggcaagcatccaccattggtatcacatagaatcacccacgtcgcacccgcattgagggcagccatcgcagccgcagaagcatagtcaggatcatatgtaaatccgtcgaaaaagtgctcgaggtcaatcatcacttcgcgtccgagggaacgtaggtactgaacagactcagaaatcattgccaggttttcttcacctgatgtgcgtaatgcctgctcaacgtggcgaatatctgatttcgcaacaaggcacagagctggggctccagagtcaatgagcgcctggagctgaggatcatcttgcgcaccgattccaacttttcgggttgcaccgaacgccactaatttcgcggtcttaaggggattataaagccgaacctgatcgaagaactctgtatcgcgtggaatcgcaccgggccaaccaccctctataaagtcagcacccattgattcgatgatcggaagcatcgcgattttatcggctacagacaagttaataccttcttgctgagcaccatcgcgcatagtggtgtcgtagacgaataccttttcggtcatttttcactccgaaatcttgtacagccacccaaatcgatcttctgcttttccaagctgaatcgacgtgagctcgtcatagacgtggcgcgtcatatcgccggttggaatagttatatcaaagttctcaccagcaatgcgaccgatggccgtgaccacagccgcagttccacaggcaaaaacctccttcacttcgccgcttcgaagcccatcaaccagccaatcgatattgatggtagcttcttcaaccgcgatcctttcatcttcaaggaactgaataattgatgaacgcgtaccacccggcagaatgttaccggtgagcttcggtgtctttacacttccgtcggccatgacgatgaatacgttcatccctcccaactcatcgacgtttgagttagtttgagcgtcaaggaacatcacttcgtcaaagccgtggtgatgtgcttcaatcttagggagcaaggatgcggcatagtttccgccggtcttggcatcgcccatgcctccaggacccgcgcgatgatacttttgatccacccacacgtcgatcggctggaaaccatgtgcaaaatatgggcctgaaggagaagctatcactacatattcgtagcgcgaagcggctcgtacgccgaggaaggattccgaggcgataataaatggacgcaggtagagcgaggtaccctccccttctggaacccaacgttgatccattcgaataagatcgacgatcgatgctaagaaatcatctacagggagctccggaatcgctaatcgcccactagaatagttgaggcgaaccgcgttataagacggtctaaaagtccaaatcgacccatctgcgtggcggtaggctttcagcccttcgaacacttcttgcccatagtgaagcaccgacgaacccggatcaaggctgagcggcccatacggttcgataaccttgttatgccagccttcaggctcagtccacgtagcatgagccatataatcagtaaaatctatgccgaaaccgaggttatccattacatgggcgtattgggcatcggatttcttatggtcgtgcgtttggacggcaaaaattccagcaacctcatccgccgttggaatcatttgtgcagcttggagttcaagttccgtctgttggtgcgccatgagaatacctttccctaataaacgagctggggctaccgtcgtcttaattgtaaattagtgttcgtgccaaaaatcgaagctgctgtgcacgcaacaaatcggctattagagcttcgagcaaatgtcgtcaccgatgcaagaggtggatcgaataagttcctcgccattggcaattgctgcggcacgcgctttcatatcgctttctaccgcagctgtaattttcgcggccagctcaggaaactctaaaaattccaccatcatcgccacggagaggattgtggcggttggatctgcgattcccttacctgcaatgtccggtgctgagccatggacgggttcgaacatcgatggataagtacggtccggattaatgtttccagaggcagcgagcccgattccgcctgtgattgccccagcttcgtcggtcaaaatatctccgaacagattgtctgtcacgattacgtcaaaccgttgcggatctgtgaccaggtaaatcgttgcagcatcgacgtgggtgtagtccacttctacctgtggatactctttaccaacctcggtgacgattctgctccacaggtgtcccgcattaaccaaaacgttgtgtttatggaccaaggtgagtttgttgcgccgtgacgctgctttttcaaacgcgaaacgaaccacccgttcaacaccgaaggcagtgttcaccgagacttcggtagcaatttctgctggagtaccgactcggattgcgccaccgtttccgcagtacagaccttccgttccttcacggacgacgacgaaatccacaccttcagggcgaaccaaaggactcggcaggccttcgtaatactttgatggacgcaaattaacataatgatctaaatcaaagcgaagtttgaggagcaagccacgttccaatacgcccgacggcatagatggatcccccacagcaccgagtaaaatagcatccttcgacttaatgctttcacattcagtttcggtaacgatctctccggttcgatgaaatctcgaggcgccaaagtcgtagtgggtttcgttaaagacaacgtcactgccttcagccgcgtgatgtaggactttcaagccctcagccacaacttcgggaccgataccgtcaccaggaattaccgcaagttcaacgctcttcaccatgaataaatcttaggacgctgttcaattactgaaacatttgtatcaatatttgaactcttcgattaatagtgccgcaactcgaagcacggcggcagtgcaattggaataggtagagtaacttaacgatattttatgtttacaaaagtgattgacagttggaatggaacgagcttaagctatctccataactgattctcagtaagccacaccaagtttgtgtggttgaatgctccaagcatttgcttaatcgggtgccaattggcacccgattttattttccgtcgcttataagtacctatttctcgccataatcattaaagaaatactttcccaaactcgcacatttactgcgatttttaggaataataatcctatgaaagaattcaatttcaacgtcggcgttgacgtaggtactaattctgttggactttgcgcactcgagattggggacaacggtctccctactcgcattctgaactctatggtttatgtacacgattcgggtgtggatcctgagcagcgcaaaaaagcgattacaaggctcgcaaccagtggcgttgcaagaagaacgcgccgtttataccggcgtcgtaagcagcgactacgcgctcttgataccttcttgaaagaaaacggttacccgatagtcgatttagatcaattcccagacccacacaccccttggcatattcgcgcaaagttggcacgtgaaaaggtaagtgaatcggaacttcccaccgcactttccattgcaattcgccatatggcacgccaccgcggatggcgtagcccctatgctcgggtcgaatcactacactccgaagctcccgattctcaggaattcacaaatctcaaaaagcgattggtcgaatataacggagtggtcccgtacgaagatgcaacacccgccgaggttatagcagacatgatcagcgactacaccaagatccgtggaaatgatggaatcctgggcggaaagctacgtcagtcagacaatgctaacgaacttcgcaaaatcggggaagttcaaggtttatcggcggatcaagtaaatgcaattattgatacggtgttcaaggcagagtcaccgaagggtagcgctgcttcacgaaccggtagagatgaactgcctggtcaaggccatcttccacgagccgagaaagcacatcctgcattccagaagtatcgaatcgtttcggttgttgcaaacttacgtattaaggacgacgacggcacatcgcgcatcctaacggaggaagagcgtaacaaagtggtggcgtttttgatggaagccactagtgacgacgcagttacatggactgacgtcgctgaagtacttgggatcgtacgtgatcacttggaagggaccgccaaggaaggtcctgacggcgaacgtccatttgcgaaaccgcctgtaaacaccacaaatcaaaggattttagtttccaagccaaagtctttggtttcatggtggaaggaggcttcagatgatgaacaagccgcgatgatcagtatgctttctaacgccgaaattcttgaagacgacgcgcctggtgcagctagcgcccaaacatttttagctggattatcagataaggaactcgaggaaatcgacgggattaatcttccttctggtcgcgcagcatattcggttgattctctaaccaggctcaccaatcggatgatgaacgatggaattgatcttcattctgctcgaaaaatcgaatttggggttgaggattcatggaaacctgctgctgaaccgatcggagcaccagtaggcaatcccgctgttgaccgcgtactaaagatcgtcaaccgctggttgatgggaattgttaaagaatacggctaccctactgttgtaaatatcgaacacgtacgtaatggttttggctccgagcaacaagctcgcgagtatgaacgagaatctggaaaacgtgccgaaagaaatcagcaagtagtagaccaaattcatgccgatcaaggcttcacagggcgcgttcggtacgcagacgttacccggtatcttgccgttaaacgtcaaaactgccagtgtgcatactgcggtaccccaatcacactgacagactgcgaactcgatcatatcgttccacgaaaaggagtagggtcaactaataagcgtaacaatcttgttgccgtttgtatctcctgcaaccgttcaaagggaaatatcccatttagagtttgggctgggaagaatccaaatccagatatctcgctcgaaaaggcaattgaccgagttaagcactggcagtacgaagaaggattcagtacaaagcagtggtacaacttcaagaaagacgttattgatcggcttgcaagaagcacggaagaccctgagctagataaccgatctatggagtcagttgcttggatggcgaatgaactgcgccaccgtgtggagtacttcttacaacagcaaaaccctgattcacgagttggtgtctatcaaggaaaaattaccgctcaagctcgtaaggcctctggtttcgaggacagggttgaaatgatcggaggcggcggaaagacccgtctagatcgacgtcatcacgcgatggacgcagccacaattgcgctaatgtcccccggtatttccaaaaccctagccgaacgaattaacctgcgggatactgagcagctactacggaaagcacctacgtggaaagagtatcgtggccgttcagacggtgcgaaacaaagttttggcgaatggatgaataagatggataggctatctttcttgttcaacgaagcattagcaaccgattcgattcctgttatggaaaatctgcgccttcgtttgggtaacggtaaagctcacgacgacggaatccggaaacttacttataaaactattggatcggtatggaccgtggcggaaatcgaccgagcctctagtgagcagttgtgggtggccttaacgcggtgtgctgatttcgatgagaaaacaggattaccagaagacgatacccgccaaatccgtgtaaagaaccagttctttacagctgaggatactgtaggaattttcggaacgggagccgccgcaattgctgtgcgaggtggctatgcggaaattggaaacacaattcaccacgttcgcgtttatcgaatcaatggaaagaagcctgtattcgcaatggttcgagtgttcatgtgtgatctgatctcacacagagacgaagatttgtttacagtggaactcaagccacaaacaatttcgatgcgaactgccgagccgaagattagaaaggcgatcgctgaaggaaccgctgagtatttgggctggatggttgctggcgacgaaatagaaattgatatttctaatccaaagctgatttcggggcaggtcaaagaaatgcttgatgacttccccgggcagacgcggtttagggtggctgggttctactctaattccaagttacgactccgcccattattattagcagcagaaggtctgaacgtagattgttccgacggttcacaaaagataatcaacggtggcgggtggttcccagcactgaacgttatttttacatatgggaatccattaattattcgaagaaactcattgggcgttcaacgaaacaattccaggaatagtcttccgatatcatggcacgcctaaatgctgagcaatggagagtcctcgatttcactggttttcaagggaaaatctcagcgagtcgaggatctctccttgtgactcctgataagggagaaccaattacagttcctacagcggacgtaggaacagtgtttattggcgttaacactagattctcagccggctcaatgcatcggctttttggcgatgacgtttcggttatattttgtgattggaaaggtgtaccgcttgggggcgcctacagttggagtgatcatagcagggttggagcacgccatattgctcaaatggaagcaagccttccacgtaggaagtctgcctgggcaagtattatcaaagcaaaaataaacggtcaagcaaatgtgcttgattactgtggaaaacctagtgctaatctgttgcggtcatttgcaaaagaacttcgatctggcgacgtatcaaatcgtgaagggttagcggccaaagtctactggagctccttatggggagaggatggatttcgtcgcaatccaggtatccgtgatgaagtccacgcaccaaacgctcttttagattatggatacaccgtgctccgtggtcatgccatgcgcgcagttttgtcggctggtctttccccagcccttggaatgtttcataaaggtcggtcgaataattttaatcttgcagacgatttaattgagccttttcgccctgcaattgatgcctgtgttgcttcagtccttgcggataaaacaattaattctcctaatgttcggaaagaactagtgcaagttgcaggtgattgctttggagaaaccgggaattcaatcccttcagaaatggtgaatcttgcccagcattatgggcagtatctcgaaggagatctccccaaactcccagtcagcgtgtggaatcctactctcgctcttggactcgatgatggcgagtgaaccaatgtggtgcgtcgtcatgtttgatctacctaccaagacggcacaagataaacgtgaatattcacggtttagaaattctttattggatattgggttttcaagggttcaatacagcgtttatgctcactactctcccactggactgattggtactcggctggttaaagcaattaaagcaaatctgcccattggcggagaagtacggatctaccatctaacggataagcaatgggcaaaagccattcgtttttccaatcatcacgaggaaattcctgatccagaacccgagcaacttatgattttttaatcaaaagggcgccagaaaatggctttctggcgcccttttctaactctcctgaagtctatcagggagttaggtaactgattcccagccaaccaacggaacagtaacagcgtatccgaagtctatcagggagttaggtaactgattcccagctgggcaacaaagtgcacatgtttctctggaagtctatcagggagttaggtaactgattcccagctgggcaacaaagtgcacatgtttctctggaagtctatcagggagttaggtaactgattcccagcgaagaagttggtgagtgtttggtttctggaagtctatcagggagttaggtaactgattcccagctaaccgcaccggttaccggtaagaatatgaagtctatcagggagttaggtaactgattcccagccagccaacggaacagtaacagcgtacccgaagtctatcagggagttaggtaactgattcccagctttcctttttggtggagttcactagtaggaagtctatcagggagttaggtaactgattcccagcagtttcacgaatagcgtcgtgaacagccgaagtctatcagggagttaggtaactgattcccagcggcaagaagaacgtgtgatagttgattcgaagtctatcagggagttaggtaactgattcccagcagggtatcgtttctatcacagtgattccgaagtctatcagggagttaggtaactgattcccagcgacaagaagaactagtaatagttgattcgaagtctatcagggagttaggtaactgattcccagccgattctgatcagttcgcgagcgaagttgaagtctatcagggagttaggtaactgattcccagccgcaaccgtagacaggtggcaagaccgcggaagtctatcagggagttaggtaactgattcccagcatgggtgaatatgcctgattcgattgacgaagtctatcagggagttaggtaactgattcccagccaacacgggatttctttattgtggcagagaagtctatcagggagttaggtaactgattcccagcagttctgtcttgtatcgccgcaggtagagaagtctatcagggagttaggtaactgattcccagcattgacgcacgtttaaattctttaaggggaagtctatcagggagttaggtaactgattcccagccaggcaaataaatacaattatttggttggaagtctatcagggagttaggtaactgattcccagctccattttcttgtttccttccaaatcgggaagtctatcagggagttaggtaactgattcccagcctggtcatcagctcagcatactgcttcggaagtctatcagggagttaggtaactgattcccagcgacgacgacggatcctaaagactgtcgtgaagtctatcagggagttaggtaactgattcccagctgtaaaaatctaccttaccgccacccatgaagtctatcagggagttaggtaactgattcccagctccgtatgttttaccgagtccgcgggcggaagtctatcagggagttaggtaactgattcccagcatgagtaatttgataaggaggtaaaacagaagtctatcagggagttaggtaactgattcccagcctcgcaacgcatgactggtcgcttaacggaagtctatcagggagttaggtaactgattcccagccaatatttgatttcgttgccgacggaacgaagtctatcagggagttaggtaactgattcccagcctccaaattaagataggcctagaactttgaagtctatcagggagttaggtaactgattcccagcaccaacgtaaacaaggaaatcgcaaactgaagtctatcagggagttaggtaactgattcccagccgagctagcgatccacgataataagatcgaagtctatcagggagttaggtaactgattcccagctaccgcgatttcgcttgtcatagcgtcagaagtctatcagggagttaggtaactgattcccaacattgagcgacggcactccatgagattagaagtctttctatacgaaccgggaatctggtccttaactcggaccgaattcccggcacacttagctactcatggaatccgtcaatccacattcactcagtcaacaagtagcggatgtatgtttccagtgatcctccatcgatcgcattatccacttcttcctgaaccgcaggattttcaatctggaacaagtaacgccacgtagattcttcgccacccttgtaggcaactaccgcttcgccgtcttcagacccctgatgttcaatagcaggctcccaaccacacacatgtacagcctcaaatatcttctccagacggcgctcataaccaggggtgaatctctcaccttcccagttccaagcattactttcaccgtccgattcacggggaaatgtcaattctttcatcgtcactctcctgctctcttttcagcgtcaacgtcgctaccagccacggcttcttcgaacacctcgataatgcctttattaaatgcttcaatatcgcgtgggctacgcgaactcagcaagtttccatctctatgaaattccgaatcaatccatgttgcaccggcgttacgaagatcagtgcggatacgcgtcgtcgacgtcaacgtacggccctccaacgtcccggtttcaatcaagatccaagcaccatggcagatcggcgcaactggtttacctgcgtccatgaatgccttaacaaaactctgtgccttttcattagtgcggatcttatctgagttcagagttccacctggcaaaaccagagcaaggtaatcgttcggatcagcatcatccaacgtgatatccactgggaaatcaacgccacgatcccagtcacccactaagcccgtgatgttccctagctcctctgaaacaagaacgggctcgccaccagcttctttgacagctttccaaggttcggttagctcagcttcttcaaagccacgcttcgccagaaaagcaatcttctttccattaagtcccgtcatgattcctccattaatgcgcttaacactccattgtttgcacgccaccttgtttgttcaaccaacaagcggtaaacatttctacggatcgatatctattcactttagtttttgaactgatcggtgtaaaaatattattttggtagcgaacatagaggtggagcagttgcattcttctagcaactgctccacctctgcccctcgccaatgatctaaaactcaatcacttaatatcgttggcggtcagatacttcggaatccaaacacaattaatcggcttagcagcaggaggattaagagcatttaaagaaagctgaagtgcaacttcgtcgtacgtcatgttcggatgcccatgactatcagctgggcatacatcttgaacattcatattggttacattcggggcatccggcaggaaagaccgcgtatgcggagtaatgatcgtatcgagcgtagttgaaataaccgtgtacttaatatctggataaactatttgcccagaattgagatcagccatgaactgcgaaccgatgagctgctggagcagagcctgcgagttatgcccattaagcacgttcgtttctaaattcgggtaacgctcaagcaactgcctaagaagctggtcagtccccatcatagtggtaccactattagatgggacaagaccgataagtttatccactttcttatctccaccaaaccacttgatatatgcccttgggagtgcaccaccaccttgggaatggccgataatatcaatcttctgagaacctgtagctaccaagattcgattaatgtagccggccataaatgccgcactttgcttgatatcacccatgaatgacattgcgtctcgctgcgggttcgttgctgggttgtagttaaaggtaaaaacacagtaaccagcttgcttcaagtgaggtgaaaagaatgcccaagcggtgtaagcatcatttccagttcccgggataagaataattgggttggttcccggagcaggcttacaggtgaaatcgtttgcacccagggggttgagaccgggcgtcttcaatgcaagtgaaatcgccccaacaaaagtgtggcggtctgggccgaccccttgggatggtactcccccagggctcgtaatcgcttcaacaccacccgggttatcgatcgttggttcagctgcttgagctactgtgcctattccaaggctaagtaccagtgcagaaacagcagcagatagctttacgtaaaacttcattgttttctcctatcgtcacgaattgctgttgattcgagacgataaacagtttatcgaacattcaatcattctgctcacaaaactgagataaatcagaattgaggtgggttggacaacactacttaaagcatttccaatcccacctcaatactaggtagataccctccgggttacttcacggtatattcagctgtccccttaatgtcattgacggaatcagctacaaacaccttgtatgcgccaggaagaacgatatatgaatgagtattcacatcccagacgttgagttcttcaggccccactgtcacggttaccgtttttgtttcaccgggctgcaacgttaccttgtcaaatccaacaagttcctttggaggagtttgaagacccggagactttggcttccccacgtagaactgtggagtaaccgctccagcacgtgaaccagtatttgttacatcgaccgagaccttgaaagagtctgaacgagatcctgaatcctgcgaaatagcaacattactgtagtggaacgtggtatatgaaagacctgatccaaaggtgaaagcaggctcaacgttcttttcgttgaaccatcgatatcccataaacacgccttcggtgtacttcatgttaaatccaccattggctccagggtattgatcggaggtttctagagccttttgaccagcggccgggaaagtcaacggcaaacgcccagaaggattcacttcaccaaatagtaatccagctgttgcttcgccaccggcttgccccggataccaaacattcaaaacagcacgtacgtctttaagccatggcatcaatacaggaccaccgacttgcgtaaccacaacggtgttcttgttgtttgatgcagcaatattcactgcattattttcaacaaggttgaaatcaaggctaagacgatcaagaagttcagaagattgctgagttgcaaccacaatcactacatctgcttttggtgccttgatagcaattcccgctggattccattctgaaacccacgaaacttcactgtcaggcaaccgcttctttatcgcatccagagttgaaactgattcgatcgccttagtatttgacgatccgcctccactcatttgggactttgcagcattacccactactaagacgtgtttgaggtctttacctagtggaagcgcgccatcattcttcatcagaacagcaccttcttgggcgaccttaagagcaacggcattaccgcgagcggcaggaatttccttcatatcacgtacacgatcccctcgcgttgagtcccagtcatgatcaaacaaaccaaatcggaacatttggacgagggtttctttaacacgtaagcgcacaacgtcccacgtcatctcaccgttcgcaatagcagatcgaatccgttctgggctagtccaaaacgaccaaggcagctcaatatttagaccatctcgaatatctgttggagaccacgccgcaggataatcggtaagaacaagacccttaaaaccgtgagtttgacgcaaatccttaatcaatgtggaatcggagccacacgcagtatctccattaactttattatatgagcacattaccgttgcaggttctgcaccatgaatcgcgatacggaatggcttttcataaatttcatgaagcgtacgttcatcgatatccatgcttgctagcgtacgattcaaatcttggttgttagcaacatagtgcttgagcgtggacataattccaacaccttgcattccttggacatttgcactcgctaaccgcccagaaagtaacggatcttcaccaaagtattcaaacgttcgcccgcccaatggattacgcgcaagattgaagcccggtccgaaaagtagatcttgacctcgatcctttgcatcttgaccaatcgcctggccgtaatcgtgagcagccacagtatcccaagtggatgcttgtacaatcggcgctggcatttgcgttgctggctcaccattacgtaaacccgaagggccatcagacatcacaaatgctggtacctttaactctgggatcggagggatatagcctataaaatggggtccgcctcccggagcttgaccgccggtcaacataccttgtccatgcaacatatggataagctgatcctcgttcatggcattaacaagaagatccgctcgctcttgtgccgttttgttcgaatctagccacggcatatcggagtctgctactgccacatttggaatagtgacaagggcgagtacagcaattgctccagttacttttgagaaaaattttttcttcaaagtaaagctcctaacttaaatcagacaccttcatcgatatctagcactacaagatctatatatatcttaaatgtgacttaagttaaagagtttccatcaaaatgtcacctaacaaaaaagagtattttgacgatttaacatagttgggctttggtaaagaaaaattaataaattttggtaacgttatgaattactgcagaacaattgctattgcagccgcagccccggaagccagcattgcaaaaataacaattaaagcaataactttttgcccccgcccaggcttttttggtttccaatcatcgtgcgatggtgccataatttcgctccttgcttgaaactattgtgggaggaaattccacaccacatagtaaaggaattcctcccacaatagtttcacttttcagtggctatcattcaaattccagacagctcacagtaagcacagtttaattacgtgcagctttgccatccgtatagtcagagtctttgctctcccacgcaaacatcttacgtaactcaacaccaactttttcgatgggatgatcttcggctttcctgcgaagcgctttaaactccggagctccagaatcttgatcatcgatgaatcgcttcgcgaaagctcccgattggatatccgccaaaacatccttcatgttttccttgacttgcggcgtaataacacgaggtccagaaacgtagtctccaaactccgccgtatcagagatcgaccagcgttgctttgcaagaccgccttcgttaatgaggtcaacgataagctttagttcatggagcacctcaaagtacgcgatctcaggctggtagccggcctcggtcaaggtctcgaaaccgtactggattagctgggaaacgccgccacatagaactgcctgttctccgaacaaatcagtttcagtttcctccgtgaaggtcgtcttaatcgcacctgcacgagttccaccaattgccttcgcataggaaagtgcaaggtcccaagcctggccagaggcatcactttcaactgcaacgatatctggcacgccacgtccttcttcgaactgacgacgaacaatgtgcccaggaccctttggtgccaccatacaaacgtcgtgaccggcgtcgggcttgatgtaaccgaaacggatattgaaaccgtgggcgaagaatagtgcggcgtcagctttcaggtttggttcaatatcattcgcgtagatggtccgctgatgctggtcaggcgcaaggatcatcactacatcggcctgtgcaacagcatcagctaccgtagccacctcaagaccctgttcctgagccttagtaatcgacgacgacccctcccgtagaccgacgacgacactcacacccgaatcacgcaggttaagtgcgtgagcatggccctgtgagccgtatccaataacagctacacgcttggactggattaacgaaagatctgcatctgagtcatagaagatttctgccatgatttactccctaaattgagtttatgttttcttaattgtcgttttgtggactttgtagttcttgaagtacttgctcactgattgaacgtgccccacgaccgattgctacggttccagtctggacgatctccttaacgccgtatggtgcgagcgccgtcagtaaagcgttcatcttcgcttccgatcccgttgactcgatcgtaatagcatcaggcacgacgtccaccacgcgtccgcggaacatctcgactatctgcaagacgtttgtgcggttagcatcgttggcaccaactttgactaggatgagccggcgttccacagctgtctcatcgtgaagctcctcgatgtgaatgacgttcactagcttgttgagctgtttctgaatctgctcaagtgggtgttcatcagcaactactaccaaggtaattcgcgatagcgacggattctcggtcggaccaaccgccaaagaatgaatgttgaaagcacggcgtgcaaaaagccccgatacccgagccaacacacctggtttattctcaactaatactgaaagcgtatggttactcatttttcctcttaatcatcaagtccgctgaagtctgggcgcacatcacgtgcgtattggatttcatcattagaaagtccggccggaaccatcggccagatcatcgcgtcaggtgaaacgacgaactcaaccacaacgggtcgatcgttaa

SEQ ID NO: 3856 - DNA, 23273 bp, synthetic construct
  misc_feature 1..23273: note = Synthetic
  source 1..23273: mol_type = other DNA
ccgaaaaactgaacgataacgcgaaatgcgtgccagtagatcctctgtacgaactgctgtgccgtcccgcatcttcatcgtgtcggggttatgacaatataagcatcgcagtgggcaacctgcgaaaaaggtagtcatgcgcgtacctggaccatcaaccgcagtgaccagctcccacgagtgcactgatcctacttcgccagcacgaaccgccatcatttgctccgtgtggctcatgtgcccagcaaaggtaacgccggaaagtccagcgccaccaaggcgcggaacttcgatttcaagcggttcggggcggtactcccctgttgatccctcagttgcccgagtttttaacaaagtcataccgccccgatccttaaagttgctttttgtttgccgccacacttaaatgcagcggcgatgcgtcacattccttcgtggaaggtgcgcgagattacgtccatctgctgctcgcgagtaagacgcacgaagttcactgcgtaaccagaaacacgcacagtgagctgtgggtacttctcaggatgctccatggcgtcctcgagagtatcacggttgagcacgttgatatttgcatggtaaagcccctgaatgccacccttggcttcacggcttgccttcattgaggcttcacgctctgcgtatgtttttgttgccatgagattctcctaaacggttttattaaatatgtttttcccaataccgattttagttgcttggcaacatatttctactgccaagcaacgtgttttcggactcagtcttgcttaatgaagccagcatccatgatgccgaccagattttcgatctgctcctgttgggtgcgtcccaacgaggaaggaacaatagtgttggtcaaggaaataccgtccagagcgtcgtcgtaatcgagctttcctaccgaaagcatcgaggcgagcatgccgtgggtgtccgcaccattttcagggtttgcacctggagcgaatggcgttcctgcgcggtgacccgatgggaagtttccagttgccttgccatagaccacgtttgaggtaatcgtaagaaccgactgcgttggaatagcatcacggtacatcgggatggccttgatcttgctcatcacggtgtgaacgatggtagcagcaatatcatctgcacgatcgtcgtcatttccgtaacgtgggaaatcgccttccgtcttataatcaacaatcagaccggtttcgtcgcggatcggcgtgaccttggcatacttaatagccgagagcgaatctgcaacgatcgaaagacctgcgattccacaacccatcgtgcgaacgatatcggagtcgtgcaaagccatttccatagcttcgtaagcgtacttatcgtggctgtagtggatgatgttgagggcttcaacataggtaccgactacccagtcaagcatgtcctcatactttgcccacacctcgtcgaaatcgagttcgccatcgctttcgattggcgaatagccctcgacgatctgcttgccggacatctcatcgcgtccaccattcatggcgtacaaaagagcctttgcagcattgacgcgagcgccgaagaactgcatctgcttacccacgcgcattggcgaaacacagcatgcgatagcagcgtcgtcgccccaatggcaacgaatctgctcatctgcctcgtactggattgacgacgtttcaatcgaaacgcgagcacagaagttcttgtaaccaactggaagctgatccgaccagaagatcgtgatgtttggctccggtgctgggccaagattcatgagagtctggaggaggcggaacgaagtcttggtaacaagagtgcggccgtcttccgagaagccaccgtcggaccatgttgcccaatacggatcgcctgagaagatctgatcgtaagcctcggtgcgcaagaaacgaacgatgcgcaacttgataactagggcgtcgatgatttcctgagcctcggattcagtgagaattccgcgctggaagtcacgctcgaagtagacatcgaagaatccagagagacgaccgaagctcattgctgcgccgtcttgggacttcaccgaagccaagtaaccgaaataggtccactgcactgcttctttagcggtggtagctggctgtgagatatcgaaaccgtaactttccgccatacgcttgagcttcttgagagccttgatctgctctgaatgctcttcgcggtaacgtgcccagtgctcagagaatggctgatcggcaactgaatcgcgcgcttcgatcttctcgttgatgaggtaatcgacgccgtagagagcgacgcggcggtagtcgccaatgatgcggccacgcccataggcatctggcaggccggtaataatatgcgacgagcgagcagcacgaatacgcggcgtgtaaatatcgaaaacaccttcgttgtgggtcttgcgatacttggtgaagatttccttaacgcgcgggttaatctccttaccagcttcgttaattgctgcctcaaccatgcgccatccaccattaggcatcatggcacgcttgagaggcacatccgtttgcaaaccaacgacgacatcgtcgtcttccgaaatgtagcctggaccgaaggcatcaacatctgctgggatatcgacgtcgacgtcgtacacacgcttttcacgctcaaccgaaagatacttctcatcaagcgtcttccacagattgagggttttttcggtgggaccagccaagaaggaatcgtcaccctcgtacggggtgtaattctcctggataaagtcacggacattaatttctgatttccaagtttctccagcgaaaccttcccaaccagcaaattgcatttcatttaccgatgtttgacctgcgttcacgctcacagcgcttctctccttagataaagttttatctgtacttccatactaggaagcggctggcgaagttactaaagctcagacgcaaatcacattctcatattgccacatttgggacatttcggacagggtgaaattttacatttgttctaacgggactaatgacccttcgggcgcttgacgctcatcacaaacactgcgatatttccccataacatcagcaattttcaacaatcaccgagcataggttggtagctaggactttttgtgatctggatcaatacggaaacttaacaatttcaagctaaacatgtgggcactgtcgagattgttaagccccgcgaccccgtaatcagcaatctatcggattgtgagcctcacgcgatctaccggaatttcatttgccgcaatcgggcgcgattccattgcgcatcaatccacagatataaccgtcaatcaaggcttcccatgacgcttcgataacgtccactcctacgccaacggtggtccattcaccggcgtcgtctttcaaagtaatcaagacgcgcgtaatagcagccgtaccacgagtagagtcaagaatacgaactttgaaatcgacgagttcgaaagaattgagcaaaggatagacgttctttagcgcagttctcagcgcggaatcaagagcgtctacaggtcccactccctcaccaatgcgcataattctccgcccgccagcatggattttcacattagcttcagagtacgtttgcgagacattgtgagcttgtgttgccacatgtgtagaccacgattcaatctcgaaatagcatgggcgctcaccaaatactatctctcggataagcagctcgaaagacgcatcggcggcatcataggtatatccttgtgcttcggccgctttcactcgatccgtgatctgagccaatgcaaatttattgctgctcaagtcaataccaaattcacgtgccttgagctcaatcgatgctctacctgccatatcagaaacaagcattcgcatatcatttcccaccaccatcggatcaatatgctggtagagatcggggtttatccgaatcgcggaagcatggagacccgccttgtgagcgaatgcagaaacgccaatatagggctgacgccgagcaggagaaatattggtaatttccgaaaccgcataggcaactttcgacaaattactcagttgaacctcggtaaccaactgatacggcgtcttgatttgcagatcagctacgcacgtgatgaggttggcgtttccagtgcgctcaccgtagccgtttactgtgccttggatttgccggcatcccgcatccaccgccgtgatcgtattggcaactgcacatccgccgtcgtcatgagcatgaattcccaagttaggcgcgtcaataccactgtcgcgcaaacgatttcgaagatcaccaatcgtcgcagcaatacgagacggcaacgtaccaccattagtgtcgcataaaattacccagctggcgccggaactaagcgctgcaaccgccgccgacgttgcatactcaggatcaaaggcaaaaccgtcgaagaaatgttcaagatcgatcatcacttcccggttcaggcttcgcaaatacttcactgattcagtgatcatgcgtaaattttcgtcaccagtggtacgtaatgcctgttcaacatgtcgaatatcagacttcgccactaagcacaggatcggcgcctcggatgcgatcaaggcttggatttgtggatcgtcgtgcggagctactcccactttgcacgttgcaccaaaagctaccaattgtgcagtttgcagtggattcgctgctcttacgcgggcaaagaattcggtatcgcgaggaatagcacctggccagccgccttcaatataatctgctcccatggcttcaataatcggcagcaacgccaatttatcggcaacagacagattcatcccttcctgctgcgccccgtcacgcaaggtcgtatcgtagacgaacaccttttctgtcatgttttacctcaattagtaactgcacgaataacatctgcacgaatgtttccgcaagaacggttttctacgcgaaatctgccttggaatccactagccttggaacccactccaaggttagttgaaaaattaccacttcacagcgcgaaatctatcaagcgagttgatagagccacccaaatgagtcctctttattgcccagttggattgatgtcaattcatcatatatatgacgcgtaaccgtattgttcggaagagagaggtcaaaattctcaccggcaatccgcccaatcgacgtaacaacggcagccgtgccacaggcaaacatttcttggatttcgcctgcttcgatcccctcgcgaagcgcggcaagactgatcgtacattcatccaccgccgttccctgagcctctaagaaacgaataatcgatgaacgcgtagcgccaggcaaaatattgcccgtcaattgtggagttttgacgcttccatctttgagcaccaaaaaaacgttcattccccccagttcgtcaagattcgagttcgttgctgcatccaggaacagtacctcatcaaatccgcgatagtgagcatcaattttaggcagcaaagacgacgcatagttaccgcccgtcttagcgtctcccattcctccaggacccgctcggtgatacttctgatcaacccacacctcaatcggcttaaatccattggtgaaataaggaccagatggcgaagcaataaccacatattcgtaacgagttgctgctcgcactcccaagaaagattcagatgcaaagataaatggacgcaggtagagcgaagcgccttgaccggttggtacccatcgttgatcagcgcgtactaaatcaactatcgatgcaataaaatcctcaattggcagctccggaatagccaagcgtgcaccagaataattgagccgtgcaccgttataacttggacggaaagtccagaccgttccgtcgtcgtgcctatacgctttgaggccttcaaaaatttcctggccataatgtagtaccgacgcacccggatctagcgcgatcgaaccataaggttcgattactttgttatgccaaccagcatcggcagtccaggtggcacgtgccatgtaatctgaaaaatccacgccaaacccgaggttgcccataatctttccatactgcgcatcagttttgcggtggtcatgatgttgcaacacaaatcgaccggccagctcggatgctgccggtagctcacgtccagcaatcttttcaagatccgtttcttgatgtgccatttcattcacctctccattgatgcgcattcgcaactatgaactcgtctcggtacgttttcattctactgcgacgctaccgccaaaaatcgtgaccatacgatcagagcagattcaaaatatcgcgcccaatttgcgtcgtactgcgctgtaacttctttccttcagcagctggtttcgcgcgctgcgccatgtcagcttcaactgcagcgttgacgctctgtgccaattgcggatgccccaagaaatcgagcatcatcgcaacagaaagaatcgtcgccgtcggatcagctttcccagttccagcaatatcaggcgccgaaccatgaactggttcaaacatcgacggaaactcgcgctccgggttgatatttcccgaggcagcaaggccaatacctccagtaatggctcctgcctcgtcggtgagaatatccccaaacagattgtcggtcacgatcacgtcgaaacgttgtggatcggtgactaaataaattgtggcggcgtccacgtgaatgtaatcagtaacgacgctcgggtactcacgtcccacccgctccaccgtgcggcgccacagatgccctgcatgaaccaagacgttgtgtttgtgaaccaaagtcagtttattgcgcctgttcacagcctgttcgaatgcaaaacgaacaactcgttcaacaccgaaagcagtattaaccgagacttcggtggccatttcttgcggagttccgacgcgaattgcgccaccatttccgcagtacaatccctcagttccttcacgcaccaccacaaagtccacaccgcgcggatttgcgagcgggctgacgacgccgtcgtaataacgtgaaggacggagatttacgtagtgatccagttcgaatcggagtttgagtagcaagccacgctcgaggagtccagaaggcgtggacggatcacccaccgcacccagcaaaatcacatctttgcgtttgatgctcgccagatcatcgtcggaaagaacatccccggtgcgatgccatcgagaagctccgagatcatagcatgtttcgttaagtacaatgcctgcacgatccgttaccgcgcgaagaactcgcaagccttcggctacaacttccgggccaattccgtcaccaggaatcactgctaaatcaatactttgcgccatatcgaaagcctagactagcgaccacactacggaatattaatttcaaaatatgagaagcgatttttaaccattttttgacttttctgtaattcgtgatttcattatgttaataaaacgaatatgagaataataggcactaaaatgagtcacatatctaaaaagacaaagttccacgcagttcttgctgcatgcacagctgccctgattgcgtctccgttcgcattttgcggcgatattgcacatgcaacacaaactccggcaggaacgacgtcggtaccagtagttgcgaacagcggcaagagtaacggcagcgatcagtggggctatatcggcgaaatcgatacccaaaatggcaccggaacagtgtttacgtacggtctggctttcgaccccaccgatcaatcgctggttgtaactgactctggaaaagtactttccagtaggttcggatgtttcatcgtcggtaagtcttcgccatgtcaggtaggcaccccacaaatctttgattacccactcacgtccgcagctcaaagtgccaccagcgagaaatccttctctgattacttggtcgatggcacatactcgagcttggctccagggacagcaaatggggcgaatgccggtctgggcaagcgatacgttgatctcgccaatcgtaataccgtcacatttcccgccaacgaacagcttgtacacggcccgcgtggtgcaactttcaccgccgatggcacagcttggatcgttgactccgaggctgtagcgccactatcgggtttacccggagcaatcaaacgattcggccaagacctttcaagcagtctgggaggagcaggctatcgccaggcaacgggcacggactcgtgggcaaataaagacaaacccggtatgctgcaatactccgtgggaataacaaccacaccgcaaaatacggtattggcaaacacagaagttagtaactacatacaagaatttaacgctgacggtacatttaaacgcaccattaaactcaatttacctccaggcacgtacgacgcaagcgattctggttttcgagatccctacggagtcgctgtagacccagtagattcgagcatgtatatcgcgctggctgaattcaaacttgactcagcacgctggaaagacaagccaatcttcattgaaaagcgcgataaagacgggaaactcctctccaccttcgggcaaggacacctcggtgcaaacgatgtagtgttcaacgtcgtcgttgagcccaagactcgcgacgtctacgcatggacaggtagcgggaatattcagcagttcacgaaagacggcgtgtgggtacgcgagtttacagccgcagaatttcctggtctgagcacggtacgcgatcttgtgtttgatgcgaacggacgtatgtacatttcagttgccgagggaacctccagaacgcgcgttatgatacttggaaagacgccgtcacccatcgtcaattcccaagctcagtgctcagcggataacggcggaacagccgcgttgaactggtcaagcgattcggctaacgcaaccccgtaccaacaaacagacatattggactatgtggtagaaaagcggctgaaaggaacgacggacttcgccgtcgtcgcaaaaacaaccgcttcaactgaaacctcccgaacactcacaggacttggcgacccttaccaatacgaataccgcatttcggcgtggaatgaagcaggaaattccgacacccagattgtttcttgcgatattaagaagagcggtgtgagcgttgcggatcctaaaggcggaatttacactgctcagtattccattgatgtaatgaatccaagctcgtctgagacgcgcacatacgacccaattgtggacactcctgactttactcaaggggtaaaggtagtaggcgcctcgtacactttgacggctgccgatggcaccaaactgagtggcgatctaggctctgccgctccattcaagctgggctcgacaccgcggactattgcggcaaacggaacggatcactacaccgtcgctgttcagtaccagctcacggaatctatcgaccagccaagcaaatgtggaacgacgccgactgccgggcaaggacttttcaacacagcaacgctggtgtggacgacgaacggtacagctacagcaagttcgtccagctcagcttgcttgaatccgagtacggtggtggaagctgtgcctacaccgcccgtgactgttgagccgacgccgccaacacccgttctcgatggtgactccagtgcgagcgcgccagcttcgaagttggcaagcactggaggcgcagatatcaatgcatgggcagtacttggtcttatgttggtctttggtggcggggttatgaccgtaatcggaggcgctgccagacgccgggcgttggcggtttaaccatgctggcctcgcgatttaatatttcacaaatcaatacagaaaacagttgacaattcaaagtattcgaacttatgattgatccataactgattctcagtaagctacgccacgtttgcgtagtcgaatgctaaaagcatttattgcttaatcgggcgccatgggcgcccgatttgcatttccgatcagatattcaacaacttaccttacaaaagtcacacatttgcaaaagatattgtgaataatagttgtatgaagacaatgaattataacgtcggcgttgacgttggaacgaactctgttggtttatgtgcactcgagatcggcgagaatggccttccgactcgaatcctaaattctgttgtttatgtgcatgattctggcgtagatccagagcagcgtaagaaagcaattacacgactggccacaagcggcgttgcacgacgtacacgacgcctatatcggcgtcgtaagcaaagactccgcgcattggacgatttccttacagcaaagggatacccaatcataaatctcgaagaaatcgctgaccctcacgctccttggcatattcgcgccaaacttgctcgtgaagagctgcctgctgatgaattcccttcagcgctttctatcacacttcgccatatggcaaggcaccgcggatggcgcagcccgtacgcaagtgtgaagtcactgcatttgcccgctgcggattctgaagagttcaagaaattaaaggaacgacttactgaatacaacggcgttatgcctgacgaagatgccactccagccgaaatcatcgccgatatgattgcggactatacgaaagtacgtggcgagggcggcattctcggaggcaaactccgtcaatctgacaacgcaaatgaactacggaagattgccgcaaaacagggcatatcaacagaagacatcaatgacatcatcgatgtagtattcgatgcaaaatcaccagtgggtagcgcagcgtctcgcacaggaaaagatgaactaccaggccaacatcatctcccccgcgcagaaaaagcgcaccccgctttccaaaagtatcgcatcgtgtcagttgtagcgaacctgcgtattcgtgaagacgccggaaccacacgttcgctcaccaaagacgagcgtctaaaagtggtggaattccttatggaagcttctagtgacgacgccgtaacatggacggacgtagcagaactgctcggcgtcgtccgcgataatttggaaggaactgcaaaagaaggacctgatggcgaacgtccttatgcaaaacctcctgttaacgtgacgaaccagcggattgttaaagcaaaacctaaggctctgtcactatggtggcaagacgcttctgaagacgagcgcgcagcattaattgcgttgatgtccaacgcggacattctcgaagacgatgctgatggagctgaagcagcgcagagtttcctcgcaggattatctgataaagagttagaagagctcagtggggtcgacttgccggctggccgtgccgcgtactctgtggactcgttgacgcgcttgacaaatcgcatgcttaacgaaggtatagatcttcatgaggcacgcaaagcagagtttggagtcgacgattcatggaaaccatccgctgatcccatcggcttgccagttggaaatccgggcgtcgatcgagtattgaagatcgtcaaccggtggctgacgagtgctataaaagaatttggctacccgaacgtcgtcaatattgagcatatgcgtgacggcttcgtgtcggaaaaaatggcgcgcgaatatgaacgtgaaaacggcaagagagctgagcgaaaccgtaacatcgttgagcagatccatgctgatcaaggttcagggcgcgtgcgaaagtccgatataacccgataccttgcagtaaaacgccaaaactgccagtgcgcatattgtggcgcccaaatttcaatgaacgactgcgaaatggatcatattgttccacgcaaaggcgtgggttcgaccaatacgcgtaataacttggcggcagtctgtatctcatgcaaccgctcgaagggcaacatcccgttccgagtctgggcgcaacaaaatcctaacccagaaatcacacttgcaaaggcggttgatcgtgttaagcattggcactatgaagaaggattgagcaccaagcagtggaacaatttcaagaaagatgtaatagaccgcctgtcacgcacaagtgaggatcctgaactcgataaccggtcaatggaatctgttgcctggatggctaacgagctccgccaccgcattgagtatttcctcaaacaggaaaaccccaactcaaaggtaggagtatatcaaggaaaaattactgcacaagctcgtaaagcatcaggttttgaagatcgcgttgagatgattggcggcggcggcaagactcgcttggatcggcgtcatcatgcgatggatgcggctactattgcattaatgtctcctggtatctcgaaaacacttgctgagcgtatcaacctccgagataccgagcggatgcttcgcaaggctgaaacatggaaagaataccgcggacgatttgatggagctaagcagagctttggcgaatggataaataagatggatcggctatctttcttgtttaatgacgcgctagcaacggactccattcctgttatggagaatctacggctcgggctcgggaacggacgagctcacgacgatagcattcgaaagttgacttataaggaagtcggctcggcatggacaacaactgaaattgaccgcgcctcaagtgaagctctgtggtgtgcgctcacacgctgcgaagattttgatgcgaaaactggcttaccggaaaacgacacacgccagattcgggtaaagaatgagtacttcacagcgaaagatactgtgggtattttcggcacaggagcagctgctattgctgttcgtggaggctatgcagaaattggcaatactattcatcacgcacgtgtctaccgtatcaatggaaagaagccagtttttgcgatggttcgcgtattcatgtgcgatttaatctcgcaccgcggtgaggatctcttcaacgtggaactcaagccacaaagcatctcaatacgcgctgctgaaccgaagattcgaaaggcgctggcggacggcacagctgaatacctcggttggctggtagctggtgatgagatggttattgatattagcaatccgaaactaatttctggacagataaaggaaatgttggatgatttcccaggtcagaatagatttagggtggctgggttctattcgaatgcaagactcagattacgtcctgcaatgctctcagcagaaggattaaaagatcaacattgcgaaagttcgtacaaaattattgacggcggtggttggtttcctgcaatcaacgttatctgtcaatacggaagtcctcatgtcattaggaggagcgcacttggtgttccacgaacgcactcgaaacacggccttccagaatcatggcacgcctaaatgcggagcaatggaggatcctcgatttttcaagctttcaagggaaggtttcgcctgatcgaggatctctccttattacgcctgacggcggcgatgccgttagggttcctactgctgacgttggaatcgtttttatcggtgtaaacacacgtttttcggctggtgcgcttcaccggttatttggagacgatgtttcggtgatcttctgtgactggaaaggcgtaccaattggtggtgcttatgcttggagtgaacacagcagggttggtgctaggcagattgcacagatggaaagctcattgccacggcgtaaatctgcgtgggcaagcgtggttaaggccaaaatcctcggacaggcgaacgtactagacttctgtagaagaccaaacgcaggattgctacgtagacttgctaaggaattaaaatcaggcgattcgtccaataatgagggacaagcagctagaatctattggagttctttgtggggcgacgaagggtttcgtcgtcaacccggcgtgcgagatgacgtatttacatcaaacgctttgctcgattatggatacaccgtgctgcgcggccatgcaatgagagcagtgctctctgctgggctcactccagcactagggatgtttcatcgcgggcgatcaaataacttcaatcttgcggacgacctcatagagcctttccgtcctgccattgacgcatgcgtagcatcaacgttgtgcaacgaatcgatcgactccaaagaagctcgaaaagagttagtccaagttgccggcgatagtttcggcgaaagcggaaactcaattcctgcggaactagtaaatctggcacaacattacggtcaatacctagaaggcgatatcaataagctctctataaatgtgtggaaacccacactaacgctcgggatctacgatggcgagtgaaccaatgtggtgcgttgtcatgtttgatcttccaaccaaaacagcgcaagacaaacgggagtactcacgtttcagaaactccctgctagatataggtttttcccgggttcaatatagcgtttatgcccactattcccctaccggactcattggcactcgactcgtcaaagcgattaaagcgaatctacccgtcggtggcgaagttcgtatctaccatttgacggataagcagtgggcaaaagctatccgtttttccaatcatcatgaagaacttcccgatccagaacccgaacaattgatgattttttgattgaaatggcgccagaaagtggctttctggcgccattttctaactctcctcaagtctatcagggagttaggtaactgattcccagccagacgacataagagtgtcaaaactcttcaagtctatcagggagttaggtaactgattcccagccatgatccttcctcccctaaatctgattcaagtctatcagggagttaggtaactgattcccagcgctttctcattccattcgagcgcgtcaacaagtctatcagggagttaggtaactgattcccagcgaatcgatttacgcactgccaagcgtggcaagtctatcagggagttaggtaactgattcccagcgctttctcattccattcgagcgcgtcaacaagtctatcagggagttaggtaactgattcccagcggtcattcggattaccactataagcacgacaagtctatcagggagttaggtaactgattcccagcatctgatgcgcttgagcgtctcgttccgcaagtctatcagggagttaggtaactgattcccagctcgtttacgctactggtcaagttgccagcaagtctatcagggagttaggtaactgattcccagcttgtttattggcatcgcgcagaccacggcaagtctatcagggagttaggtaactgattcccagcattaaaatatgacgtaccagtcttgtcccaagtctatcagggagttaggtaactgattcccagcacagcagtgtagtcatacccagcctgagcaagtctatcagggagttaggtaactgattcccagcgttatttcgggtattggcgtcgcatacgcaagtctatcagggagttaggtaactgattcccagccctatgacctgtggaatacctctgatgacaagtctatcagggagttaggtaactgattcccagcgtcttggagtgcttgtctgagtcgttggcaagtctatcagggagttaggtaactgattcccagcttggcacggtgacttcgccgcaggtatccaagtctatcagggagttaggtaactgattcccagcccagctgtaatactgtgtgtctgtctttcaagtctatcagggagttaggtaactgattcccagcatgctcatgatggtttcctttcaaaaaacaagtctatcagggagttaggtaactgattcccagccacgaatggtgggcgtgagtatttccagcaagtctatcagggagttaggtaactgattcccagctcgaaggcttgcaaaccggattttccggcaagtctatcagggagttaggtaactgattcccagccccatctagctgtccgggaaaaccagaccaagtctatcagggagttaggtaactgattcccagcttacctctacgattgctaatgttagagtcaagtctatcagggagttaggtaactgattcccagcgttttcgctatccgactctacgcggcaccaagtctatcagggagttaggtaactgattcccagctgttttctgtgcgaatgtaatcaacgttcaagtctatcagggagttaggtaactgattcccagcctttaacaccaatccacattttaattaacaagtctatcagggagttaggtaactgattcccagcacgtaggactgccagcactagtgatgaacaagtctatcagggagttaggtaactgattcccagcaatgcgttgcagctgacgcctgcgtcgccaagtctatcagggagttaggtaactgattcccagcgagccgcgcatcacaacgcggtcatgcgcaagtctatcagggagttaggtaactgattcccagcaacagtcttcaccatgctcgatccgatgcaagtctatcagggagttaggtaactgattcccagcttcgaaaatcgttcatatcaaagctcggcaagtctatcagggagttaggtaactgattcccagctaaaggcgtgcaaaactcggcgcaagcgcaagtctatcagggagttaggtaactgattcccagcatgtccccgatcttaagagcggtgatgacaagtctatcagggagttaggtaactgattcccagccgttgtcggtgatgcgttcggcgattgtcaagtctatcagggagttaggtaactgattcccagcttgatctggttggggtggtcgatcacgtacaagtctatcagggagttaggtaactgattcccagctttcttgcaaatgttccttttctgttctcaagtctatcagggagttaggtaactgattcccagcgtgccgcgacgcgggagaatgacaacgacaagtctatcagggagttaggtaactgattcccagcgaatcgctcgagggaggaatgcccgcgccaagtctatcagggagttaggtaactgattcccagctaggttgaataatcatattttttacattcaagtctatcagggagttaggtaactgattcccagcttacttcgattcttgagcaggtcaaagccaagtctatcagggagttaggtaactgattcccagccagagcccatgaaattaaaacacgttcgcaagtctatcagggagttaggtaactgattcccagctgccccaccagcggtagagtaggctagacaagtctatcagggagttaggtaactgattcccagccttagctgttttacctgacgaagtgccgcaagtctatcagggagttaggtaactgattcccagcaacggcttcttgacctacctgccgcgcagcaagtctatcagggagttaggtaactgattcccagcgacacgccgtatagcttataactgtacaccaagtctatcagggagttaggtaactgattcccagctggctgctgctggaaataaacgagagtacaagtctatcagggagttaggtaactgattcccagcggtacagaatacctttactgtgacgtatccaagtctatcagggagttaggtaactgattcccagcctattgaagaggagttgcgtaaactagccaagtctatcagggagttaggtaactgattcccagctctgattcattcctaaaaatttagcgatcaagtctatcagggagttaggtaactgattcccagccgttacacagcctaccgtgcagcgctggcaagtctatcagggagttaggtaactgattcccagcagaatttggagcgcgcggtagacggattcaagtctatcagggagttaggtaactgattcccagcccaccgaatccggcagcgagatcagcgccaagtctatcagggagttaggtaactgattcccagcagaactacgcagcgatactcggcgagtacaagtctatcagggagttaggtaactgattcccagcctgttactacgcctatgatcttgaaatccaagtctatcagggagttaggtaactgattcccagcgctatcgctctacccttaccagaaaaaacaagtctatcagggagttaggtaactgattcccagctcagagattaaggctgcagcgccagccgcaagtctatcagggagttaggtaactgattcccagccgtgcgctcagtctcccactcctcataccaagtctatcagggagttaggtaactgattcccagcttaattatctgattgtgcgcaatcctgccaagtctatcagggattatgcaactgactcggaccgtgtcccatcctatgcagaccacaatactctgcagtggctcatccaaccactcgacaccaccaaaacagaccgagcactacattcacccgatacctaccccactacattcactcgttgagcaagtaccgaatgtacgtctccaacgacccatcggcgattgctgcatcaacttcatcttgcacagccggattctcaatctggaacaaatacgtccagtccgattctttgctgccttgatacgcgagcacggcttcgccgtcttcagtgccttggtgtccgatcactggctcccagccacaagcgcgcaccgcctcaaaaatagtctcaagacggcgttcatagttgggagtgaaacgctcgccctcccagctccacgctgctttttcgccgtcgggctctcttggaaattccttttctttcacgtcactcacctctcctgaactgctacttcttcgaaaacagcaataatgccacggttgaacgcatcaatatcgcgcggactgcgcgagctcaataaattcccatcgcgatgaaactcggtgtccacccagtacgcgcccgcattaatcagatctgtacgaatacgcgtagtagacgtgagcgttcgcccagccaaagtacctgtctcgatcagaatccacgcgccgtggcaaatcggcgccactggcttgcccgcatccataaaggctttcacaaaagcctgcgccttctcattcgtgcggattttatcggaattcaaggttccgccaggtagcacaagccccaagtaatcgcttggatcagcttcgtccaaagtcagatccaccggcacatcaatgccgcgatcccagtcccctaccaagccagtgatcagtcccttttcctccgagacaagcaccggttgtcctccggcttcgagcaccgctttccagggttcggtgagctcatcctgttcaaagcctcgcttggctaggaatgcgatcttgtaaccgtctaatccggccatcttgtccccctcctcaggtttcgttgtcaggcacgccttctggtggacgacgccgcacgcttaccgacgtcgcgtggacgcaacacccgtgcttaccgacgtcgcgtatgtaccagggcaaacgcccaacgcacgacgccgaatcccacgcggacttcgcagccccggcgtcgtccattcaattcttactgccactctagtgatcctcgcgttgcaatgccgcgctttttcttgccagcgaacacgttgataccaactgcccagatttagctacgaaacaacgcaactatcccaacctgcgattgccgcaaaagcttcccagtaatgactctgggggtagcggctaaataaaaagccactgcccccagaacagtcccatacagaccagagttagctaatctgcattacttgagatcatcggccgtgagatactcaggaatccatgtgcagttaatcggcttagctgcagcaggattgagagcattgagactcaactggaaagcaacctcgtcgtacgtcatgttttgatgtccatgagtatcgagcgggcacacatcctgaacgttcatattggttacgttcggtgcagccggcaaatatgacctcgtatgcggcgtgatcatcgtgtcaaacacagttgagactactgtgtatttaacatctggatacgtcatctgaccagcattgagctcagtcatgaactgagagccaatgagctgttgcagaagtgcctgcgagttatgctcattgagcatcttcgtctcgatattcgggaaccattcgaggagctgcaagatgagtgcatccatgcccatcatcgtcgtgccagtattggaaggcacgagtccaacaagcttgtcgaccttcttgtctccgccataccacttgatataggcgcgtggaagtgcgccgccaccttgggaatgaccgataatatcaatcttctcagatcccgtagcagtcagtacccgatcgataaatcctgccatgaaagcggcactttgcttgatatcgcccataaacgaggcaacatcgttttgcgggttggtagatgggttgtagttaaacgtaaacacgcaatacccagcttgcttaagccgtggcgagaaaaatgcccatgcggtatatgcgtcatttccagtgccaggaatcaacaacactggattcgtgccaggagcaggcttacaggtgaaatcattagcaccgagtgggttgagacccggcgtcttatgagacagcatctgtgcccctacaaaggtgtggcgatcaggaccgaagccatttgccggcacaccaccaggactggtgagcgcttctactcctccaggattctcaggtgttggttcagccgcataagcaacagctccggcactaaagctcagtgccagaaccgaaacggcggcgcaaatttttgcatgaaacttcatcgttctctccttgtcactcgaaattgctgtaccttcgagtgatttcagtttagttcagattttctaggtcgggtagtagcagttcgccaaattccagacattgctcacatattgcattttctaacaatcagaatcagccacgatatgagacggttgggtgcgccaacgtcgtccgtcagaacctcgtccaacagaacctcgtccgtcagcgcgcccaaccgcagcatttaccagaaggtaggattattcaactgaataggcaagtgtcgctttcgcgtcgtcaacagaatcggcaacatataccttgtaagctcccttgagcacgctataggcatgcgtttgcacgtcccagacactcagttcttccgcgccaaccttgacagtcacagtcttgctctcccctggtttgagcattactttctcaaatccaaccagttccttcggtggagtgggcacgctcgaagtacccggtttgccaacgtagaactgcggagtcacagcacctgccatcgaaccagtgttagtaaccttcacgctcacttcaaaggaatcctcctgcgagcccgctaccttcgaaattgcggcatcactgtattcaaaagtggtgtacgaaagccccgaaccgaaagtaaacgctggcttgagctcacgctggtcaaaccagcgatagcccatgaatacaccttcggtgtacttcatattaaatccagcatttgctcctggatactgatccgaggtttccagtgccttctgcccggcagctgggaacgtcaacggcaaacgaccagaaggattgacctcgccaaatagcaatcctgccgttgcctcaccaccagcctgtcccgggtaccacacattgagcactgcgcgcacgtcattgatccacggcatgagtaccggaccgcccacctgcatcaccacgattgtgttcttattattggcagcggcaatctgcactgcattgttttcatgcggcatgaaatcaagattgagtcgatcaagcagctcagaagactgttgcgtcggcacaacgatcaccacatctgcgttctttgcctgcaaagcaatcccgagcggattccactcagacacccacgaaacttcgctattcggcaggcgcttcttgatcgcgtcaagagtcgaaaccgattgcaatgcctcggtgttcgacgatcctccaccactcatctgcgcttttgcagcatcgccgaccaccagcactcgcttcacatcggttccaagcggcagcacgccgtcgttcttcatgagaatcgagccttcttgcgcaactttcagggcgacggcgtcgccacgacttgcaggaatagctttcatatcgcgagcgcggtcgccgcgcgcagaatcccactcgtggtcaaagagaccaaagcggaacatctgcgtgagagtttctttgacgcgcaatcgaacgtcggcccaactcatctgaccattgctgatcgcagtgcggatttgatttggactcgtccagaacgaccacggtagctcgatatttaagccgtcgcgaatatccgttggcgaccacgcagccggataatcagtgagaactaatccgccaaaaccatgcacaccacgcaggtctttcttcaaagtgtcctcagatccacaggcagtgtcgccatttaccttgttatatgagcacatcactgctgctggttgcgcattgtgaatagcaatcctgaatggccgctcgtaaatctcatgcaaagtgcgctcgtcgatatccatactcgccaacgtgcggttcaaatcttggttattcgccacataatgcttgagggtggacataatccccacaccctgcataccctgcacatttgcgcttgccatccggccagaaagcaatggatcttcgccgaagtattcaaatgtgcggccgccgagcgggttgcgcgccagattgaagcctggtccgaacaacagatcttgaccacggtcttttgcatctgcaccgatcgcctgcccataatcatgggcggcttttacatcccaagtcgaggcttgcacgattggagctggcatctgcgtggctggctcaccgtttcgcaatccagatggcccatccgacatcacgaaagcaggtactttcagttcaggaatcggcggaatatagccaataaatcgcggccctccctgcggcgcttgcccgcccgtgagcattccttgtccgtgcaacatatgaatgagttgatcttcattcatcacatcaacgagcaactcagccctttgttcaggcgttttactgctgtctaaccacggcatatcctgttgagcagcagcaacagacggcaccaccatgagcgacagcgcccccacaattccagctacccgtacaagcagtcgattcttcatcgattcactcctattagctaaaatcaggaatcatctttgatacctaaaactacgtgatacataaaccacgcctgtgacctaagttaccccaattttgacacctgttcaaaatgtagtcaccgaatcaaccaaaatataagcaccacacataaacaaaaaacgaagtgggcgaaaacggccggttgctttcaccagcagttttcgcccactttacgaaattcaggaagctcgactagttccgagccgcagatccatccgtgtaatctgcgtccttcgactcccatgcaaacatcttgcgaag

SEQ ID NO: 3857 - DNA, 6291 bp, synthetic construct
  misc_feature 1..6291: note = Synthetic
  source 1..6291: mol_type = other DNA
ggagcctctctccgaagggccctggcccccggccggaacgtttcgccctccggggacgaaaggctgcccgcttccggcggagcccgcgggcgcagagctcgccggggcaaacctcgggcgtgaagactctggcgcggcgccggccctgaaagcggggccgggcgcggcattcgcctggtcggagcgatccggagtctgctgctgcgaactcagcgactcgggcggcgcggcgtgcgcgccagagccgtttcttctcctcgaggaacgcctcggcaagcgggaaatggtctcgtcagccgagttcgagctccggtcagactcgtcggagtctccggcggaaagcgatcctcccgcggcaggcgaattaaccgaggaattcgaatcgtcggggaagcgggtgtcgtcgggtgcctgcgaagagtcgagcgcgtacggcgaatcggacgaatcggacggcgacgaggcggaaggcagaagggtggcatcgacgtcgatgtcttccacccagaagttccagccagcgggagccgggccccaagcgggatcgggcctccaaccagcaggaggggtccacccgtcgggcgccggcggccagttcggcggtgggttgaatcttttggacatgagcaacactcctgtggtgcgtgaaacgacgatgccattgtcccacgccctcccccacctgccgccacccacgtccacggtgcgaaacgcctcaagtttgctttgttcataagcgaaaaccattggcgatcaagggccctgacgacgccgaaaccgctgcgaatcgggcacttcgacgtctaaacacatcgaagcatcctgtggcgccgactgtcgcggacagcacacaactcatctcttactaaaatgcggtcttatcgccgtcgggagcctccgaaacgacgccttcgcgcggcgatcgaccacgactctttgggggccgtagaaacgccgggcgcggagaagctttgcttgccttcgctgttgcgcccaccgccttcgactgccttaactatccttaggctataaatacaaacttaaaatattaagattagtcatctatagatttttacatgttcaattcaaattaataactaatagacacacttacaatacattcacaagcaaaatatattatttcatttgtaaaacaaagaggatcgcaacccacttgacacacatgagccataagtctaaagtttctcccataactgattcccagtaaggacctccgagtttgaggtactgaatgctcagcttatcggctgaatggcggcacctttcggtgccgccattctttttgaaaagcacttgataaaacggctaagaagtgcaagtattttttcatgaacgcaatgaagcactatcatgtaggaattgatgtaggaaccaactcagtcggccttgcagcgatagaagtaaattctaaaggtctgcctttaaatattctcaacaacatggttgtcttgcacgactccggtgtcgatcctgggaaacctagatatgaaactcgtttggcgagttctggatcagcaagaagagtccgccggatgattgcaagacgccgtaagcggctgcagaaactggaccgatacatcgaaacgcaaggatggccgctcatcgacctttcttctctgcctgatccgtacactccatggaagatccgagccagactaacacaggatagacttgaaggcgaagagcaaggtcgtgcgctttcgatagctctaagacatatggcacgccaccgcggatggcgcaacccttacgaagaagtagagtctcttcatctcccgaaagaggcctccaagcaattcaacgatctgaaagaacgtgttactaaagttagtggcgtcatcttcgatgaaggtgccacccctgctgaagttgtttgcaacgtcggactttccccaaatcagcgtttgcgttccgcgccaagtacacagtataaagatggagctattctcgccggagaaccggtgggcggaaagccaaaggaagggctgctcggaggcaaaatcatgcagtccgactacgccaacgagcttcgcaagattggcgtagttcagggtcttagcaatgaaaaagtgaacgagttaatcgatcaggtttttgcttcagaaagtcctaaaggccaagcaggcaaactagccaagagagatgaactccccggccaagagcagtatatccgcgcgcccagagcacatccagcgtttcaatactttcggattgttgcaacagttgcaaatcttcggatacaagaagaggcaaactcgaaacataaacgattactgtcacgcggcgaaaagacaaaggctatcgaattcctgatgtccgccgacggaagcgacggagtgacttggtccgatgttgcaaaagagttgggaatcgagcgtgaatgcttgtctataacagctaaacagggagctgacggagaacagctttcatcatttccaccactaaactcaacaaaaattaacattcttcaaagtaaagttaaaccacttattaaatggtggaaaaaagcatctgataatgagcaagctgccctgatcactgctctgtcttatgcagataaattggccgataatcaaccaggtgcggaaacggttcgacagttcctttcgtctctcgacgagcaattacaagagaaaatagacaagatacctctgcccaaaggacgggctgcttattctgtaaactctctacaacgcctcactagaaggatgcttgaagattccgtcgacctatttgacgcacgaaaacgagagtttgacgtagagaacgattggactccgacgccggatccaatcggcgagccggtcggcaatcctgccgttgacagagtcctcaaaatcgtcaatagatggttgttagctaccacaaggaagtggggacctccaaaagtagtcaatatagagcatatccgagcgggattcacttctgagttccaagctcggaaatacgaaaaggaaaacaaggaaaatcgcgatagaaacttggcgatccttgaggaactctgcgataagtatggcaccagcggcaagattcgtcgggaggacataatacggttcgccgctctaagacgccagaattgccaatgcgcttattgcggagaagcaatcacgtttttcgattgcgaaatggaccatatcgtccccagaaagggacagggatcgactaatacacgtaacaatcttgttgcaacctgtgaaaggtgcaacaagtcgaaatccaacatacctttctctctgtgggctgagaactgcagtatacctagcgtgagcgtcgagtcggttattgacagagttagaacctggataaaggatccagagctaagtccaaaacaatataacaacttcaaaagggatgttattgaaagactccgaaaaactgttgatgacgatgccatcgacaaccgaagtattgaatcggtagcttggatggccacagagctagcagaccgcattagcagtcacttccgcggggccggcacagacacccaggtcaaagtatatcgaggctggctgacatcagaagctcgaaaggcatcgggattcgaagggaaagtcaatctcatcggaggccgaggaaagacacggctcgaccgccgacaccacgcaatggacgcagcaactattgcattaatgcaccaatctgtagcgcagacactggttgagcgggcgagcattcgagagtcggagcgactgcgacgagtcgtctcgagttcctggaaagactacaggggcgcaggtcgcgataagcagttctcttacggctcatggcttaactccatgaatgcactcgccgagctattcaatcgtgcgatcagcgccgataaaattcctgtaactcaaaatctaagattgcgtttaggaaacggcgaagcgcacgatgccactattcgaagccttgagctgaaacgcgtaggcgcttcttggacaatggaggagatagacagagcatcgacacctcagttatggcttgcccttacgcgtcaggcagatttcgacaagaaagatggcttgccgaagaatcccctacgggaaatacgtgtaaaggatcaatggtttaacgcgaaagagaatgttgcgctattccctaccaagtccgctgcagttgcaatccgaggaggatacgcggagattggcaacaccattcaccatgcaagactgtacaagcttccggggaaaaaaccgacatacggaatgattcgcgtctttgccatcgatcttcttagggcacaacatagcgatcttttttcgtctccgttgcttcccgagagcatcagcctacgaacagccgaaacgaaggttcgtagggcagtagaagacggaactgccatgtacatcggttggcttgtggacggtgacgaaatcgtccttgatcctgagaccaaaacgttcaactcaaacaagattggtgagtatctaagcgaatttcccggaacaaaacggtggagagtggacggttttcccgacaaagagaaacttcgtctccgaccacttcagctcgcgggtgaagggctccctgaagatgttagtgctggcaccgaagagattttaagccccaagggaaacggttggcgagtggctataaacgcgcttttcaagtcatcgcagttggtagtggtgagaagaacggcattagggacggtccggaaactatcgcgcagacatctgccgctgaccacaaggctccggggttagattgtccaataggtggcgaataatcgattgctcttcgcttaagggtaagatccaaacggcacggggagcggtcaagattctcaaagatgatcatcctccatcatctgtaccgacagcagacgtggctgtggtgctaatcggaatgtctgcgactttctcagtcgcagcgctccaccgactcctaagcgaagatatagcggtgctcttttgcgattggaaaggagttcctgaaggtgccgctttctcatggagtagccacggcagggttggagccaggcaccgcgctcaagcttgcctttcaattccacggcagaagaatgcatggggaagaatcatccgagcaaaagtcgagggacaggcagcagtgcttcgggagtataatcgggcagacacaacggagcttagatctctcgcaagagaagttcgctcaggagaccctgggaacatagaagcaagagctgcacgcctgtattggcaggcgctctggggcgaagaaagctttcgaagacaccccggcctaggttctggtgaatcctgtagaaactcccatttggattatgcctacactgttctgcggggacatggtatcagagcagtgctaggagccggactatccccaacgattggtctcttccatcacggaaggtctaacaactttgcccttgtcgatgacatcatcgaacccttcagacccgcaatagattcaagcgtctcccgcttagctccaaatgccgatatgaaagaccccgaagtgcggaagcaccttgtcgccgctgcagatcaacgttttctcccagatggacgtagaatcagcgcagctcttgacgaacttgcgcagcattttggtcagtatatagaaggcgagctgaacactcttcccgttccttcttggactggaccaatccggagctggtaatggcggatgaccctatgtggtgcatggtcctctttgatcttcccacaaaaaccgctgctcaacgccgcgagtatgctgctttccgaaatctcttactcgacaacggttttgtgcgtacacagtacagcgtctacgcaaggtactcccctgcaggaatactggcatcgcgtattgtctcttcgataaagggagcagttccccctcgaggggaagtcagaatactgcacgtcacagacagacaatgggcagctacgctgagattctttaacgcgaccgaggaagctgtcgaaaacgaacccgagcagcttgcctttttctgacgtgaaacaagccgatagccctctctacacaaggaaaaaccgtccccctgaagtctatcagggggacggagaactgattcccagccggccgtgcgtgcgggcggcggtcaccggaagtctatcagggggacggagaactgattcccagccgatctcggcaggctcgggcgcggcggcgaagtctatcagggggacggagaactgattcccagccgggctttggtggtggcttggtcgcggcgaagtctatcagggggacggagaactgattcccagcagctcgcacccgggcggcagcgtaaacagaagtctatcagggggacggagaactgattcccagctg

SEQ ID NO: 3858 - DNA, 4198 bp, synthetic construct
  source 1..4198: mol_type = other DNA
  misc_feature 1..4198: note = Synthetic
ctggtggctgaaaagaattttcgttgttttctggtctgggggcgaagccgaaagcgggggtggtgtggtccgtcgtgccgtgtcggcgttgtgagtgtcgcgcgctccgccgcaagcgtggagggttttgtttttcttggtagcgtttatgtcgaggggtggagggcgtgcgggtttgggtgcatggcgacgtgccgtcgcgccaaatgttgttcgcgaaaatggctgtcccatgtacgatggttcgcatagtgggaatgtgaagggctggtttaaacggtcgacgcgcgtggttggggcaatcctcgccgtcgatttccggttggatttccagggaaactggtgcggataggattttccacctgtatttgtttcggtggattgttaaaatagagcgcaaactactttaatgaaaggaattgagatgaaacaacatgtcaacctcaagagcaatggaaagcatcgcatcggcatcgacgtgggcctttattctgtagggtttgcatgcatcgaagtcgacgagcggcgggccccgaagcgaatcctcaattcggtggtctacgtccatgatgccggggtcgatccttctgcccaaaagaccgggattacgaggcgtgcggtgtcggggcgggcgcggcgggcgcggaggcttgtgcgcaataggaagaagcggcttggggccttggattccctcatcgaaagtctcgggtggccgttgccgagccttgaggatttcgagaatccctacgagccgtggctgactcgcaaacagcttgtcgaggaacggctggagggcgaggagcagaaggaggcccttgcgattgcggttcggcatatggcgcgccatcgtgggtggcgaagcccgtgggagcgaccggagtcgcttcttcgtcccgctccggaatcggagtttcttgccgacttccgcgcgaaggtgcttgagcgcggtaccggggagccgcttgaggagggcctgactcctgcccaggtggtgtgtgctctcggtttggacgatccgttgggggcgacgaaggtccggtttcgcggtgtcgagtcgaagagccccgacgtgcttgtggtgccgttgcagaagcttcatcagagcgacaacgcgaacgagcttcgcgcaatcggcgcaatgcaggggctttcggatgaagtggtcgcgaagctgatcggggcggtgttcagggccgatagtccgaagggcaaggcgggggagcgggccggtttcgacgccttgccggggcaggagcggttccggcgtgcggggcgttggtctctcgcctttcagcagttcaagatcgtgtcggttgtcgcgaatcttcggattcgcgatgccggaggggggagggttctttctgccgaggaaaagcggggcgttatcgggtatctgatggcgagcgacggcaaggagcgtgtcacgtggtacgacgttgccgaggatgtcctaggcatcgagcgcgaggatttgcttggaacggcgtcgctgtctgccgatggcgagcggccgtcggcgaatccgccgacgaatacgacgaacgagcggattcttgcgtcgaagtcgaaggccttcaaggcgtggtggaaggctgctggcgacgacgcccgcgaggccatgctcgctttcgtttccaatgcggacgagatggacgaggaggctccgggggccgaggaggctggagcctttcttgctgaagcgagcgaggacgatttgggggagctcgacaaggttgcccggtccttgccgaaggggcgtgccgcgtattcggtggattcgttgtcgaagctgaccgcgtacatgctcgaccattcggttgatttcttcgaggcgcgcaaagccgtgtttgaggttgggaatgattggcggcctccggccgatcctgtggggatgcctgtcggcaatccggctgttgaccgggtgctgaagatcatcgcgcgttatctgaaagcggcggagcgcgagttcggaaagccggtcgccatcaacatcgagcatgtgcgcgatggtttcggctcggtgaagattgcgcgcgagtacgaggctgcgttgaagcggaggaatgcccgcaacgagaagatggtggacgagattcgcgagcgtttggagattgaagggccgtcacgggcggatcgtgaacgttttgcggcggtgaggcggcaaaactgccagtgcttgtactgcggcggagagattggtttcacgacgtgcgagatggatcatattgttccgcgtaaggggcgagggtcgacgaatacgcgcgacaatctcgtcgccgtttgccgcgactgcaaccagtcgaagggaaagattccgttcgccgtgtgggcggcgggaacgacgcgggcgaatgtgagccttgagggggctcgcgagcggatcgattcgtggctcaaggacgacggcatgagcgcgaaggagtggaagaactatcggcgcgccgtttttgggcggcttcgcaaggcgtccgctgacgaggaagtcgacaatcgttccatcgagtcggtggcctggatggcgaacgaggcgcgtgcgcgaattgcggcggcgtatccagaagcggaggtgcaggttttccgcggatctttgacggcggctgcacgcaaggtttccggttttgaaggcaaggtgcggctgattggcggcaacgggaagactcgtctggaccgtcgccatcatgcgatggatgcggcgacgattgctctcatgcggccgggtattgctcatgttctcgcgattcgcgaaaacatgcggatttccgaacgggtgagcggcaacttgaacgactggagcaaattccggggccatgacggtgctcagcgtgcgcatttcgaggaatgggttggccagatggctcgcctgcgtgagctgttcaatgcggcgcttgagaacgacgagattcccgtgatgcggaatcttcggctgcgcttggggaactcgaaggcgcatgacgataaggttcgtccgatgaagaagaaggccgttggcgcttcctggactcttgacgagattgatcaggcggagactccggcattgtggtgcgctctcgtgcgctgcccggatttcgatcctgcgatggggcttccggagaatccggggcgcgtgattcgcgtgaacggtacccggttttcaggtggcgacgcggttggcgtgtttggcaagaatatcgctgcgcttaaggtgcgaggcgggtgggtcgaaatcggaggaacgattcatcatgcgcggctgtatcgaatcgaggggaagaaaccggcgtatgcgatgattcgagtgtttgcctgcgatcttcagcggcattgcgacgaggatttgttttcggtggagcttgcgccgcagtcgattagcatgaggactgcggaaccgaaacttaagagggcgcttgccgaggggcgggcagtgtatcttggctgggtcgtggtgggtgacgagcttgtgcttgacttgtccgatcctgttttcgataaggggcagattggcgctttgaaggcggagtttggcgggcagtggccattgtccgtgtcgcattggaggattgcaggcttttttagtccgtcgagatttcggttgaagccggcgtttttggctggcgagggtctccgaaacctcccgcatgaagtcgacggggatgttgccaagattgttgacgggcaaggatggcttccggctgtcaatatcgtagcgggcaaggcgggaatgagggttgtccgacgcagcgcgcttggccgggagcgttggggttccgattccggtttgccgagctcgcatgtactgacgaagagctaaggcatgtccgcgcgttggcgagttctcgattgctcccgcatggagggggttgtccgggcgcgccgcggggcgattgcgatcgagcggcccgggcatgatcttgtcgaggtgcctgttgcggatgttgcggttgtgcttctcggccagaaggttggcgtgtccggcgcggtcttgcatcgcttgctctcgaatgatatcgccgtcattgtctgcgattggaagggggtgccggaaggggctgcctattcgtggagcgagcatgggcgcgtgggcgcgcgaacgagggcccaagcgagcctgagccttcctcgccagaagaacgcctgggggcggattgtggcggcgaaggttctggggcaggcggcggtgctcggggaatgcgggcgtgatggcgaggcgcatcttcgcagc

SEQ ID NO: 3859 - DNA, 22919 bp, synthetic construct
  source 1..22919: mol_type = other DNA
  misc_feature 1..22919: note = Synthetic
gcttctcctctggaacggaagaacacgagcagcacgggccacattgccgtgatcggatagagcttgaccgtcttgccctccgtgctcgtcagctcgaagtccggtgcagtcgaagtcgttgtcattgcgtgcggcccctctttccaatacggcctgcgaatctctgatggcgccgattaaacacggagtggcgcgtaatccaacaaatccgcctgaaactgcgcaattattgtgcatctcgccgtggacctagggtggtgctcgtggaacgaggcgatcagaccgatacgctccagtcggagttccgggacatctttgagctgttccggtacttcattgaagttgaccgcgaaatctatctcgcaaacgaggtagaggtctgctccagtaatccgacagtagtcacggttcaggatgcgtggatctgggatgaccggcgcccgcatcgattcgtctccaaagcagaggttcgcaccgaggggccggtccgcatcgaggagcttgctcacccacagcgtgagcttggccgcgatgtgatgaccgcagcgggcggcgagcagacttctacttcggtaggcagcgaagaacctggctcagaggcctagctggccgagcttgcatcaggcgcaattggcgccttagtgatacgcgggcgctttcgcagcgcactcctagcgcctacttcgcgcgcttctattgagcggcgctccgggctactttcgcggctactgccatgatcgtttcctgggggttgacctcagggcagcacggcaagatactcgcgtcggcgactctgagatttggtataccccaaacccgcccaccggtatccacgaccgaaacctctgggtccgctcccatgcgagcggtgccaacgggatgaaatgaaacgggcttgaagtacgcgggctcccagcgcagctgagaaagggcctctgcctcagcaaaactggtcacctttggcatttccttgtgcccagtgagaacagcgcgtgccccagcggccaggaggattcgcgcagattggaagactccgaacccgagcgcagtcacgtcgtcggggtggatctcatagcgtgggcgcaaaccactctcgccatcggcgatcaagtcgccttcgcctgtatcggcggcaaagaccgcgacgtaggccatgcgcgaagtgtccaagccggggctcatctcgggaattagtgacgtcgcctcgatcaggactccgtgtgattcggcaaagtgatcgacataccacgtctgaactgctgccggtgcagagctgacgtcatcttcgaatacccctaccacacctgcgcacgggtgaatctgcaagtggcggccgacgtgctccgggttaccgagatctgccgtcgccatgagcttgggagtgtgcaggtatccagcagccaggacaatgtcgttggccgtgaatttgactgctcccctttcgcggccgttggcgtcgagcaaggtcccacgaacccctccagcccgccccgaatccatgagcaagctgtcaattcgcaccctctcgatgaccttggctccgttgagccgcgcccgaggaaggtaggtcagatccacagactgcttggcttcggtcggacaaccaagcacgcatatgccgctcccctcgcaatcgactaccgaacgtggcactggggcgctggtgaaaccgagggccttggcgccatctcgcagcagctcgccgtttctcccgatcagcgcatcccccatggggtgaacagacagaacctcttcgatctcaatgaattccgccgccatctgatcggcggagagatgatcgagcccccaatcaacccaacgatcgaggactcgcgatggcgtccgcatgagcgaaccgcatccgatgaatgtggtgccgcctactgcgcgcccagtcggaatgtgtatcggaacggaaccgtcggcaagcgtctcaacgccgcttcgccacagcttctgaattctcgcttcgggatcgtcgccgagatctttggggctgctcagtgccccctcttcaacgaccgtgaccgaccggccggcctctgcaaggatcttcgccgcgactgccccaccggcgcccgagccgatcactagcacgtcggtctctaggagggcaccgtcttcgatctcagggtatgaggtcgtctcgagcacaatgcgcgagcatatcgtcttggcatccacattattagggagtcctgatgcctcagaaccccactcgcatcgcgtcggaatgggcggcccaagtcacatttgaagacctgccacctcacgtggtcgagaagaccaagcttcaggctgcatcggttctcggggcgaccttctccggtctggccagctcgaagattcgagcctatcgacgggcagcagcgcggtggggagccggcagtggtgattctgaactcgcatccatgagcgacaggcttctcatagagacagctgcttcggtggtccacgacttcgatgactacctttttgccgggcacacggggcattccgcaattctgggcgcacttgctgtagccgacttgcttcactccgaaggcacagcggtgagcgggcaagatttcatcacggcggcggtggtcgcgaacgaacttggtggccgcctaggggcatcgatgctcttcggacctcacaacgggcagatgtggagctacatccacctgataggcgcaagcgcagccggggcgaagctgcttggtcttgacgcaggtggcatcgaatcagcaattggccttgccttcagccaacccaactacccgctagtggcgaccttcatgggctctgacgccaaggccctgattgctgcgcagcctgcggtcgacggagcgcacgctgcggtcctggctgccgaaggactcaacggtgcccggggaattctcgaagaccgaggcggcttctgggcacggttccacccagacgccatggcgaaaatgttttctggatttggtgaggcgtggctcaccagctcacttagctacaagatctatcccggatgcgcctacatcgacaccgcaatcgacgcactgttctcgatcatgagcgacttcgaaagctcggaaggcaaagcacttgaagctgacgacattgacggaattgccgtagaagccggaatgctgaccgcgggcatggaaaccatgtcgggctggtatcggggtgagcacatctcgccgatgaatgtgaacttctcggttgccctctcggggtcggtcgcgatcctcgcggggcgcctgactccggctgagttcgaacccggcttctatctcgaacgtgaggatcaaatcttgtcgctcgcgaagaagtggcgcatcgatacatcgcgagagatgactgatgcgatctcccctgagggctcggcgtttgacttgcgcaagattcttcgaaagccggacgacgcgctcaccggggaagatttctcgcgctacgagtgccgctttcccgcacgcgtcacactcacgacgtctgacggaaggaagttcactgagctgtccgagattcctctcggcggtgcgggacgaccaggagatgaaactcgccgacttgtcgagtccaaactcgccgaaggcgtagctttttcaggcagcggggagcgcgcatccgagatgattgaggcggtcacgtcactcgaaatgctcgatgacgtgagtgggactttgcggggagcagctgggagatggccgaactgaacttgcccgaatgggtgctcgactcgatcgacgcatacaccacgggtgaactaactaccgcagccaagtccggatacccgtcgacatttccggtcgcggtggcctttgatcgacccgcaggcatacttgtgacgacgacgtcggttggctttccggccaaggccgccaatattcgccgggatccccgagtcggaatcaccatgggatacaccgtgtcttcatcggactccggggcgggtgcagtccatatacaaggccgggccgaagcggatgaccgagacttcgatatgaacttgatgtctctcgcccgctatccgtcgctcaccgagatccagcccgggctcaagcggcgcatgcggaatccccggtggcgcaagctctatcagggctacttgactcgggtgattatcacaatcacgcctgagcgcgttctcgcgtggcgagacccggaatgcggcgatgaacccgaggtcttcgaatgccgctagaaggccaccgaagcccctcggtcccgcaaggaccctcagcgccagcagcgcacccaggccccgccgcgcacccgggtccctcagcgcatccgggcccctcagcgcatccggcccccgccgcgcacccaggcccctcagcgcacgaagaccgctcatcctcagctcatctcgctggccccctgaggcgtcgggcaaggcggatcttgcgctccgttgaccgtgtggtcctcaccagtactgactcaaacggccggttcgtcaccatgccggtgacaatcgaggcgactggagccggcctcgtcgcagtgcggctccccaatgacagctttcccgccagctcgaccaaggtctgtctttgcgcgcaccagcacggccgcggatacgagagcttcaagcaggtcgtgatctacggcgacgcacaggctcgcggacgagaagttcggatcaggcctttcaaggttctcgtctccactcgtccaccgggaatcatcggtgagttcaagtcgggcgcggaatcttcacgccgcagcactgccaacttggccaagtggggacgcgagcccgtctcgatggatctgctcaaccgagccttcggatccggctaagcccgctctgaaaaaccccacgcctacgcggacagcaaaacgggtaggcgcgcgggcagctacgcggacagcaaaacgggcaggcgcgcgggtagccgcgcggtcaggccgcgcgagctcccacttcatagacacgcccatcggggctgatgaatcgcagcccgccgggaatggatccctccaagcgccacccaccctcatgtatcaagtgatggtgcgcgaagcagatcaatgcgagattgcgtaagaccgtcttgccgccatcggccacatgaatgacgtgatggatctcggtaaaccttgtcttgtcgcagcccgggaactgacaagtcttgtcacgggccctaaccactctcgcaagcttctcgggaacggaccgtgagttgaccccaagagccgcaatctggccctcggaatcacggagcacgagctgcatagtcgagtcacacattaggcgccttgccacatcaacggagcagaagccatcgccgacctcgattgcgcctgcggcggcactgatctcgcccacctctgctaccagaattaccgctgctcggccgatggcgccctttgattccggttcggctgacgccatctccatgagagcgtcggcacatcgcgcagcgtatggggtaggcgaattcttgtcgtagagcttcttagctcgccgggctatggcacttgcgagcaattcgccatcggctgcaggaagtacggctcggaagttgatgtggcggcggtcttcgtcatagaaccacttcacacttcgctcttcatgagacttgcgagcctcccgcgcggaaatcgcccgctcttttctggcgacactcgcggcgtgatcctcagaccagtccttggcctggttggctaggtcaccgtctcggtcaggtgttgcgaacttcactagttggcgggcaacctccaatgagatctcgccaaaggagaatgcctcggcgatttgtggcaactcgcccagcgcccttgacatgtcggtcatctctttggcgcgcctgcgcgatatcccagtctctcgcgacagcagatcttgggaaacggctgattcctgccctgaattcgaacgggccttgtcgagcgccccaatcgcggcaaccctttcagcctcaaggcgcgctatcttgcggtcaagaccgccaatgtggctcaccagagcctttgtggaccacgaatcgaagttgaacatggcgacgtcccaacagtgcgcagtacgcaaaccgtggggttctcctttccccatttcccaatctccccagcccgagctggcttccccggccggctcccccggcatcgctcggactctcgaaatcgaccgccttcaccagcccagtcgactctggaaaccgaacatgtgttcgatcctatccccacatatcggacgcgtcaacataaatatcgactatttcgtaaatagtgcaaactacctagacaagactggtggtggccgacgcggtggcgaacctggcggcgcccgcgcgcctatctcctacccggcaggatcgaaggtaccggagccgcctgactccccgccatcccccgaatcgcccgaaccccctgaaccgccagacccagagccagacccagaactgccagaactaccagaaccgccatctccgtcgtgccccttgccccccttgccccccttacccttcgcgccaccggggcctttaccagccggtcggccgttgtcgtcaccgttgtcgctgcccttgttctgcttcccctgggcacgagcggccttcctggcagcattacgagcatgaacctcacgagcgcgagcgattcctcgcttccgagcggcctccggtaccttgacctccaacgccttgaacttctcctcaagacgcggcatcgcttcgtcaagggccttggcaacttgctcgtcaccctcggctgcggcttcgacctcctcgatgtcagatgagtagccatcgatcaattcgtcagcggtgccaaactcgccatgcccgaccgcttcgtcggcctcgtcaagcttcttctcggcactcgccaaccgctcgatgttcgcgccgaccagcaaatccgattcggagtccgtggtggatcccgccgagcccagcagagctgcgacacccaaacccaccaagaggatcaacgcggcggcggctgcgacaagaaccacaatcttcgaatctgaaggcttgccacccgagccacccgagccacccgtgccacccgagccacccaatggtccagctacacccttttggcccgaaatcacatccacctgctgactcaccttcccccagactcgctcggcagatccttcaggcggatgagcctcaagcgcggccttgaactcaggccccaccggctcgaaagtcctgaaactatcgctactcatgattcacctcgtaactggcgaagagaagggtcctgcctcaggtttgacagtgcccggaactgaagctgcttgattgcgttgggggtccgctccatcacgtcggccacctgatcgattgacatatcggcgacgaagcgcagcaatatgcaggatctttgagcttccggaagtgcggcgaccgcgtccgccaagtcagatccggagggcaactcggccgggtcaatgacctcatcggcctgatctgcctcggcctcatggagatcgacgggatcgacgagctgctctctagaaccggagtccttgcggatccgatcgatgaggcggtggcgcgcaatcctgaatacccatgctgaaaaggcgccttcataggcgggctcgaatatcttgagccccttgaagaccgagacgaacgtctctgcagcgatctcttcgacgtcttcggggcgtgccgtccggcgccaaagaaacgagtagaccttgggatagagggtctcgaaaatctccgcaaaggcggcctcattgccccagcgagcagccaatgcgaggtcgtcgagcctgcggtagtcacgggcagaactgacggtcccacctccgatgcatggcctgcatatgtttcaaccgattcatccatcacaccgcttcaaccggtgcgagggaagaaaaggttacgggtagtggcgaaatgcgcccgcaagaatctcttggatgcgcggggcgaggtcatcccacgaagcttcgtcacccttggtgatcgtcagctcgctcccatatatatagagagacttgattcccccgagctcgaatatcttcgactcatacccgccgacgggaatcttgggggctccgtcaggagctatttccggatcgaaatagaggcgcccgcccatgcccgtgagccaacgatcggtcgagaaccggcgaacatctggatcaagagtttcactcacagccacggcaacgttctggcccatctactgactcctcccgggggaaatattgaggttcgaatcgcttgtgagtagccgatgataccggcctgctgggcccggcccgctatcccagagcgaggcagcggccgcagtgccgccacagccagcccgctaccccgatcggcagcacgccgttaccccgagaggctcagctgccgagcaccaccggcccattaccccgagaggctcagctgcccagtcgactcaaccttgacctcgtaacgcgtcttgcccagcacctccgccaccggtgcgaatgacttccggtggatcggcgccggcccaacgcgacgcagcacctcaagatgctccgcactcgaatatcccttgtgcccctcgaacccatattccgggtactgctcgccaaaggccgtcatcagagaatcccgctcaacctttgcaagaatcgatgccgcggcgatcgtgacactcaaagaatcgccgtataccaccggcttgacccgctcatcccctaggtaatcggagttgccatcgagcagaatcacgtcgatctcaacgccctcaatggactcgagtgcacgcctcgctgccaggccgagtgctccaacgatcccgaactcgtcaatctcaccctcggatgcgtgacctaccccgcacgccactgagcgctcctcgatcttgggcaccagctcctctcggcgcgccgcatcgagaagtttcgaatcccggatcttgtacatgcgctcgcctgccgcaaagacgcacgccccaaccgtgaccgggccggcgagggcgccacgacctacctcatcgagtccggcaacgtgtctgatcccgctcgcccagtactcctgctcaatcttgagagttggcacatctgggagtcggatcttcttgtcgccacgtacgacgacgttctttcgcttggatgcgcgcagagccatgcccgagactaccaatcgagtcgtcgctcgatcggtctttcggtacgatgtgcgcgccgctcacagccctgagttccgtggaggatcatgagagtcgggaccaaagtcgaggtgcgcagccgcttcgatggctcatggagcggcggctttgccctcgaatccgaggaacgagatgaagccggccgcatagtcgggcgcagagttcgccggctgtccgacggcatggtgctgcctgcagtgttcgacgttggggacgtccgccgggctgaggatcgaaagcacacttggtggcatgggaccggataggggcgacaggccagttcgcgccgatagacagcggcaggccgctcattcggctgcagccgcgcccaaccgtgaactgctctgtagactcccaaaccactcagttgacgctgacacgatcgtcgcagaagtttggaagggtcggctggagcgcgatcggcaacttgctcgccacgtgagggctcgccgctatcgaagctgatgtaacgtggttcttagagattccgcgcaaattgagaacacccgacctggcgcactcgaatcatgctagtttcaagcacggcgtttccatgtagccacgagcacgaattgcgagtggcaatcattcggagcgggaactctgggggaagaaatgctgggacttggcactgccagtctgaagtcagagtacggagaccgcgggtactcttcacacccgtctggtctctcaacaagaacgcctgcgtgcgttagccccgctccaagcgggaataaaaagagcgccccactgggaggcgctcaggacgctccttacggagcggagccttccgcgggattaaccgcttactgtgatgtaagcaccggaaaccgccgctcagatacacgcagtcaccttatcagacatcacgcacctacgccactggcgattgggggagaaaccaatgagtaatccgcaatcacacgaaacgccgtggatcctggggctcgacctgggaacaaattccattggctgggcagctatcggtctcgattctgacggcaacccgtcaagaatcattcgaaccggcgtacgcgtgtttccagccggtactgacggcgacatctccacaggcaatgacgcgtctcgcgccgtggaaagacgagaggctcggctccgccgccgacaaaccgatcgtcgcagacggcgtaagtggctactgatgaagacgcttcaagacgcaggactcctgccggccggacccattgacacgcctcaatcacgcatgtctttgctgcgcgatctcgacagccagctatttgacgacaagactcgaagtgctcatccccacacctgttactacgatcttcggcgtcgcgccctagatgaggagctcgaaccctacgcctttgggcgagccatatatcacctcggccagcgacgcggcttcctctccaaccgcaagtcagctccgaaggacgatgaagagctgggggcagtcaagggcggtatctccgagcttgatcgcatgattcgggaatccggctcacggacgctcggtgagtatttctcgcggatcgaccccaaggaacatcggatccgtcagcgctggacttcacgcgccatgtaccaagaggagtttgcctcgatttgggatgcgcaggagaagtaccggccagattcactttcgagcgagacgcgcgcacgaatagagaaagtgatcttccatcagcgtccacttaagagtcagaggcatctgcgtggcaggtgctcgcttgaacccaaccgtattcgtgcccccaaggatctcctgatttcgcagagatttaggctgctgcagaaagtcaacgacctccgcgtcgttacgcctgacggtgagatccggctgcttgagcccgacgagagagccaaactcatcgaatcccttgaggctagcgagcacctcacattcccgcagacccgaaagctacttgggctgccgcgggggagcaccttcaaccttgagcttggaggcgaaacgcggctccccggtaatcggacagcagctcggcttgcctctgccttcggcgaaaagtggggagaactgaccgatgccgagaaggaagttgtggttgaagacgcccggagcataggcgaccgcggcgcaagggttcgacgagcgcagggcaagtggggactcgatgaagagcgggcaaacgcatttgccgatgttgtgcttgaagaaggcttcatggacctgtcgaggcaggcaatgagccgactcctcccgaagcttgaggaaggagtcgcctacgcgacagcacgcaaggaaatctacggtgacgaatcacgccgagacccccttgaaaagctcccagcgctcaacaagttcgaggagtggcgcggagaaatccgcaatcctgtcgtcaccaggacaattggtcaattgcgcctcgttgtgaacgcgctaattagggaatacggcaagcccgacatgattcgccttgaaatggctcggtcaatcaagaagccaaggcaagtgcgaaaggacatcaccaagaagaacagagccaatcagaagttgcgagaccaggcgcgcgaggagatcgtgagaaacgcgctcattgcggagcccaccaacacagatgtcttgaagtggcagctagcggaagagtgccgatggatctgcccttacaccgggcgccaaatcaatgcaaagtcgctctacagcgactttgacattgagcacatcattccgtatcacaggagtttcgataactcctacaccaacaagaccctctgctaccacgaagagaaccgcaacgtaaagcgcaaccagactccgtttgaagcctatggcggcacgccgacatacgacgagattctaagccgggttgagcagtttttcggccagaacggcgtcgttctcgcgaagctcaagcgatttcgcgtcaaggactccgaagaaatcgaaggcttccgaaacagccagctcaacgacacagcgtgggcaactcgtgttgctatcgagttccttgggactctctatggcgccgattccatgggcgttgatgcaaacggctcgaaacgtattcgcacaaccacaggtgggctcacggcaagtattagaaactcgctcgacctaaatggaattctcgatgacggcggtaccaagactcgagaagaccacaggcaccacgctgtagacgcggtcgcgattgcgatcacgacggattcgatggtcaagcgcatgagcgacaccgccaaacgcgctcctcaaagggaaagcggcatgcctagcctcgaaggcgtgacaccgccatggcccgggtttctcaatgaagttcgagcctcaatcagcgaaatagtcgtttcccaccgaacctcgcgaaaggtgaacgggaagcttcacgaggagaccaactactctccagaagggcgaagcaagggaagcaagaaggtggtgaagaacgctgtcgaattgggcggcccagattcgaaacgatacgtggtacccggaaataaccatcacattgaggtctttgaacttcccaacggcaaatggaaagggcgcctcgtaacatgcctagaggcgatggggagactgcggcgcggggagcccgtaatcgatcgcgaacttgatggcgcccgattcctgttcagtattgcctggggcgacacgctggaactgggagctgacggcgacaacaaggtgcactcggtgattcgcggccttgaaagtagcgaaggggtcactatggtcgatgttgcggacgccaggctgaaaaaggacatcaaggctgctggcgccttacagcggcctcgcttgaatccgatgagacaaagaggctgtcgaaagattcaggttgatccaattggccgcgctcttccttcaaatgactgagcggatcattgacatatcagagcggcccgtaagccttcacgctcggaattcgctcttggttatcgactcacccgatggaacgaacacgatgccactagaggaggtctcggcgctggttcttgcagcaggccaggccacggtgtcacaggccacgcttgcgggcatagcagagtccggcggcgcagtcgtcatctgcaacaagagctacatgccggcagcgatgctattgcccttcggctcccactttgttcaaaccgagcgcctcgctgcacagacttcgatatcagctcctacgcgaaagcggctttggcaagagatcgtcagagctaaggttcgagcccaggcgcatatcctcgaggcagaagctggaagcgactttggactcagcgacctagtagctcaggtgcgttctggagatccgacgaacgtcgaagcacgcgcagctcaaatatattggccgcgaatctttggcgatccgtcgttccggagacgccgcgatgcaaacgatcagaatcgcctcttgaactacggctacacagttctccgagcaattgtcgcgcgagcaatctgtgcatcggggctgcacccgtcacttggcctccatcatcacaatcgttatgacagcttctgtctggcgagcgacctcatggagccatttcgcccactagtcgacagcgccgtttgcgacatctgccgcgcggagggtgcagacgtcgagatttcgcccgtcataaagaagtcgatacttcagtccctatacgagagatatgaggtggcgggagagcaacgcaccctctttgacattgcgactcgcgtttcaaatgccctagctcgcgtcttcgctggcgagcaacggaacttggaaataccgcgcatcaggcccgtagtcgcgagatgaggtcggagtacaaagctatgtggttggtcgtgatgtttgacttgccggtgacgacgaagaaggccaggcaggactacacgcaattccgtcgcagccttctcgccgatggattcacgatgctccagtactcggtctacgcgcgctactgcgagagcgaagacgacgcggcaaaacaccgacgtcgtgtgcgaggatcactacctccggccggccaagtacggatcgtgtcgattacggatcgacagttcgggaagatggaaatctactcagcatttctccatcaagcgcccgaaaacgcacccgagcaaatgcagtttctatgacaccgaaaatggcagagttcctgctaggcgcaagcctcgcaggaactctagtgtatctgagcggcgcttcccggctgaccacagcttctttcccgctccggtagctcgccttggaagtgtatctgagcggcgcttcccggctgaccacagccgctgggcgtcgctggtcatgacaccttctagtgtatctgagcggcgcttcccggctgaccacagccgttgaggtcttcatgaaccaggaaccaggagtgtatctgagcggcgcttcccggctgaccacagcgttggcgaagctgagggcatcaggctcgaaagtgtatctgagcggcgcttcccggctgaccacagcaaagacgacggagcctcgacttcgtggggagtgtatctgagcggcgcttcccggctgaccacagcatttgttacattgtcgtgaaacgcgtccgtagtgtatctgagcggcgcttcccggctgaccacagctgatccgcggcgatgaccaatcaatcctcaagtgtatctgagcggcgcttcccggctgaccacagcaaatggagcgaggggtgaccttcgatttcatgacaccttctagtgtatctgagcggcgcttcccggctgaccacagcaaggtccccgcgtccttctgtgaggtcacccagtgtatctgagcggcgcttcccggctgaccacagctggtccgtggcgatgaccaatcaatcctcaagtgtatctgagcggcgcttcccggctgaccacagccacgacgcttctgcgagctcgaactgcgaagtgtatctgagcggcgcttcccggctgaccacagctggcagcagagattggcccaacaagggtcgcaagtgtatctgagcggcgcttcccggctgaccacagcagatagatgccgtcaacctcgacctgtcctagtgtatctgagcggcgcttcccggctgaccacagctctgaacttctcggtgcgcgttagctacggagtgtatctgagcggcgcttcccggctgaccacagctccatccattcctcaatgtcttcatgggaagtgtatctgagcggcgcttcccggctgaccacagcgtaaccagaaagtgagtaattttgatcagtagtgtatctgagcggcgcttcccggctgaccacagctgcggggcttcgcctgaacgcacaatgtgcgttccagctgtggtcagccggggtagtgaagtgtcaatccgtcctcgctgggctgcgccatttccggtactcagctgcacgaaccgagcgcactttcgctgggtttcactcctcagcgagggtcagttgttgcgcagggtctgtagtatttcgatattcgtgacggcgtcatttcgcggcaatagaagttgcgaggtagatcagcttttcgacccggatcggcatgatcatttgacggcaccgcgtcgggcgcggcggaggacaacggaggaagacgacagtgaagattgccggtgtggagatttccgacaaatcgctcaatcggacgtgccagaagtggaagattcggcaactggcgctctttggatccgcccttgtcggaacgctggcacctgatagcgacattgaccttctcgttgacttcgatacaggcgaacagtggtcgcttatggacctcgtaagggcggaatctgagttctcatccctcttcgcgcgcagagtcgaactggtcgatcgcaagaacttggaacgaagtgccaattggatcaggcgcaacgccatcttggactcagcggtgacggtctatgccgcgtgactcgcttgcatacgtgatcgacatgattcgagccgccgagacggcactgagactgattgccggtttcgatgaatccgaattccttgacgacgagcgcactcgctgggcggtctacagtcagatcatcgttattggcgaggcagcttcacgagtgccgagggacttctgtgaccgttatcaggagattccgtggtcggaggccgccggaatgcgccaccgtcttgttcacggatacgacagcgtcgactggtcgcgcgtctggttgacgctgcagcgtgatctaccgccacttctataccaacttggcaccttgctcccgaacgacgaaaacggagacctgcaagcgttctgacgcaagcatcaaggtcagtattgacatcactgacacctcacggcggcggtagatgccgcttggtaccggacccgcactcgcctgacaggccgaccgaggaggccaccccctaccctcggccacgctccttcaacgcccgggccatatctcgctgatgctccttgtcccgcaaagcagcccgcttgtcgtacttccgccgccccttggctagagcgagctgaaccttgaccaggccatctttgaaatagatcttcattggaaccagcgtgagtccctgctctgccgccttgcccgccagacggtcgatctcgcctcggtgcatgagcagtcgcctggggcgcttggcctcatatgactgatcatctgagaagtcatacctcggaatgtgcgcgccatgcagctgcagctcgccgtcacgaatgaccgcgaacgcatctgccaagttgccctgccccgaccgtaaggccttgacctcggcgccgcttaggacaatcccggtctcgtaagactcgactacctcgtagtctcgaagtgctcgcttattaccgacgacgtcacgaatcaccggaccatcgccagttgacggcaccggagcggctttcttctttgccataggatccagaccctcagccgcgctcggggaaccagagaagcgggtctcgaggttggccattaatccggacttcaaagtgcagatgcggaccggtcgagtagccagtcgatccgacgttgccgatcgtctgcccctgtgtcacctgctgccccgcggatacgccaattcgcgactgatgcgcatagagcgtcgcaagcccgttgccgtgatcgatgatcgtggcaagcccgtacccgccgtagggtcccgccctcaggaccaggccggaagcagccgcccttatcggggcaccgcttggcgctccgatatcaacgcctgcgtgcaacttcttcgcgccggagatcgggtgaacccgcgtcccaaatcgagatgtgagcggaccatcggcaggccacacgaaataaccgggaacaatcgacggattgccgcggctgccctcaatgcccaagtcgcttgccgctcgattcgaggcgccttctagctcatcgagcattcgttgagtctggttcttgtcagcaagtacctgtgtgaggagctggcgctggttctcgctctccgcattggcgaggtctcgagccgcttggttgtccgcgtgcaggcgcgtcagctcatcggtctcggcgtcgatccgattgcgactctcgagcaaattcgctcgggtgtcctccagcagcagccgctcgccatcgagagtgtcacgcaactcggcgaggtgcgctgcggactgctcgtcgtctgccgccacccgattcagatagcttcgcccttggcctagctcagcgatgcttttcgcattgagaaacaggtcgacttcgccgagattgccgtctttgtacatgcggatgatccgcagcgagagccggtcgcgagtcgcgacgtagagtcggtcagcatgctcgaccgcgtcaagcttgtttagatacgcggctgtcgcgtagtccaagtcgtactgagcacttccaaggcggcggcgcgcatcctcaaggcgtgtggtgaggtcggcaacgattgtgttcagctcggcgaggcgcttgtctgattcttgaatcagcgcgagcaggtcgctctcacgcccttgcgcctcgctcaggcggcggcgcagctcggcaatccgctccgaagtggtacctgacggcatctcctgctgacccagcgcggatgtcggcaggatgggtgcaacaagcagtacgaggatgaccggcaaggctgagcgcaacatcagccgtcgcactcggctcatgcctcttcgtctctccacgatgcacgctccgaaccaggttggcagggattcacacccctttagacgtcgaggaagcgtcttagtgctatgccagagccgagaatcccgacaccaatgccgaagactacgagaatgaggccggtctcaattgccgcaccggttccgacggctgcgtcgaagatcggcgccagcgactgcacgcgcctcgtaagcatggcaagcccgtagatgccggcgaaggccagcacgcttcctatgaaaccagtgagcagaccttcaagcatgaaggggacacgcacaaaccagttggttgcgccgaccagcttcatgatgccgatctccttacgtctagcgaacactgccagcctgattgtgttggcgatgagcaacactgcggcaatcgcaaagatcgccacgaaaaaggccatgcccgcggtcacccaatttgtgatcgcggtaagtcgcttgatcgtctgactggcgtattgaacctcgtcaactccgggcaatccctttatctggtccccgaccgcgtcggcctcctcgggatccttgagggtgatcctgaacgaagccggcaggactccaggcccgacgttttcgacgagatctttcttgtctttgaacatctcttggaattcagtcagcgcctcttcctttgagacgtaacggaactctttgacatctgggattgacgaaatcttcgactgaacggcctgtatttgcggctcacttgcgtcatttcgcaggaagacgtttatctcaacgttgccgcgccagcgcccgacaatcgtgtcagtccattgcctgatcaggaggactgacccaagcaaggcaagcgagatggcgacggtgagaatcgccgacgccgccatgaggaaattgcggcggatgttctgaaacgtctcacctatgaagtagccgcctttgacgctcatgcctgggcacccactccgtacatgcctcggtcctcgtcgcgcaccaaatgaccgccctcgagctgaatcactctgcggcgcatggagtcaacaatcgagtgatcgtgagtagccatgagcactgtggtgccagttcgattgatcctgtcgaggaggcgcatgatcccggtcgaagtcttcggatcgaggtttccggttggctcatcgcagagcagcacaagcgggcggttcacaaaggcccgagcaatagaaactcgctgctgctcaccgccagatagctcgtctggatagttaccggccttctctcgcaatccgaccaattccaaaatttgaggaatgtgcgtctcgattgcagatttcggtcgcccgatcacctgcatcgcaaacgctacgttctcggcaaccgtctttgtcggcagtagtttgaaatcttggaagacgcacccaatgttgcggcgcagatatgggaccttccaggaggagaggttgttgatttgcttgccggcaacccagatgttgccctccgtcggctcctcttccttgattagaaggcgaataaaggttgacttgcccgaacccgagggcccaacgacgaagacaaactcacctttttggatgtcgacgctgatgttgtcgagcgcgacagttccgttcttatagacctttgagactttgtcagtggtgatcaatggggcaatccctccaggattgcggtgcccgtgtggcgtgcgtggaaatgcatgtcaggcatatttttctgacgttccgcgcttggcggaagttccgattccgggcagcagtaccacgcgatcttaacagcggatggtgacatttggaaccaccctcgccctattcgcatggctgcggcctgcgaatccggtagtgtgcgcatcccggcgaaaactcaggaggcggaagtgggtcaggtggagacctggaatgatctggcggcggacctggcaatcgacagcatccgaagcacgaccgaggccggatccggtcatcccacctcggcgatgtcctcggcacacctgatgtcagtgctcttcgcgagccatctccgctacgacttcgacaacccgaaatcgccatcgaacgaccgcttggtcgtctccaaaggtcatggcgcaccggtcttgtacgccgcatacaaggcggctggtgtcatttccgacgacgagcttatgtcgctccgcaaacaagggagtctcttcgagggccaccccgtacctcgcctgccctgggtcgatacggcaacgggttcgctcggccagggcctgccgatcgcagtcgggatggcactcgccggtcagcgagacggcctcggctacacggtgtgggtgctcctcggtgactcagaaatggcagaggggtcggtctgggaggcgatggggacagcctcccactatggcttgtccaatctggtcgggatcatggatatgaaccgcctcggccagcgcggtgccacccaactcgaatggaactcgcctgcctatgcgacgcgagctcaggcgtttggctggcacacgattgagatcgacgggcacgacgttgaggcaattgacagggcatatgaagaggccaccgggatctcggatcgcccggttctgataattgcgcgaacggtcaaggggcatggggtaagtgagatcgcggacaagaacggctggcacggcaagccgctcccgggcgatctcgccgaacgcgcaattgacgagctgggtgggtaccacggcgtgacactcagtgtcgccaagcccgatccggtgttgcccgctcccgccaagccaccgactgtcgcttctctcgccggatatgtccgcccgacctacgaagacggcgttgcgacccgccaggcgtatggcgacacgttgcaggccctaggtgcagtccgacctgacattttcgtgctcgacggagaggtcgggaactcgacattcgccaacatctttgagaacgccttccctgatcgatttttcgagatgtttatcgccgagcagttgatggtcggagccgccgtcggcatggctgcacttggcaagacaaccttctcaagctcgtttgcggcatttctgaccagggcatatgacttcattcgcatggcgtcggtatcaggagtgagcattagggtgtgcggctcgcatgccgggatttcaatcgggcaagacggcccgtctcagatgggcgtcgaagacgtagcgatgatgcgggcagtccacggcagcaccgtgctgtgcccgtgtgacgggccatcgactgtgaggctcgtcgagcaaatggccgatctcgatggggtctcttacctccgaaccatgcgaggggtgacgccgatcttgtaccaggccgatgaggagttcccgattggtggctccaagatcgtggccggatccgacggtgacggcgcagtcgcgaccgtggtcgggtcgggaattggcgtgattgaaggactcacggctgcagagtccctcgcagccgagggcatcaagatcagagtgatcgatgcgtactcgatcaagccgattgactccgcgggaatttcacaggcggctgctgagaccggtgcagtgattacggtcgaagaccaccaccctgagggcgggctagctgaggccgtcctcgcaggtcttgcggccgagggcgttaacgcccgctttcgctcacttgcagttcgcaacatgccggggtcggcgtcgccggaggagctacgggaagaagccgggatctcggcgggtgcaatcgccgcggccgtgcgcgatctgattttgtaacgcaatcgcgcttggtagccagcccagcgcagcaatgacggtcaggctgagacctgattggagtgctcaaaagagcactgactcgcctgatttcagccgggcggcaaacggacggtactcacgcttctgctccgcgatttgttggttgaggtcgaggaggcggcgaacgatctcggcgtcgacggtggctgccgcctttggccatccgtagcaagcaacgactgcaaggtcgagttcgctgtgcgccttggccagctcgacgtatgcaccctcgtcaaccctgttgtacaaagttgttagaccgaactgctccgcggcgcatagctcgcgccggaggcggtcgatttcgattgcggcagctgtgacccgcttcgactcgtcttcgccgacaggccaggggaaggggaatgactcaaagacagtacttggcgtgtatcggatgtcacccttcagcgtcgacgacctggcccaggcccacgcggtgtggatgcgggatgtgaggatgccgaaggtgtagtcgtcgtcaaaggcgaagacgttggtgagattgcttaggcaccaagtgggcccgcaccagatgaagtaagcacgcttgcccgttgccgtggaagcgatgaagcgcggcaagccgttgattgcgtcgcgcatttcgttcgcgtttgagccaaactgccaccatttctcacgacgtcgcttcattcggttgccctctcgctccggcttgacccgcttgcgaacgacttcaatcgctgccgggtaacgcatcgcatcttcaaggggcattgacgcgaaatcgatgatccagcgcgtcggcccgagtgccgggttcttggcaatgtcgtcgccgatcaagtaggggcgcacaacttcggcgtagttcgcatcgtcgcgggcgagaatctcggcggcctcgtcgttgtcgagaatgaaacctgcaccgacaggtatgggaccctgaaacgcgaacccccggtttgcctcgagggcgacggcgctagccgccgaggtgcccggtgttctgaggtcggttgagattccgtcaacttcctcgccgtcaagttcgaagtgatcgggcttgtcagccggcgatt

SEQ ID NO: 3860 - DNA, 20928 bp, synthetic construct
  source 1..20928: mol_type = other DNA
  misc_feature 1..20928: note = Synthetic
tgtcaggacctacagggcacgtgatgtctggaacgctatcattgagagcgcatgggcctgcgctgagccgggcgtcttcttcgtggaccgctacaacaagatgtccaactcctggtactactgcaccatccgctgcaccaacccgtgcggagagcagggtcttccgccatggggagtctgcaacctcggatccatcaacctctccaagttcgtcggcgacaagaccgtctattgggacgatctgggccacgctgtcaggaccgcggtgcgcttcctggacgatgtcattgacgacaccccgtacttcttcgaggagaaccgtgagcgccagcagtcagagcgccgtgtcggaatgggaaccatgggtcttgccgacatgctcatcaagatggagctcgcgtacggaagcgatgagagcctgaagttcatcgacaagctgtacaagttcatcgcgtgcgaggcctacatggccagctccgagatcgcaaaggagaagggctccttcaagttcttcgatgcagacaagctcctgcagagcggcttcatgaagggcatgccggaggatgtgcgtgagaccgtgcgcaagaacggactcaggaacgtcaccctcctgacacaggcacctaccggaaccacaggaacaatggtcggaacctcaaccggaatagagccttactacttctgggagtgggagagagtaggcagaatgggatccaacattgagcgtgtggccatctacgacgagtgggtcaaggcccaccccggccaggagaagcccgcatactttgtctctgccatggaccttgctccggaaggacacgtgaaggtccaggccgcgatccagagatgggttgactcatcaatctcaaagacagggaacaccccgcgtgactacaccgtggagcagacaggtaagctttatgagcttctctatgacctcggatgcaagggcggcacaacctaccgtgacggctcaagggacacacaggtcctgaaggccaaggacgactccaagaagaacgaggaggcggagaagaaggccgccgagtcagctgccgagatcgatgccctgaaggctgagaacgcggagctcaaggaacgcatagccgccattgagaagacggagaagaccctcaaggcaaggagccgcagcaatgtcatgcgcggaacaacctacaagaagagcaccccgatcggaaccgcatatatcacagtcaactccgacaatgacagctacgagaatccgtttgaggtgttcatcaacgttgcaaaggtcggaaccagcgtggctgccgatgccgagggtcttgcaagactgatatccctgattctcaggatgccctctccgtattcaccgaaacagcgcgcgcaggccatcatcaaccagctcaagggaatcggatccggtcagagcacaggtttcgggaagaaccgtgtcatgagccttgcagatgctgttgcccaggtccttgaggagcacatcggcactcagagcgagtccacaatcgaatccaccaagctcaccgacgagggagaggaggaggagaagagccagcctgagctgatcacatccgaatatgtcaccaccaaggccccgcttgccaacggaatcacccgtgacatctgccctgtgtgcggaaacgccacattcgtcaagatcgagggctgccagaagtgccttagctgcggatacagcaagtgttaagctgagtatataaacgagaaagggactgccgcatgatgaatgcgcagccccttttctttttggctttgttttcgtctcttatttcttaaagccttcgacgagctttctgagagctgtcatctcatagcctgcaaggtaagccacatcctcgagcttctggcccttgaagtcgaatgtgccgtttgtggcgtaggtgttcagggttccccagttcatgtacgctatggcatacatcgcagtggagaactcctcggcctggctgtcattcagacccagatatcttccgaggctgtagtagttgggggtatcgtcctcgtcatcatcccaccagctgtcatcagagctgtaatcgctgtcccagcttgaagagtcaccgagaagggcactccagtcaacgcccgcaagggccgcttcccagtcgtagtcatcaccggagctggagctgtaatcatccgttcccatgtcgccgaacatggagaacagcgcgctcatgtccatgacctcgtagccggagggaacctcgaacagggaggcatcgggcttctgcgtgaggctgttgatgtacatgatcgagtcaacggactggatggcgtacaggtcgttgccgttgtaccagtatgtgctgactgtcccgtccggggcctttgccttctcgtagtagtaggtcttgccgtcgagcttgtcgtttccgctgctcaggacgtcgaccgtttcgggcatgtcgattgtgtctgaatcatccatgccatccatgctcatgaccattatgctcttttctgcatcgctgatcatgttcatcttgccgtccttgatgaggaccttgaacgtctcgccgttttcagtcgcctccatgtagtaggagcccgcgtgctcggccacggtgaccgggctcgggtttccgaccttggagcctctgtcatccagctcatacatggttgacttgagcatgaactctcccgacttgaagatgttcccgtattttgtgaatctagttgatgttgcggcaaacagcgctgtggccaggatcaggcccagcaggatcagagcaattcttttcttcatttcaatctccctagtgccggcatatgccggtttcataccaattttaatggtaaaagccgtttagcacacaagtcaagagtttttgctccgcaggtttcttctacgtcctgatagaccataattacttgtaaatatattagtttcggtttatccttgaaaatggcgtcttggcggcccatatccgccgtcgccttcgtgctgatgcacggcaaaaactaggtttacgattcgccgtaacatacggccaatttgatcaaggaggctctttcatggtgagaaaaatgaaatccatggacggcaacaacgcagctgcacacgtcagttatgcattctcggaagttgccgcaatctaccccatcacaccatcaagcccaatggctgactttgtcgaccagtggagcgcaaatggtctgaagaacatcttcggcactacggtcaaggtcgttgagatgcagtcagaggcaggtgcagccggagcagttcacggttctctcggagccggtgctctcacaaccacctacacagcatcacagggacttctgctgatgatcccgaacatgtacaagatcgccgcagagcagctgccgagcgtcttccatgtcagtgcacgtacagtctcaacccaggcactgaacatcttcggagaccacagtgatgtcatggcctgccgccaaacaggtttcgcaatgctctgtgagggcaatgtccaggaggtcatggatctctcacctgtggcacatcttgccgctcttacaggaaaggttcctttcatcaacttctttgacggtttcaggaccagccacgagatccagaagatcgctgtctgggattacgaggacctcaaggatatgtgtgacatgaaggctgttgaggagttcagaaagcacgccctcaatcctgagcacccgcacatgagaggaagccacgagaacggagacatcttcttccagcacagagaggcctgcaacaagtactatgatgagcttcctgcagttgtcgagtcctacatggataagatcaacgccaagctcggcacagactacaagctcttcaactactacggagctcctgatgcagaccgcgtgatcgtcgcaatgggttcaatctgtgatgtggcagacgaggtcattgattacctcaacgcacacggagagaaggtcggtatcatcaaggtcaggctttacaggccgttcgcagccgacagactcatcgccgctcttccgaagaccgccaagaaggtcgcagtccttgacaggaccaaggagcccggagctcagggcgagccgctttacctcgatgtcgtcacagcattcgcaaacgcaggtcttaatggcgtcaaggtcatcggaggccgctatggtctgggttcaaaggacactcctccctcatcagtattcgcagtcttcaacgagctcaagaagagcactccgaagcgccagttcacaatcggtattgtcgatgatgtcaccaacctcagccttgaggaggacaagaactgcccgaacacagcagctcctggaacaatcgagtgcaagttctggggccttggcggagacggtacagtcggagccaacaagaactccatcaagatcatcggagactacacagacaagtatgtccaggcttacttccagtatgactcaaagaagaccggcggcgtgacaatcagccacctgagattcggcgatcatccgatcaagagcccgtactacatcaacaaggcagactttgtcgcatgtcacaaccccagctacgtcaccaagggcttcaagatggtccaggacgtcaagccgaacggagtctacatgatcaactgccagtggagcgacgaggagctctcacaccatgttgacgcagcctccaagcgctacatcgcaaagaacaacatccaggtctacacaatcgacgccattgatcttgcacagaagatcggaatgggcaagaggacaaacacaatcctccagagcgcattcttcactctggccaaggtcatgccgcaggaagaggccattgcccacatgaaggagaaggctacacagtcctacctgaagaagggacaggacgttgttgacatgaaccacaaggcaatcgatctgggtgcaacagcattcaagaagttcaacgtcccggcagactgggcaaacgcaactgacgatgcaaagccggcagccaagaccggaaagcctgagctggtcaagatggtcaccaacatcctcgatcctgtcggaaagatggatggagacagcctcccggtcagcgcattcatggatcacgtggacggccagttcgagctcggtgctgcagcatacgagaagagaggagtagccgtggcggttccgagatgggacagctcaaagtgtatccagtgcaacaactgctcatatgtatgtccgcacgcaacaatcagaccttatgctctcacagcagaagaggcagcagcccttcctgcagcagccaaggtcatggatgtcaaggcaggaaagggcaagggcgtctacaagttcacacttgccgtctcaccgcttgactgtatgggatgcggagtctgcgtaggcgcatgtcctgtcgcagctctcacaatggttcctcaggaagaggagcttgcacagcagcctgtcttcgactactgcgtggccaaggtgtccgagaagaaggacatgcaggacaacacagtcaagggaagccagttccgccagccgatgctggagttctcaggctcatgtgcaggttgtgcagagacaagctatgcacgtcttgtcacacagctgttcggagacagaatgtacatctccaacgcaaccggttgttcatcaatctggggcggtcctgcatcaacatcaccttattgcacgaacaaggccggtcagggtcctgcatggtgtaactcactgttcgaggacaacgccgagcacggtcttggaatgttcatcggtcaggagaagatccgcgatgatctggcagagcaggtgaaggctcttgccgaagcagacgcatcactcaaggatgcagcccaggcatggcttgacacaatggctgacggcgaggccaacaaggctccgacagcagctctggtcgcagctctggagaagaacggaagcgcagcagcaaaggcaatcctcgagaagaaggagtaccttggcaagaagtcagtctggatcttcggtggagacggttgggcatatgatatcggttacggcggacttgatcatgtcatcgcatccaagaaggatgtcaacatcttcgtgttcgacaccgaggtctactccaacacaggcggacaggcttcaaaggcatccaacatcggtcaggtcgctcagttcgcagcagccggtaaggacgtcaagaagaagtccctctcagagatcgcaatgcagtacggttatgtctatgtcgcacaggtcgccatgggcgccaacccggcacagacaatcaaggccatcactgaggccgaggcttatcacggaccttcactcatcatcggttatgctccttgtgagatgcactcaatcaagggcggtatgaccaactgccagaaggagatgaagaaggctgtcgattgcggttactggaacctgttccgctacaatccggagggagagaagaagttctctctcgactccaaggctccggcaggcggatatcaggagttcctgatgaacgaggcccgctacagcagactcacccgtgagttcccatcccgtgccgatgtcctgttcaagctgaacgaggaagaggccaagaagcgctatgagcatctgacaaagctcattgcgatgtacaacgactgatagcgttttcagactgtcaagtcagacccgtccaggcaatgccagggcgggttttttatcataatttgcaaaaagcatgtcaaatgcttatatttaccttatgatttcaaggggggagagtctatgaataaggtctttattattcttctttcagttctgcttgccttcacggcgatttcttgcaattcaacaagcacggtttttgctgaagattacagcgctgcggtctcacatgctaaagagccggttgatctgaggacaggggacaacggactctctgaaaaggagaacggctacggaacggtcacattcgacccgaactccgcaagcgggaccatgccggaccagcagataccggagatggtgctcaccccgctggacaaatgcaccttcacaatgcaggattgtcacttcgcaggctggaacacagatccgtccggagagggcgactggcttgatgatgagtcagagatcatgatgtccgcaggagaacataggacgctctatgcgttctttgagcctgataccgcgacagtgacattcaatgcaaacggcggaacaggtgacatgcccgcacagaatgtcatagcgaatcagggctttgtcctcaatgccaatgcattcaccgctccggagaataccgttttctacggatgggacacaaaggcagacggaagcggcacctactacggggaatgcgcatacatcaccattcaggagaacctgagcctttacgccatgtgggctccggcgaactgagcggatttacgaaaacaataatcaccgcaaatagcaaccgattctcaattgattaaaaaaatggatgccgtagcatccattctcattttgtgagtcaacctttcggttgccccttgttagcaaggttagaccgtaagctttgataaactttaaaatcattgtaattgtgcaattgatttcatgtcaagctaaactttcgttctaggtgttattgtctgatcagccaatattatagagttttatggcatagcttttaaaggtttccgtagtataatgaaaaaacagtcagtagctagggaggcgaaatgagatatagattgggtttggatatgggaaccaattcaattggttttgctgtaatagaactttccaagaatgattaccctgttgatttggtcacaatgggtgttcgggtcttcaaggatggtagaaatccgaaagataaacaaccacttgctcttgcaagaaggactgcccgtggtctgagaagacaaagagacagaaggctgcagagaaaaaagcagattctcagatctttgattgataatcatctgttcccaattacggaagaggaacgccaatcactcaagttgcttgacccttatactctcaggaaagaggcacttgaccggcctttatcagattttgaactcggcagggctcttttccatctgggttcaagaagaggatttaagagcaatagaattaccgatgagcaggaaaatgagtcaagttcttctggtagcagcaagaaaatgactcaggccgacaagatttcgaatctttctgttgaaatgaatgagaatggtgccagaactgtgggagaatatctgtatctgagaatcaaagaaggttcaggagcaaggttccgcggtggtgatttcaattgctatccatctagagagcattatgttgatgaatttaatgatatcaggaagaagcaggctgaattccataaagatgttgactgggattcaatctacaatgccattttcttccaaaggccactaagaaagcaggaaagaggaaagtgcaggttttacacagataaggacagggcttattccgctttgcctagtgcacatcagttcagaattctgtctgagatcaataatctgaaattcaatgatgaggatggcaacacaatcgggctaagtgattttgagaaagataagcttttcagtgcgttggacaactgtaagaccatgtctttctcaaagataagacaggtattgaaacttggatcctcatgtaagttcaatttggaagatgataggaaggataagctattaggcaatgagacatccttcatgatgagaaagcctgagtacttcggggcattatgggatgagatgtcacttgaagcacaggatgatgttgtagatttgcttctcgaggccgagacagatgaggaagtgcttgagaaacttgcgttgtttgatctttcagatagtcagaaagacaaattacttacgataaaacttggaagaaaagtcggaagcctttcttctgagtttatgagagattgcttggcaatcatgaaagccaagcatgtgagatatgacgaggctgtttccgatatggatttgcatcacagctataaccccataactgaacttcaggattgtctcccgtattacggaaaggtattaacccagacagtctcgggagcacatcctgaggctgatgagaataatcctgagtacaaatatggaaaaatctcaaatccgacagtacatattgcattgaatcagttgagaaaggtcgtcaactcaataattgagcattatggcaaaccagagcagattgtcgttgagctctctagggatatcagtgagagtacagagaaaagaaatgagcattacagagaacaagcccaacgggaaaaagagaatgagagaatcagagaacagataaaggagctgggaatcccaaaaccgacggcgtgggatatcaaaaaatacaaactatgggaagagctcgggaaagactccaatgtcagaaaatgcccatattgcggaaaaccaattcccgcaagcaagcttttcaccaaggaaatagaaatagagcatatactcccatattcaaggaccatgctcgattcaatgtcaaacttgacgcttgcacatgctcactgcaatctaaagaaatcaaacctgacaccttatgaggcattctcatctaatcctgatgggtatgactggcaggagataatgcagcggattcaaaatttccctgctgaaaagcgatccaaattctcaaaagaggcaatcgttcgcttcgatgaaggggaaggttttattgctcgtcagttaaatgacaaccgatatttgtccaaagctgccagggattatcttgcttgtatatgtccctccagtcacatctggggcattccggggtttaacacctcttatctcagatcaaagtggggattgaatcttatcctaaacaagaatggtgacccctatttcaaaaacaggtctgatcacagacatcattccattgatgctgtggtcattggcttaacagatagaggtatgatcaaggagatggctgacttgaataaaacctatgacagtgtcgcaaggatgaatgtcccaccattcccctttgatgaagaccgagtaagataccttttacgtaacatgattgtctcttataagcctgatcatggctatcaaagcagattcttcaaagagaccgcaacaggcctcaaatatgtcaaaacacgaattaaagtagctgatttatcagaacaattggttaaggaagatcgattatttagtaagagtctatctgagaagctaaactctttgttggattcgggtaaatctttcagagctgtaaaaaaggctttgcttgataaggcaaaagcttcacaaaaaacagacgaacctgaaattgatgtctatgagaaggtctgggtaacaagagttaatctcattgatcttgaagagaaggatatcatggagggaagggtgtttaatcccaagattcgaaagtatctgatagataataccgtggatgtgatcaaagataagagggcccttaagtctagactcggtgaactatcagaaagggcagggataaagagagtaaggtatgttcctaaaaatcaggtgttttcaagtattaattctgtcccgaataaatggtatgaacgcgatggagtatgctttgtaagcatatggaggatttctcagaaggggaagaaccctaaatatcaaggacagttcatcagctatcaggaagcttatgatcacgaatccggaaaacttaaagagtatccaaagccacatcctgccgcaaagaagctaatgtctctttacaaagatgatgttgtccggatttatccgaatgatggttcttcgccttattatgctatttgtgctggatttgctactactcgaaacaaaatagatttgcaaccgttgttttgcgcaaaatcaattgggtcttggatatatgagacaaactcagacataatcaatgattattccagatggtttgataaggcagacgggcagaattttatttctataaatgctttattcagtgacaataaagttgtagtcgttaaagtaagtccggatgggagaatagaacatcagtgattagacgaataatggatgtctctacagatggcctcttcttgaatcaaaggagaggctttcttgttgtaagtgaaggaaggaacgaacttgcagaggtacctcttgatgacatttccgttcttattcttagtgcaagaggggtatccattaccaaagatgccatcatggcattgctggacagagggtctcctgttgtcctctgcggaaaaaagtattccccagaaagcattattattcctttgttcggaaactatgagttctctggaagacttcagattcagattagtgcttctttgccattgaagaaacaattatggaagctgataatccagaataaaattgagaatcaggctatagcgttggagcaacttggttttttagagaatgctagatgtcttcatgtaatctcaaaagatgttttatctggtgatgtaacaaacagggaaggttatgcggctagggagtattggagttgtatctttggtccggaattcagcagggagattgaagctgaagagggtataaatgttctattaaattatggatatgcagtactccgaggaatgacagctagagctgtttgtgccgcaggtcttcatcctgcacttgggttacatcataagaatcagaaaaacaattattgtctcgttgatgatctgatggagcctttcaggccgttggttgatcttttggtttatggttttcttataaaagaacccaatcctgaaaatctgaccgagtggaagaaatatgttattgggaatcttcctgacgtagatgtcattacaacaaaaggaaagtctccattaatcaaagctttggaatattatgtgttttctctatatgagtcgttctgtgcgaaggagaataatctgtgcatcccaaaactagaaaagaaaggaagaacaggacaaacttctcttttacatacctgagtggatatcaactgatgtggatgttcgtgttgtttgatttgcctgtcgttgaaaaagaggaaaggaaagcagccacagaattcagaaatttccttttggatgaagggttttcgatgacacaatattcagtttacaacagactcttgtcaggaaaggaggctgttgagaaatactcacggaggatatttgaaaagctgccagaagaggggaaagttgacattatatgcattacagacaagcaatatgagaacattctctcttataatgcaaggaaggggaattcacagaaaaaacaggggcaacaattgttattattctgacaaatggacggttttctcctgtataaatgcttataatttattttacctcaataaattataatggcattatcaaagtctatcaaagcttacggtcaccctgcaacttgactgttccttgcgagtggcagcgcaatatcaaagtctatcaaagcttacggtcaccctgcaacctctacaagagggcattgtgcaagatgcgtatcaaagtctatcaaagcttacggtcaccctgcaacagaagttgctttattacaggtcaatgagaatcaaagtctatcaaagcttacggtcaccctgcaacagtgggtttggtgacggttgtgaagtgtctatcaaagtctatcaaagcttacggtcaccctgcaactacaggctatacacataccgcagggaacctatcaaagtctatcaaagcttacggtcaccctgcaaccgatgacagatgcagcacttgccgcgatgatcaaagtctatcaaagcttacggtcaccctgcaactgcttctgttggtcgtatgattcaggaagatcaaagtctatcaaagcttacggtcaccctgcaacctggcggttacacttccttatctgatccgatcaaagtctatcaaagcttacggtcaccctgcaacggctcattggaatgagatgcgctgtaagaaatcaaagtctatcaaagcttacggtcaccctgcaaccgaacttctcgccggggttcagggcgatgatcaaagtctatcaaagcttacggtcaccctgcaactggctaaagagcaggaatgttgcttcgcaatcaaagtctatcaaagcttacggtcaccctgcaacaactgatcaacgcgctgctgattctcatcgatcaaagtctatcaaagcttacggtcaccctgcaactggacgaaggatcctgcatcggaataatcaatcaaagtctatcaaagcttacggtcaccctgcaacctttgtggctgacaaaggacaatgtcttttatcaaagtctatcaaagtttacgggctccctgcaactgaccacagagggcactcttgtggcagtttatgacacatttcatgcagaggatgcattcggtgccgttctctctcttctatgaatatttaatttgacggcgttttttgagggtggtaaactggattagtagtttagaaaatgggagaaaagcggcaacgctttcttctgaaactaagcattgccgtcgttgacggtattcatagaaaaaggagagaaagtatgaaaaaactagttctgttcatgctcattttgctcattgccatccctctgttcgctcagggcgcacaggagacaaaggctgcggcaaaggattcagtgacactcgtcatctcaggaaacccgtatcgtttctatgctctttcagcaaagggctgcggcggtgatgacaaccttgtcttggcaaatgtctatgactgcctgctctgtcttgaggctgacggatccctttcaccggctctcgccgagaagtatgaggtatccgctgatggtctgacatacacattccatctcaggaagggtgtcaagttccagaatggcgtcgagatgaccgcagaagatgtcaagttcacattcgacaagggagccgcaggtcctctcggagcagctctgttcatcaactatgaccactgtaacatcatcgaccagtatacagtcgagatcggactcaagtcaccgttcgcagcattcccgtatggcgttgcatcacgtctcggcggcatctgctgcaagtcctactgggagcaggtcggtgatgagggttacatggagaagccgatcggaacaggcgcatacaagcttgtcgagtatgtcaacggcgaccacatcacaatggaggcctttgaggaccattggagaggcgcaccggcaatcaagacagtcaagatcgctcttgtcgctgatgtcaacacacagatcctggggctccagaacggtgattatgatatcatgagaaacccgtcaatcgagcagtgcggccgtttcgacaagatgaacggaatctcaacatctgttggcgattcaacagcacgtatcactgtcaacatcaatgcatggtcaggaatcggaacagacctcaacttcagaaaggctgtccaggccgccatcaacaaggatgacatcaaccaggcaatcaacagcggaaaggcaacaatcctgacagttgatatctgcccgatgtacggcggatatccggcacacatcaagggtgtcgattatgatccggcagcagccaaggagtatcttgcaaagtcctcctacaagggagagaagtgggcaatcacctgtacagcaggaaccaactacgagacagttgcaaaggtcatccaggcacagcttcttgagatcggaatcaactgtgaggtcgaggctgtggacaacatcacatacgaggagagaggaaagaagagaaacttcgacgccagagtcgttgacgaggcttcctcacttatcgatgccgattcaatcgcaacacagttcacaccgtcaagattcgacgaggcagtatggtatccgagagcaatggagatctacgagatggcacagaagggcagaggactccagggtgaggcccgtgcacagctttacggccagatcgcacagattcttcttgacgaggcatacacagtacctctttacaacggtatcagcactgttgcattcaactcaaatcttcagggtgttcaggctcattgtctcggatactatgtcttccgttactattcatggaagtaaggttcccggcttagcttaaatcctaaacagggcagatgaatcattttatctgccctgttttcaaatcacgcttaggaggccataagtgaactggctgaaatatgcactgaaacgtctgctgatgctgattcccgtcataatatcagtgacgttcatcctattcataatcctatcccttgccccgggtgatgtagcccgtatggtcctgggtcaggatgcaaccccggagcaggtggcggagctcaacgcccagatgggcttggacaaaccgctgctcgtaagatatgtaagatacatggtggatgcgttcaaactggacttcggacggtcatggaccggaaacttcgatgtcctgaaggaattcagtcaccgattgccatatacattgcttgtgtcaacgcttgccttgctgtttgccacctcgatcggaattccgctcgggattgcatcggcaatcaagcagtacagcctgcttgactacggcagcaccttcatggtcatgctgctgttctcaatgcctgctttctggctggggaccatgtgccagatacttttctgtctgacgctgcactggctgccggtctcaggtgtcggatcctggaagaacttcatccttccgccgataatcctcggagccaacacaatggcgtcaatgatcagaatgagccgaaccagcatgctcgatgtcatcaggatggactatatccgcaccgcaagggcaaagggtaactccaacaaggatgccatcatccatcacgccatcagaaacagcctgattcctgttgtcacacagatcggaatcagcttcgctggaacaatcggaggtgccgttgttaccgagaacatctttgcaatcccaggaatcggctcaatgctgatcaacgcggttaagagcagggatgtacctgttgtcatgggtaccgtcatcttcataacaatcatcgtcggtgtgatcaacctgattgttgacctgatctgcgcgatagtcgatccgcgtatcgatcttgcatcctgaggaggtctgccgatgtcgttattcaagaaaaagaaacccctttccgagtacagcacaggtgagctgatcctcttcaggttcggaaagaacaaactggctataatcggtgtggcgatgctctcattcgtcacaatcatgataataatcgcgccgatcatccgcccttataacatggtcatcaaacaggacatcatccacaagctgaacgggccgagcatggcccacatcttcggaactgatgagctggggcgtgacctgcttgcgagaatactctacggaggaaggatatcgctgttctgctcgcttgccatcataggaatagcatttgtggccggggccctgataggcggaaccgcgggcttcttcggcggcaaggtggacacgatcctgatgcgctttgttgacatgctgatgagtgtgccttccgcactgcttgcaatggcaatcatcaccgcattaggcaacggtgtgtggaagctggtcatggcactggccataggacagatccccaggttcgccaggatggtgcgatccagcgtccttacgctgaggaacatggagtatgtcgaggccgcgaagtgcttcggctcaagctccatgcagataatcctcaagcacatcctgcctaacggaataggaccgattgtcgtttccgcgacgttgacactgggctctgtcatcctgtccatctcgtcaatgggatatctcggactgggcgttgcgtctccgactcctgagtggggaaccatcatctcggagaacaaggtcaacatccagtatttcccgtatctcggaatcattccgggaatctgcatcatgctcacagtcatgtcaatcaacttcatcggtgacggcctgagagatgcatttgatcctaagtcaaagaagtaacaggggtatcacatggcgaaactactagagataaaagacctgaatgtcagataccacactgatgattccatagtatatgcggtaaacaacctcagtctctcgcttgagcatggagagaaactgggccttgtcggtgagaccggagcaggtaagaccacccttgcgctgtccatcctgcagcttcttccgaacaaggtcggcaagattgagtccggatccatcaagtatgacggagaggagcttattggccagggagagggctatatgctgggcctgaggggaaggaggatctccatgatcttccaggacccaatgacaagccttaacccgactcagacggtcggagaccaggtcctagaggtcctgagactccatttcccgcagcttacaaaagaggagaaggacgccaaggtcgatgagatcctgcagcttgtcggaatcccggcctcaaggaagaacgagtatccgcaccagttttccggaggaatgaagcagcgtgtcgtgattgcaatggcgctgatcgcagagcctgagctgcttctggcagatgagcctaccacggcccttgatgtcaccatccaggcccagataatggagctgatgagacgtctgaaggacaagttcaacacggctgtcatcctgatcacacatgacctcggtgttgtggcggagttctgcgacaaggtctccgtcgtgtatgccggacgtgtcgtggagcacggcacagttgagcagatattcgaggccaaggagaagcatccgtacacaatgggcctgataaactgcatccccgacctgtccaaggacgaggagaggctcaagcccatccccggaagaatggttgacccgagaatcatccccacagggtgctgcttcgcggaccgctgcccgcactgcatggagatatgcaagaaacagccgcctgagatccacgacctggacgggcatctgatcatgtgtcatcttttcgatgctgagaatggaggtaaagcctgatggacagaccattgattgagacaaaaaacctctgcaagtatttcaagacccacaggggcatgcttcatgccgtcgaggatgtgaacatgaagatcttcgagggaaagaccctcggagtggtcggtgagtcaggctgcggcaaatccacgttgggaagaaccgtcctgaggcttcatcaggccacaagcggtgaagtgctgttcgagggggagaacatcctgaagtacagccgtcagcagatgaacaggatccacaggaacatgcagatgatcttccaggacccgtactcatcacttgaccccagaatgtccatcagggcccttatcacagagcctctgactgtcttgagcggaaaggagaaggagtcatccaaggagatggatgacagggtatccaggataatggagatgtgcggccttcccaggcattactcgaacctgtatccgcatgagctggacggaggaatgcgccagcgtgtgggccttgccagggccatgatcctggatccgaagttcatagtctgtgatgagcctgtctccgcactggatgtgtccatccaggctcagatacttaaccttttgatggaccttcaggacaggcacggcctgtcatacatgttcataacacacgacctggcggttgtgaagcacataagtgacgagatcatggtcatgtacatgggccaggtcgttgagtatgccccgtcggcggagcttttccgcaaccacgtgcatccgtacaccagggctcttctgaactccattccgactattgacctctccaggagaaacagggagagggtgacgatcaccggtgaggtctcaagcccgatcaatccggcaccggggtgccgctttgcaccgagatgcccgtttgccacagaggagtgcaagcagaagcacgagctcaaggagataagcccggggcactttgcctcatgcaccaaaggagtaaactgatggctcatatcagatgtgacttcaggtctgaggtcatggacatgggaacatccatgacggtgttccttcctgagtcaaaggactgcgccagtgtgagggtcgtctacctccttcacggacttgcggacaactgcacgggctgggcaagatacaccagcgtagagcgttatgccagaagatatgatgtggctgtggtgattcctgaggtccagaggagcttctactccgatatgcgattcggaattccttattactcattcatccatgatgagcttccaaggctctgcaggaacatgttcgggttttccgcaaagcgtgagaacaactatgtcatgggactgtccatgggcggttacggtacgctcaaatgcgtgcttaacacacctaagcgttatgcaggctgcgccgcattctccgcggtgactgactttgagcatgaggtgaacaacaccactgagcagcgtacggcagagtacaaggcgatgttcggccagagtctcaggattccggcggacagcaacctccacaggcttctggacaagcggagtgccggggagcttccgcgtttctacatagcatgcggaaagcaggacaggctctgtgagcaggatgaggaattctccggcatgctcaaggcaaaaggggcatctgtcctgttcgagaagtgggacggaatccacaactgggacttctgggacgttgcggtggagaaggccttcaggtatttctttgaggagacagcaagatgattgatctcaggaaaatgacgacggaaagccgcaacgaggcttccatgaacctggacagcatgacaagccttgaggttgtcacgctgatgaacagagaggacgcaaaggtccctgaggcgattaaggggcatctgtctgagatcgcaaaggccgtagactggtgcaagaattccattgccaacggaggcagggtcctctatctgggagccggcacaagcggaaggctgggagttgttgacgcatcggagtgcccgccgactttcggtgtctcacatgatcttttcgtggctgtcatggccggaggctccggagcgttcgttcaggccacagagggtgccgaggacagcagggagctgtgcgtcaaggacctgaaggacaggaacctgaggccggttgacacagtcattggaattgccgcaagcggcaggactccttatgtaataggcggccttgactatgcgcgtagcctgggctgtcatacagttgcgatatcctgtaatgagggttctcccatcggaaagagtgcggagcttgcaattgaggtcgttgttggacctgaggtcctgaccggttctacaaggctcaaggcgggaacaacgcagaagctgatactgaacatgataagcacggccacaatggtcggctccgggaaatgctacagcaacctgatggtcgatgtggtcttgtcaaacgagaagctgaaggtcagaggccagaacattgtcattgacgccaccggagtctccagggaagaggcgattgatgccctctcaaagtcggaaggcagcgtcaagcgtgcgattgtcatgatccttgcaaagtgctccgcagaggaggctgctaagcgcctcgaggcctcaaagggccgtgtgagagaggctatctcatgagcattgagtttgccgcaggcgttgacggcggcggaacaaagaccacggtcatctgcaggacaaaggacggaggccttctggacaagaaggtcttcggaccgttcaacataaacagcataggagaggctgccttcatggatcttctcagggagatcctcagttatctctccagcctgggtacatgccgctcattgtgcataggagccgcggggataagcaacaggaaaatggtggaatgcgtctccgcggttctctccggctcaaaggtcagatggagtcttgtcggagattatgagattgcccttaccggtgccctggacggcaatgaggggataatcctgattgcaggaaccggctccgtctgcttcggacgctccaaggacgggcgtcttgagcgctgcggaggctggggccatctgatcggggattccggaagcggttacggactggggcgcgatgcccttgccgcagtgtgtctttccattgacggc

SEQ ID NO: 3861 - DNA, 14522 bp, synthetic construct
  source 1..14522: mol_type = other DNA
  misc_feature 1..14522: note = Synthetic
ccaatcacccttgtcttaacggtagttggacgcccgaccgacgtaacaattcctgacgcatcaagcccctcttctgcggcaatctgcttaagtaactttcctgttgcatcatcacccacaacgcctatcaacagaggctttacgcctagaccctttaaattggatgcaacgtttgccgcacccccaagatggaacgtttcactgtcaacatccactacgggaaccggcgcctccggagacactctactaaccgagccccagaaatatcggtccaacattacatcacccagcactgcaatttcttcgccgctggccgcatctaagatttctcgagctcttgctttactaattggctgcatgaattattaattggtggaagaaccagatgtggctgttcgagaggcaagttgacggtctaacaagtaaaccgacggaccatcactgccaatcatcgtaaactgatctactatttctcctacctgcgattcctcttcaacttgttcattgatgaaccactgcaacacaacttgaaggggcaaatctttttcttgaattgcaacctcatacaggtcattgatagcggaggtaatcaactcctcgtgtgcttggacagacttaaacacatccaaggcagtggagtactgttcatttggcgctgccaaggcttgaagaaccacatttcctccgcggtcatgcaaaaacttaaaaagtttaagcgcatgctgagtttcttcctgccactgtagatgcatccaatgggcgcatccgggcaaattgttttgtgtaaaccaggctgacattgacaggtataggtaggcactttgaaattcaagttgtatttgattgttaaccgcttcggcaagttttggcctgatggacatcactttctcccattaaatgaatatttctgtttgtaaaacagactacgatattacgaaaagcccatagtttgcgccattcagcacttacaaagcgttgctggtttacgtacaattatcgcgttcgtgtttcaaacggacacttaatctcatctttaattataactggacataatgaaaaaacatgcagccaatactcgcttaagcctgtgtaacgccgaattctacgcctttcacggtgttcgtgaagaagaacgaaccatgggaggcagataccaggttgacgtagacattatttacgacgcctcaagtgccgtggtgagcgatattcttacagacactgttaactacgaagaaattctgtacatcgtaaacgaacatatgagtggtgagccgtgcgaacttattgagagtttggcctatgatatcggcaccacaattgtcgaacgttttctaactgttaaacacgcgtcggttagagttcgcaaactcaacgtaccaattcagcaggtgctagactatgttgaagccgagatcaccatcggacgtgattcttagaaacgcatcatggaagttctaatctcactaggctcgaatattgaaccgcgtttacgttttattcagaacgcagttcaagagttgaaaccgtatatcacaattgttggtgtttcgttgatgtatgaaactgagcctgttggcttcaaggatcagtcagcgtttatcaatgtagttgtgtttggaaacactagcctaacgcctgacgaacttcaccaacgatgcaaagaaattgaagaaaaattgggtagaacaaaacgcgaacaatggcatgaacgtgagattgatattgatgtgttgatagcgggcgactatgttgttgattcaccgcaactcacattaccgcatccgcgaatgcatgaacgccgctttgtgttagtccctgctgcaaaggttgctccgcaattaatgcatccagttttgcagttgaacatacaacaattacttgctgagtgctcggatacttcggatgtttacgtgtactattctgtagcccaagattgatgagtgtagctaataattgatgagaattcccgaccatattgttgatcaagttaaaacgcaggcaaacattttagatgtggtgggtcagtcagtcaaaatgcgaaaagcgggtcgtaattatttggggttgtgcccctttcataaagaaaaaaccccctcattcaacgtcagtgtagagcgtggaatttataagtgctttggatgcggcaagagtggcgattcaatttcgtttgtgcaagaaactttgaacgttggcttcatcgaggctgttcaaattttggcggataaaatgggcatcgtgattccggaagaggagctggatgacccaacgggaatgaatgcgcgccgcgatgcagcactaaaggcactcgaggcggccgctacgcacttccaccatgtgttggtgtcatcggcagacaatcccgtcagaaaatttttttctaaaaggggcttttcagacgccatagccgagaagtttttacttggtgcttcggagccacgttgggatggattgatgaagcacttgctgcaaaacggattcacacaggagcacatggttgatgccgggttggttgtaacgaatgactccggtaaggtgtacgaccgttttcgcaatcgtgcaatgttcacgctgaaggatcaggtgggacgcgttgttgggtttagtgccaggcaaatcgacccgaccgataaaatggctaagtacattaattcgcctcagtcaattgtgtttgataagagcaaggttttgtacggactcgatcttgcaaagcgttcaattacacaacaacgaacggcgctaattgttgaaggtcaagccgatgttgtttcaatgcatcaggcagatttcacaaacacggttgcaagctcgggcacatcgttaacttcagaccaccttcggattttgcgcaagtacgccgacaatgtttcgttggtttttgattccgatcaggcgggtcaaaacgcaatgtcgcgcagcattgaattgtgcttgcagcacggcttcaacgtttcatgcgtgccacttcccgctgagtcggatcccgattcgataattcacgaaagtggtaagggggctatgcaggagctcatctccaacgctgtgccgtggattgaatttcaatatcagttttttgattcaaacaaccaattggaagatccggcatcgaaagctgtggccttgaaaaccatgattggttggatagcatcggtgccggaaaccttgcagcatccgttcctgatcagagatttggccgacagatttaaggtagatgaaaacattcttcaatcggccttgcgtaaggcagataccagccctcacacaaacacccagccccttgccagagcttcagtacccgtccaaactgagccatccccagaaaggattacggcactaattcttccgtcggaacggacgttgttgcacgtggcgcttaaggttcaggacggacttgccttactattgcatgagttcaatgttgacgagcatactttttattcgataaatgcgcagacgctttttcaaaaaatttgtcttgccgatcatgaacatcacgatgttggcgcggcattgcttgtgagcgatgagttgagtgaacagttgcgtgaagtagttgaggaaattttgttaacggattctactccgagtaaaaactgggcagatttttcagtggatgtgccggagttagatcggcatcgtcctatatacgatgcgttatttagtctgcgcgtttttgcgattgataaagcggttcaatctgcttcgagaaatatcgaaggtgagttggatgagaaagaacgtcaaaggttgttagtgagaattacgaagaacatagagttacgcgaacaaatgcgcaagaaatttttggaaaacccggcagacctatcatggcaagacgcagaaatagtgtaggcatactcattgggtgcgtgcttacagcggttgcgttgtggagctacgttacacttacgcgtcaattcgagtacgatctgtctgtgccactcgtggtaactcccccacccaaccaggcgttggtatcgggcgttcccgatagtattaccgtccgactgcgtggtagcggactgcacattttgaatctactttttttctcaaaggcctcagcctgcagcgtgaatatgcagcagcttcggaatgttggcaccacacacattgcaaatttcgatgacatagtgcgttcacttgaaactcctcagcaaatcagggtactcagcgttcagccaaattcgttaaccatggtaacgggtgatgtgtttaagaaatctgttcccgtacggttgaactccaatattacctttcgagaaggatttcaactcacgcattcactgcaacccgaccccgcgtacgttgaaattcggggaacaaaaagtgtggtagaaaatatttctgaatggcccactaagcggctttctttagccgacgtgcattcatcttacactgcagtggtggacatgagcgattcgctactgaccacggtgtacaccgttccaagcaccattgaaattgcgttagacgttcagcaaacggccgacgcaaccgtgctagacatccctgttacattaatgagttcgcttagcggtgccatggtgagtccgtcgtacatcagcgtggttgttcgtggcggaacagatctacttgccacgctaaccgcgcgcgacattcatgcctcagttaactcagtttcggcatcgggtattgcacaacccaccattgaacttccgccgggcttaaaggtattgcgaacagaaccacaactcgtcagaataatctccaaatacaaaccgtaaacttgcttccaccctgtggaagccaaatgtgtaaatgtgtaaatatgagaatgggtaataccaatgtggaaatgtgtaaatctgaagtgcttcacctgataagtaggctgctgtcgccgtagctcaaaaacctgtattcattattgagtgcttcgcggtaaatcgtgcgccaatcatcgccacctacaaaggctgctaccaaaagtaagagcgtatttcctggatgatgaaagtttgtgatcaatgcatttaccacagcaatttttgcacccggtgcaagaatcagttgcgtggtaccccacagcgaatcgagattgtgcgcacgtacatattccaacaccgcacgaaaactttcggctactttcacgtgttgaagttcggggtcgaaagcagaccactgtgcaatgtgaacttcaccgccaggatttgctccatatacttcgccaggatttgctcctcgtacaattaggttagcaccaaaccaatgcaccgactccaacgtacgcactgaagtagttcccaccgcggtgatatacggcgtgggtccgtctaaatggcgacagatcttttccaactccacacgactaacatcaatctgctccgaatgcatttcgtgatcttgaatatcggccacatctatcgtcttaaaagttcccagccccacatgcagaactacctccgccgtttcaatttttcttgcgcggattttctcaaacacctcgttcgtaaaatgcagaccagccgtaggcgccgccacagatccttcactattcgcatatacggtctgataccgctccacatcctcggctacaacgcttcgttttatatacggcggcaatggcacactaccctcttgttttatcacttctgaaaggggctttcccgtttcccaattcaacgtgacagtagcctcgggtccatttttatgtatgaccgttgctgaaagctccgaattcgccgtcgtaagtgtcattccctccgaaacattttttccgccaatcaagcaacgccaatcggatgttgcggccgatgcgaaaagtgcctcgggatgaacagatgcatcggccggctgtgtgagcaaaacttccacaaagccccctgtagatttttgcatagctattctagcagcaaccaccttggtggagtttgtgaccagcatggagttgctaggcaggaattctgcgatctcggaaaaactgcggtgttgaattgaattttgctcgcaatgatacactaacaatttgctctgatcccttattgggagcgggtgaagcgcaattctgtcggacggaagttgatactcaaaactggttagaagtacggtgggaacattgtttggcatctttaagtatagctatattcatggttgttgcaacattacgtcaaagacagccgtagtgcgacatctttggtcataccgctatttaaggagaaatataatggaagaaaacactactcataatcccgttccaccgccgcccggatattccggagcgccgcgtaaaaaaagtcgatggtggataccattggcggtcatcgcgggtttgctgattattgtaatcgcgatttttggcgcgtttgtgagcttcgttgtgggaagtttgggcgatatcactgctgagaaagaacttgtaaacgtgaaagaaaattcagtgttgacattgaatttgtcatcgggtgtaaacgagcacaacgttgcatcgccattcaacttcatgggcgagagcaatggtgcatcgttgatcgaaattgttatggcaatcaacgaggctaaaaccaacgataagattcgcgggatttattacacagccggtgggagcggagttggaatggcaaagcttacggaaattcgtgaggcattgttagactttaaaacttcagggaaatttatttacgcttttattgagagcggaagcaaatcacattactacatagccagtgtagcagattctatatttatgcctgaagaaggcatgatggaattcaatgcgtttggtgcaacgggtgtgtttatgaaggggctatctgagaagcttggagtttcttggcatgtagagcagttcgaagaatacaagtctgccgccgaatcgatgagtcgcgacaactggagcgcacctgctaaacaagagcttcacgagttgcttgaccaacgcgcagctttgtttgtgaatgcagttagttctgcaagaaaactaactccggcctatgtaaatagcgcattggacagaggactctacaccgcagactctttgttgggcgcgggattgatcgatggtttcgctcgagagtcggaagtacgcctgaagatcgcacgaagagtgaatccgaaagacacttcagaaaatccaaaggttcgacttgtaggtgtgcaaaacttccaaaaatggatcgagcacacagacgagtcgatcgataagaaccacatgattgcaatcgtgtatgcaagtggagcaattacttccggtaaaaacgacagtccgtggtcgaacgatggaatccattcagcatcacttatcaaggatttgaaaagtgccgcaaaggacgatgaaattgaggcgattttgctacgcatagacagtccgggtggcagtgccattgcatcagatgaaatctgggccaccattaaagaaattcgcaaaacgaaacccgtgtttgcatcaatgagtgatgtggctgcatctggtggctactacatagccatggcttgcgatacgatcatcgcgcacccggcaacaattactggttcgattggcgtaatcatggccatcccaaattttgccggaaccatgaacaagattggtgttggtatcgatactgtcagcctgggcagatcatccggcttcatgaatactctacgtccgttctccgatgccgacaaagccagcctgcgtttgcttggtggtgggatttataggcgctttgttcaaaaggttgccgactctcgtggcaaatcattcgaagacactcgagcccttgcaaagggtcgtgtttggacgggtgttgcagccaaagaaaatggcctggtcgacatcctaggtggcatgcaggaggcccttaaagcggtcaagcgtcgcattggtgccgacgaaaacaaaaaagtctacgtcaaggtctacccagaacaagaagtaggcatccaagccatccttaacatgttcggcataggcgacgagggcgacgatgacagcgaaacatcgagttcaactcaactctcaaccgttttacattcaatattcggcacccgttccgatgttgaacaagtttggaaatcacttccgcttggcgcacaaaatcagataaagcacgccatcaagcttgccgagattggaaccaaagaacacactcttgtaatgctaccagcgcatctgccgctcaattagtagagctgccgctcgattaatagagctgccgctcagttagcagagtttctaaatgatttttttgaagggggctttcggtaacggaagccctttttttgtggacaataatcagcagagactggactcacttagacaagcttgtaatttgcctgcaatagtctgattcatcgaatctaactgtcgttacccgagaattgtatacagtacatccaatcaatttcgtgctgtcattacctaatgattctgacattttggaatcgaaatcaggacgagtcaccgcggtgggatcgaatgtaaacataaacacggtccacgcattttcagtccacgcccccccccaccgcagatgcattagaaagtagcataaccatggtctgcacgctaccacacattgccagtaccattcccaaaagcatcaaaagtgctcaaacgcccttggctagtattacaccgagtttataccgaatgaaggaaacaatattattcagcacatccaatacagttttcaaaccatcatgtatcacttcaatacacaagccgaactatatgtcatgccagcaacccagtaatcatgttttctgaatcaagcattactaaccaacggattctagcaaaagtacttcccattgcatttgttttagtatgttgagggataatcgtgcaattataactagttgagcgacacataatgtcgcatcagttgaattaggtttggcacttgacctcggaaccaaaaccctatcatccgccggcagctcgtttgcgaagtatagtggagtgtatcacaagcagctccgcttgcaatgcagaaacgctagcccacaagcttggtgtaacgcgccgaaccatagtgcgcgacatacagtacctgcgtgatagccaaggtttcaatattgtttacattcgcaagagcaagcggtatgttatggaagggggcttcccaaaggttggaagcatggagataggcattgcggagatacttgctattatacttggggccgatgccatgcacagattaggtgacagttatcactctgaactcataaaaaaggtatgtgcaattttacaagtccatcatagcgaacagttgagtgtagattttgagcggttttcgaaacccatttcctatgccgttacacaaaccgcgccgcccaacacaaatcacattgaaaccatcgtaatatctacccggcaatgcacatcaataaagttgcattacaattctgtacgatcatcgcgccaagcctggcgcaaggttgacccattgcatctgcactgcaggtttggcacctggtaccttattgcgtggtgtcacacacgcaaggacatccttttattccgttgcgaccgtatgttggaggtacagccaaccacgcaacattttgagcaacacaaattcaaccaagatgaatacctaggtaacagcctagcaatgtatcgcggagccgaactaatccatgtagagttgcgggtagccgtaggcgcagtccgctggttccgggaacgcacctttcactctacccaaagcatagtacaagcaaatcacgaagcccctgccactgttacgctagacgtaatccacggacccgacctagagcactggatactaggatggggcgaagaagtagaagtgatgggtccggaggagttacggaaacaaatacaacagcgaatagagggaatgtggggggtgtatgagggggaatgaagggaaacacctattttcaatgaaccgcaaaaaaaaacctgaccgaggtcaggtatgggacaaattgtcctgcggtcgatcactcgaccttattgtgaaaagttcgagtgcagatctttgataacgttcgcaacttaaaacattaatcttattaagtcaagggaaaaattatggcaatggtattagggttggatatgggttccaatagtcttggttgggccttggtagatcctgagaaaaatacactcatagatatgggggtccgcatctttcaggccggtgtagataatttgaatggggctaaggaggagtcgagaggagtatccaggaggcttaaacgaggaatgcgcagacaatacaggcgcacccgccagcgcaaaaaagcacttcggctttttcttattatgaacaatctacttccaaacgatgcaaatgaatttgatgtgctgttgatgaccgatccgtacccattgcgcaaaatgggtcttgacgaaaaacttacgttgcttgagttaggacgagttatcgaccatataaattcgagacgcggtttcagaagcaaccgtaaggcatcaagcgatgaagaagatacaggagtcatattcgaaggtgataaaacaggtacaaaacctggtataaatgaaatcgaagatgctctggattcccgactacgcagtatgaaggcgtaccgaataatagaaccagaaattgagctaagcggtttacaggatcttgacggatttcgaacagcaggcgaatacctagctagcctagaccccgtagtgcgtagaagaagatgccgttttacacttagagagcattttgaaattgaagtgcaaatcctctttaaaaagcaacaacagttctatccgaaattgttaactgacgaaatgctaacacagttaaataagctaatattctggcaacgccccctgcagtcatctcgcaaacttgtaggcaactgcaccttcgaaccaggtaagaagcgttcgcacaagagccatcccgactatcagagattcaggatgctacagcaattgaacatgttcaccataagaggtagtggaaggattaaggatgatgaagccgtgttgatggagggagagcggagcgccttgtacaatcacctaataacaaaaggtaaactcaaggaaattcaagacaaaagtacagccgttattaagctgctgaaattggataaaaatcttacttggggattcgggctaaatcaattggatgctccatatacagagttggctatgaaaagtgcacttggaccagacctatttgtaacgttgtgcaaggacgagattcacgacatttggaatgtactgaactttgcggttgataaagattgggtaatacaatggatgataaaacagtatcagcttacagaggatcaagccaaggcagttgcaaagatcaagctggaagacggatatggttcagtgtcgcttagggcggcacgcaaaattctaccatttcttgagcaagggctactctaccatgaagcatgcgaaaaagccggattcaagcattcacagccgcaaaccgacattcctgtaaccaatcgtattcctgctctggcaccagaagacgcacgcaatccaattgtacaaacatcttttgctgaaatgcgtagagttgtaaatctgttgatcaagacctatggtccaatagataccatccgcattgaaatgggtagagatgttaaacagccgaagaatgagaggctgaaatctgataagattaacagggaaaataaagcgaagaacgatgaagtaagagaaatgctccgaagtgaatttgggctgcacaacccatccaaaaatgacattcagaagtataaactttgggattcacagaatcacaaatgtatctacacaggggtaaacatctcgcaggatgatttgttcaatgcgccgatagatgttgatcatgttattccatacagtaagtcgttagacgatgggatggcaaacaaggtagtgtgcctacgagatataaatgcgaaaaagggtgataggacacctctcgaagctattcaagcagggttactaaacgagcatgaattacgtgagcgtctcgaaggactagttcgtgcaaataaaatgaacccccgaaaagctagacgtttcttcctatcgaaagaggaagttgcagagttagtaggcgatgacttccacatacggcaattgaacgacactcgttatgtggctaggctaacacataagtatgtgcgccatgtttgtagcgacatttccatatcaaccggtgtgttaacaagtatgcttcgccataaatggggcttaagtggaataatacccgaacttgccgaacaaggattagcctggatagatgcagaagcagtggcaaattcacaaaaaagcagagctgaccatcggcaccatgcaattgatgccttggttgtggcccttaccacaagatccattgtaaaacagtttgccgatctaaacaaatccaacgaactgcacaatctggataaacacattggctctggcaggataagcataccactagaaccaatcccagggttacgggcacttgctttggaacgaaccaagaacatccttgttagccaccgtgttaacagaaaggtgcgcggccaactgcacgaagaaactatctacggcctgcacaaggactacaacggcgtacacattgctaacgcaaacgggatgcccttatatgccgtacgtaaacctatcgagtcattatctcccggcgatgtactgtctattatcgatggtggcatacgccgtgccgttgcaaaccgactgttagaacttggcgaggatattgacaatcctaagtttaccgtgcccaaaacagcttttcttacacctttgtttttgcctaaaaaagacggcagtaagggtccacatataaaaagcgttcgcattgctcgcccaagcacaggtatggtgcgcattcgcgagcacggtgcctacgcagaaacaggatcgaacgatcatattactctcggaccgttcaatgaaaaacggaaacgcgagtacttcaatgttaaaacgttgtttgaggcaagtagtgccatgaagggcaagcaaacgaacacagaggctatgactttccgaaccaatgaaatgtatgtgcaagaacttgataatggcgaagggaacagtgcacaattttatagagttcaaaaaatcaataaggctgatgggcagatttgctttcggcatcactccgctagcggattgattgataataattcacgattacttaagacgccaaacacagccaccggcgcaaaagtagccattgatgccctgggcagattactaaattcttaatgttaaagcgcacaattatcattcagtccaacatctttatcagtacgcgaaacgagcagttagtattgaaaaatcgcgagcaagatgttgaaagttctattccaatcgaagacattggtttgcttgaaattgactccttgcaggtaaccattactgcggcggctatttcaaaactagccgagagtggcgcaacggttctatttacagattcaacacatcatccggtaggaatgattacacctattgttggcaacaccttacacgccgagcgaatcagattacaggtagcggcaagccgaccaacagagaaacgtagttggcaacacacagtgaaatgtaaaatcatgaatcaggcaaccttgcttgaagagttgggactgccattcgcttctgtacgaagtaaagcggctaaggtattgagcaacgacagtactaatcgcgaagccgtagccgctagtgtatattggaaggaactcctacgccccttcggatgtggccgcgatccggaaggcccttatccaaacaactatcttaactatggctacgctatacttcgggcctgtgtagccagggcattagtatcttctggtttgcatccagcccttggcataaagcactccaacaaatacaatgcctttgcattagctgatgatataatggaaccgtatcgtccgtttgttgacagagtagtattcaacattgcatcggccaacgaaccatctttaacaataactccagatgtaaaaaagcagctattaagtgtacttacgcacgacacgttctgggatgacatgcggcgtccattaatgaactctgttgcattatctgctgcctctctagtccacacacttgctggcacaaagcaagtgcccgaatttcccaggttatgcgaataagcgagtatagagccgtgtggatatgcgtaatgttcgatctacccactaccacactcgccgaaaagcgtgcctatgttaaattcaggaaaacattgctaaaggacggcttttcaatgctgcaattttcgatttacgttcggcattgtgctacctacgaaaattctgaagtccacacctcccgaatacagaattcccttcccctgcacggagttatcaacgttatcacaattaccgataaacaatactcaggcatgctaacatattggggtaagaaacagcaaacaaacaaggcaagtccagcccaattagaattattttagtaaaaaaaacgagcatttcaatactgttacagtaccaaaacactcgttttattccaagcaataatccgccaagcacctagttgtaatagacataaacgagcgtgagttatcaaagatctgcactcgtagccaattcacaac

SEQ ID NO: 3862 - DNA, 23127 bp, synthetic construct
  source 1..23127: mol_type = other DNA
  misc_feature 1..23127: note = Synthetic
ttgttgtttaaagttaaggatattatctatagcgtttttaatcttaaagaagaacttatcagccttccttatgatttttctttggcgggctaaggcagatatataaataaaatggatacttgatggatgccgtttggcataggcatgacggtaggctgttttaaaaatggtctattatgtatataattaccttagaattaattgacataattatatttatatgttaaaataatatgtttatttaattaaggattctatttatggtttggattggcttaattattgttttaattacactttatgcaataataaaaaattatgaaactcgtttaactttattcacatccggactgcttatgtcggctatcgctcttgttcctatgggcgggattgatgcgtttattaaagaattaaccaatgcaggactggtaactacaattatcacggtgctaggttttagctatgttatggataataccggctgttctaagcatttagtggttatggtatctagtgtgcttaaaaaagttaaaataattttaattccaggtgcagtgcttttaacttttattttaaacattgctttgcctagtgctgcaggtgcagcagcggctatcggtacaattttaattcctatgttaattagaaacggcgtggctccagccttagctggaagcgcagtgctgctaggcacttggggcagcgtgttgtcgccgggtttaatgtttaacccgcaagtagcgcaaatagctggtgtagatgttatgacagtaattgccacattcgcaagacaagtatttatcgcagcttttgttgcagcggttattttagcaattatcgcttatattaaaaaagaagcgccaagcaaaaatagtaaaattgttgaagaagaaaaagaagattttaaagttaatcctctgaaagctcttgtgccgattgtgccgatttttcttttaattattggctctaaacagattgggttgattccagaaattagtgtgccgcaggcaatgattattggtgttatgcttggatttattatagttagaaaagatattgtagctaataccaagcagttttttaaaggtatgggtgatggcatgaccgatattgttgggcttattgccgctgccgcaatttttacctttggtatgggtgcagtagggcttaccgatgctttaattgatattatgaaatcttccgagcatattgcaagaattgcagcagcggctggaccatttatttttggagcagtatcaggatcgggcaatgcggcagcgcttgcttttaatgcagcaataactcctaatgccgcccaatttggcttgggaactattgaattgggatctatggcgcaaattgctgcaggacttggcagaactatgtcgccggtggctggttgtgcaattatttgcgcaaaaattgctggagttaatcctattgaattggcgaaaagaaatgctatcccaaccattgtagctaccattattgtaatgctaaccctgctttaattagagaggtatttttatgagcgatttagaacaaaaaattaatgctttggctgaaaaaactaatgaaaaagctgtaagcaatagacgcgattttcacaagcatccagaagttgcctggacagaattccgcactacatctaaaataatagaacaactgcagcatttaggctatgaagtgtttttcggcaatgatgtaattgctgaaaatgctatgatgggagttcctaatgctgatgttttggctaagcatcaaaaaagagccatagaacagggcgcaaatccagaattggttaaaaaaatggatggcggtaaaactggagtaatgggggtattaaaatttaataaacccggcaaaaccgttgctttgcggtttgatattgacgctttaaatattaatgaagctgatgatggcaatcatttcccgacatcaaatcattttgtttccattaataaaggggttatgcacgcatgcggacatgacggtcatacagctactgggctagcgattgcagaaattttagctaaccttaaagatgaactttcgggagttgtaaaattaattttccaaccgggtgaagaaggtgttaaaggtgctaaggctatggttgccaaaggcatagttgatgatgttgattacctgctaggattccattttggctttaaagctaataaaacaggcatgtttgcttgtaatattaccgattttttagctacttctaaaattgatgccacatttacaggtaagccggcgcatgctggagctttccctgaagaaggaaggaatgcagtgcttgcggcagcaagtgcaactttaaatttgcatgcaatttctcgtcatggatctggagcttcaagaataaatgtaggagtttttaacggcggaaccgctagaaacattattgccgacaatgctacaattcaaattgaaactcgcggtgcaaccacaagtattaataacttcatggtagaaaacactatgagaatacttaaaacaacagcagatatgtatgaaactccggttagcataaaagaggttggcggtgcaagtgcaggtgagaattctccggaactaacctcatttttaggaggtattgctaaagagactaatttatttaacaatattttagatcatgttaattttggcgctagtgaagatttttcttgctttatggaacgcgttcaagaaaaaggcggtgctgccgcttatatgatggtaggcacaaaccttgctgctcagcaccacgactatcgctttgatatagatgaaactgctttgcttaatgctgccaaaataattaccatggctacagcaaaactattaagcaagtaattactataccataactttaggtaattatatataagaccaacttcgtcatgcctatgccgacccatgttaatatgcaaatggataccggcgtagccggtatgacggtggttggttttttgtatataattaccaattttaattttatttttcatctgctgcattatccatagtccgtcgtaatattttaatattttcattaatccggtttttacttaacggataccaaaatgtcaaaattaaaacagctgcaatagaacaaaaagcaggaatgccattggctaaatagtaaattcctttaactacactttcactttgttccgcaccgccagtagtagatggcacaaaaccaataaaggcaaagactactgccccaaaactgccagcaattgcttgagctgctttacgggcaaaagaatttacggcataaattgagccaacttcgcggatgcctgtaattacctgctgattatcaataacatcgttaataaatgcccaaaccataatgtaaaacacagtaaatccaatattgccaataatatttaatgtaatatataaatatatattattagtgcgcagaataagcaaagcactaaacataataaaagctatgatgagtgccgccatagttgattcgcgccgtccaaaattattagttaagtatgaaacaaagggagctactgtaaaaaccaaaagcgactgcaaagttaagattatcgctaaggattcaatattgccaaagtaataggtaaatagataggtcatgttaatgccatttaagttttggtttagcactaaaactaaatcaagcactactaaggcaattaaggcgcggttttttaacatgtcttgaaaaagttttttcaagggcaaaggttctgctctttcaactttaattctttctttagtcatctttgtagctaaagaataaactataagtgctaaaacgcccatgcaaagaactacaaaaaagaatttctcaccattaagttttttaacgccatctatattcataaaaataactaatggaattgctaagtttacaatcatagatccgcaagtagctcctagtgttctccaagttgaaagcgaggttttctcaaaagagttatcacttattgctgcagataggctgccatagggaatgtttacgaatgaatacaaaataccccatcctaaataaattatggaaacataggcaatcctccacgccatttctaattgattaacccaaggcacgcaaagtaaaactgccataattaccagcggatacttatatgtatctatccaaggcttaaagcggttgccgttgcggagcttgctaacatcaagccatctgccgactgctaaatcggcaaaagcatcaataagccttgctgtaaggaataaaatggcaataatatagggttcaatccccataatattggtaaggtatatcattaaaaaatttgcaacaagggtaaaggaaaaattatttcccatatctccgaaagcatagccaattttatcataccacccaaaaggtgatgagcggtctgcggttattttctgtttgtagttcattttttactccaatgttagttgttgtcatcacctaaatcgcaattaagtctttaatggctaattctgcaaaaacgacaaatgagttatctttaggtttagataatttaataattgcttgttttttttcgccatcgtaaaaccagccttcctttgatgcgctaaatttattaaaatttaaaaaccgcggtaaagttttatcctgcagttttatatttaaaggagatgctttagagcagataagattaatggttaaagcatcaacagacgactgataattgccaatggagttaaagctgatttcaatgccatttttttgcagcagggtagatatttttgttaataagcattctccttgtttataattttctgttttgccgtcatcttcatataaagcaaattctgcagaagctgagggttcaatggttatattcaagtaagaaatattatcattatgcaaattcattacaccaatggcttcaattaaaatgcctcctgtccgtaaaaacataggaatactgtctaaatcaacaggaatttgaataatttgtccgccttgatagtatttatatgtttttaaatcataccaattgctgccattggggaggtaaatatcttttagggtttgtcctttatccagcacattagccaccagcaaacttctgccaagcatgaagttaaaactttcctcgtgaacctgcgtatcttcttgaaattcataaactagagggcgcataatcggtgagcctaatgttgctgcctcgtgtaaaagagagtaaaaataaggagctaaagcataccgtagctgaatggcacgggcaatatattttgtataagcaggatacatccaaggttcagttaccgtattatcggtattgcaagagtggatagaaaaacgcggctgaaatattccattctgcacccagcgcacaaaaagttctggttcaggaacacctccatcaaagccgccaatatcacagccctgattggcaacgcctgataatcccattcctaaaactgtggcaacattatatttaagattatcccaagtggtagaattatcaccggcccaagtttgagcgtatctttgaatgccggcaaaacctgcccggctgactaggtatggtctaacattaggcagatgtttatgaatggcatctttagcggttttactcatcattgttgacataattggacgcatggcagcaatatttgtctgcagcccatcagcttcacacatggcgtcatcatcgttaatttcatattcattattatcattccaaatactataaattcctaagctaagaagttgttcattcatatatgccgaccaagtttcgcgcccagaagagcttgtaaaatcaacaaaataagcaagtccgccccaatatctatcggttttaaaacctaagccatcggcttcttttatataagcattagacttagtaaaattttcaagcaatggatgggtggtaagcataccgggtttaacattaggagcaagcagaacaccgcgtttagttaattcatcaacaaattttgaggggttgggaaatctggcactattccagttaaaaacatagcgtttgccatttttggctgtatatcccgagctaagaaaaaatccgtcaatgggaatattttcttccttacaggtatctataaaattaagaatggcttcatctgagtttttatctaactcggtataatacatggttgatcccatatatcctaaagacgcgagcggcatcatggcagattttccggttaaatcggtataatgctgcacgacattagcaatgctttcgcctccaataaaaaatagatcaatatctccgccgtctgctgcaaaatagctgtaatgatgccagtaattactatgttcgcagcccatatcaaagcaggaatcgtaagaattattataaaaaagtccatgcgctaagttagtgcggctattaaagttgatgtagaaaggtatcattttataaagaggatcgctttgttttccgtcgtagccaagggcatcaacattgtgcatacgcatacgccgcttagctttattaagcaagccagatttttcgccaaatccgtaatacttgctgctttcttcccttatgctataatgaaaagactgtcctaagttgttctgcagaaaagaacggttcggtaaatcttgatgcaggatattccccattttatctaaaatggtaaagtaaaatggttcagcgttgacaagcaaatcgtagatgtcggattttaccaaaaagccgtcagcagttttttctaaattaaagtctaaaggctgcacgcgggtgcggtagttttccattagcttgtcaagattatcactccagcccgttttggcaagtgcataagaggattccactccaaattcatttttaaaagttccgcgaagacgaataatatttttatcaagaaaataaacttgaaactggatgccttcggtttttatatataagcagtctccgattttttcaacggattttaaactattgctggttttcattgtatattatcctttggtgctatagaatttttgcatggcataaaaagcaagttttttatgttttttatctgttgaaacaagtccttttatattgtaataattctgtttggtatgcaggcggcgagggcagcgaaagtcgaataaaatccaaggcgacatgcccttgatgtaatcaattttagatagtgttgcaatttgctgttcgtaaatatgcagttgattttcctcagtatacatttcatcttgcggtccatgatttttgcagagtgcgtcagctccaaactctgtaataataacgggtttctgctggttgctgttggtgaatattttaggcagccttgaaaaatctggctcataccagccgtaatattcattaatgccaataatatctaaccgctcagctagcctatccataatattaagctctactaaatcaactaagcaggcagcagaaacaaggcgggttttatctagctcatgggctttatcggctaattttcccataaaattaaaacgggcatcggtatcggcattttcattgccaacaccccatataataacgctagcgcggtttttatcccgagtaatcagttctgttaattgattttctgcatctaaatatgtattaggattttcaaattgaatagcccaatacacaggaatttcttcccataaaagcaaaccaatctcatcggcaatgcgggcagccttatcgctatgcggataatgggctaaacgcatgaagttgcagcccatttcaatggcgattgcataattctcgcgaatttcagcctcactaactgctttgccgtttaatttgctttcttcatgggctgatatgcctttaagaaaaatactttcgccatttagcagaatattctttccttctgccttaatttcgcggaaccctattttatcggtaattttatcgccctcaaactctaggaaaacttcgtagagttttggattgttggggctccataaatgcggatttgcatctattgtaatttcgcctttgctattagctattgggagttctgtattaatattcaattcaggaatatggatttttgctatgccgcttatattgccgtcaacttttatgaaagcagaaattttgctgaaattgctattaggcacaagctgtatgcaataggagcgaataaaatttttcggcaggcggataagctctacatctctataaattcctccgtaattaaaccaatcggtattagccattggaacattttcatcgcggcgcacattatttacaaccacaagtatgcggttttgcttttttagaatatcagttatttcaactgtgaaaggagttgaacctccttgatgcatgccaaggtaagtttggttaaccgtaattattgtgcggtaattggcagcaccgaatttaatgaatactcgttcctctccatgattcttataagtaaattcccgtgtaaaaaccatgctgccttcgtatagaaataattttttgttctgcacattccaagagcttggtataggcatggtttcccaagtttcaaaactataatcaagcggaaaagcccgacccattgaatcaaactttttttcttcaaaccatttgttgcgcaggcagctgtcgtattggtctatgccatactgccataaaccgttgagactttctgttttgcgggaagccgtgataatatcagagtttttgattggtttatttaaataccaatcccagtaagttgtggaatggattccttcttgaaaattaccagcttctttattttttacctctttagtcataatagtctcctgctttaattaatttcattttataaaaattagttttattaattaaaacatatatagcaatgagatgtaaagtgatatttttttaacattggcattttgttgtgcagttcttttgtttgttgagattggtatggagattgtttttaatgtgttttataaaacagatataaattatttaagttatacagattcgatagcttgctatattaacactttattaactaattgcatcttataattgtattgcaattttgtgctgtatgatgtatttttttagtaatgtaaaaaattgtaaatataaggtggtttgatgaaaaagtataagttaggtttagatattggcactaatagcattggctgggcggttgtttcttttgagggcgaggttattactgaatcccaacaaaataccgtagatgttccgcttgaaatagtaaagtctggtgttaggctttttagcgatggcagagaaccggattctaaagtaagtttagcggcatctcgttcaactattaaagctcagcgcaagcagaagcaaagaaaaatcaatcgggttaaacttttaaatagctatctgcttaaagaaaatattatttctcaagaaaatttagacactcatgtttatacgctaaatgcttatgaagccagagctaatgcagtttcaaacaatccggaattaaataaagttctgcgggcgattcttcaccttaataagcatagaggttattatgataattctataattaagccagatttagcaaagattaaagctgaagaatataaaaacattttaaaggtaatggaagaatttttaggtgaggataataaatttaataatcttactgaagaagaaaaagaaaaatttgtagcagatattttatcccttgaaacttataaaaatgataccaataaaaaacaagaattttttaataaatggcaattagagggttttgaatttgaaaaagagataaaatttaagaaagatactaaaaaaattaatatttttcgtgaaataaagaatgctaaaggtttaaatgatgaattaagccgcattaaaaagggaattccgcatttagcaaaaatcttaaaagatggaaatttaaccttagggcagtttttatataaacaatatttagaaaatgaaaaaattaaagaaactaactttaccgcccaaaaagccgtgcggtttactccagagggtgagtattttgcaagtagagagatgtatgaggatgaatttgaaagaattaaagaattatcgcaaaaagccagtttgccaatttctgtaaatcaatggaatagaatacatgatattatttttaagcaatatccgctgcagtctaaagagcatttaatagagaattgcgttcttgaggaagatgagaaggtagctcctaaaactagcccgatttttcaaaaattccgcagtttgcagtttttaaataacctgcaatatgattttgtggatagtgaatctgacaaacctagctataaaaacctcaatcaaaaacaaaaagaagatttattaaacattattaatcaagaaaatttaactttaaagaaattgcaagattctttaggtaaagaatataaagacaaaatcttaaaaactaactggaaagtcaaagatgataatgttttaatgaaaagcaataatacttttgcggttatgaattcttgcttgggtgataagtggtctaatcttaccttagaaagtcaggataaattagttaaagatattttagatttagagtttttagatattaatgaaaataaaaaagaagatttttatacaaaatggcaaaatctaggagaactagataatttatttatagaaaaaggcacaactaaaactcctaaaacaatttttaccgaattgactaaagaaaaaggctatgccaactatagcaataaagccttgttaaaattaatagatgcttgggaaaatacaaatggcactatagataaaataatagaacaggtttatccaagctatagccatgcagaagaaaaaggagtgttgccaactgtaaaatatgaattgccatactatggggatttggaagtattaaagaattctttaaccggtgaaatttatggcgatcctgttttgaaatctgatggtaatgttgaactttctttagaaattaaaagaggcaaccaaactttaactaaaaaagccatcgccaaacatggttcgcaagcacataaagaactaactaccggcaaaattaataaccccaccgttcatattgcgttgaatcaaattagggttgtggttaattctattattgcggaaatgcagaaaaaatttggcgaaggttttaaatttgacgatattcatttagaaatggctcgggacattattaattcgccagcaactaaaaaagaaatagatgataaaaatcttataaataaaaattggaatgaattcatagataaagaattaggtcataaggctagtagagatgaaaatagaaaactaaaattatggtatgaacaacaaggttatgatttaagaaaaagtcctaaggataatcaaaaagttgaaaaggcacaatgtatttattgtggagatagcataggatatacaacagatgttgaggttgaccatattctgccaatttcgcaaaccggtgatgatagttttaccaacttagtattagtttgccgtcagtgtaatcaaattaaagaaaataaaactccttatgaggcttttagtaatcataaggattataattatgatgatttagtgaaaagagccgagaaaatttatggtaaaaagaatcctaaatatcttcgttttacgccatcaggcaatgaaattgccgaaaaactgcgggaaaatttttctaacaatcagctgaacgatacaagatacattactaaggttgcaaaacagtatttatcagcattagtagaaaataaccataatgtggtatgtatgcagggaaaaattaccagttcttaccgtcattatttaggtttgaatgaaatattaaatgtaaatgaggaaaataaaaagaatagagacgatcatcgccaccatagtttagatgctatcacagtggctttaataaatagagggcttgtgcaaaaggttagcggtgaattagaaaatagaatgcagaagtttaaagagcaaaaaattgttggtgaggcttatttaaaagaacgaaaatcggcaatgggcgatattttaaaatatagtgtttctaatgaccttattaaatatggagatttttataataaagtgaaagaatctctaaatagtataataccaagtgttaaggttaatcataaaacacagtcggcactttataaagatacggcttatggtattgtgcttgatagcaagggagaggtaattagaaataaagaggggcaatatttaataaaagaaagaaaagctattgatgggttatctttaggagatatatctagtgtaatttgcttaaactataaagctaaccctgaagagccttataatgctgaagaagatagtttgcgaatggatattcgtaaatatttggcagaaaatggtttatctgtttttcaaactgacatgtggaacttgaaaaaagagattaaagagcctaagggcaaggaagccaaagaattaagcaatttattaaaaacttttggtgaacatcgaggcattaaaaaggtttcgttgaaatactatgctaccgttaaaccgataaatcaaaagcaaaagcgtaaggatacttattcacaattcacgaaagatgttaaaggaactgatagtccttataaagcctatgttgttgattcttataaatgtgtggatatttatcaaatcagcaaaggggttgatagaaaaacaaatcaagaaaattttgcttatcaaggtaattttattttatatgcagattttgctgagcataagggcaataggggagctgaatcttataaaaatagtgaaaattttaaagaaatattaactaaagataaaaatccaaaatttttaatgcgattacataaagaagataccgtagttgcttataaaaaagaagatggaaaaattgatagtgaaaaagatattcaatttttgtttgttgttaaaggacttcaaaggttaggtggtcggttagatttaagacctttattattaagtgataataaacaacaaccttataatattagcacagttttacggaaagaacctaaagaacatgatagcttcttcaatctcaaaaaagtagctgttttaccaaatggtgaaattcgtggtattcaaatggaaagccttcctaaagagtataaaacatggctggaagataagaaaaaagaagctaaaaaagataaaaaatctcaagaaaataataatcctcaagagaatagcaaagaatcaacagaggaaaataataacagtgagtagggcattaaaatgatacaaaaaataatagaggttaataaagataacacttatcttagtctttatcggggatttcttttaattgaagaaaattccgttgagatgggcagggttagctttgatgaaatcgctggggtggttatttcatctaatgattccactttatctaaaaatattatggttcggcttgcagaacacaatataccgcttattatttgcggtggtaattatctgccgatttctatttcgctgccgcttagcagtcattatcaaagtaaattagtgctagataaccaaataaatgcctcgctgcccttaaagaaaagattatggcaaaaaattatccaagagaaaattaaaaaccaagcctatgttttgcagcattattctactaatgaaactgaatctaagtatttagaaaatatggcaaatgatgttcagtcgggcgatagcacagggcttgaagcccaagctgccagatattattttaataaaatgttcggtaaagatttcacaagagacaagcaatctacagatcttaccaatgttatgctgaattatggctatacggtgctgcggagtgcggtttgtcggtcgctttgtgcggcagggctcaatttatctttagggttatttcacaaaaatgcctacaatcatttttgcttggctgatgatttaatggagccgtatcgtccattggtggattataccgtgaaagctatggtgctaaatgaagaagataggattttaacaccgcaaattaaaaaagaattagcagatattttaattttagatacggtatataaaaagcaaaatataccaatttttagggtttttaactatatatctcaaaatttagtatcttgctttaaagaaggaagcccaaatattcaattggctaatttaaaactatgaaaacagtattaagcgggtatcaggttatgtggatgtttgtaatgtttgatcttccaacggaagaaaaagtgcagcgaaaaaagtatagggaatttcgtaatacactgttagatatgggatttaaacagttacaatattctgtgtatattaagttggcagcttctaaagaaaccgcccagcggatggaaaaagtggtgcaaaatgctttgccagaaaatggtgatgttaatgtattttgtattaccgataaacaatatgagagtattaaaagtttcacaggacgaaagaaaaaaactaagggtagtgagactcaacttatgttattctaaaaattttcactataaaaagatatttatctaaaaagttttggttcgagttgaaacctaatttttaatatgctataatccggaagaaaactctaccgaagtagcttttgttcgagttgaaacctaatttttaatatgctataatagaaatattctttttatctaaatctcttaagttcgagttgaaacctaatttttaatatgctataataataaccttgttagtagtaaagataaactagttcgagttgaaacctaatttttaatatgctataattacatcaggtggtgatggtacaagatcattgttcgagttgaaacctaatttttaatatgctataataaatatatgggttaagccacctgttgaggcgttcgagttgaaacctaatttttaatatgctataattaaattttatgtttctacaccgggagttaagttcgagttgaaacctaatttttaatatgctataattgaaaatcagccatttaatagcctagaccgttcgagttgaaacctaatttttaatatgctataatatcgccactattaaaagcaaccactaagtagttcgagttgaaacctaatttttaatatgctataataataatccaaacatggctacaggtaatccagttcgagttgaaacctaatttttaatatgctataattcgtgctttgctctttctttagcctcagcagttcgagttgaaacctaatttttaatatgctataattttcctatgttagaagataagcattcattcagttcgagttgaaacctaatttttaatatgctataatttttttaagtagtgcaagtcaagagagtttgttcgagttgaaacctaatttttaatatgctataattgaatatcagcccttaaatcatcatgtatcgttcgagttgaaacctaatttttaatatgctataatattaagagccttaatcataatagctctactgttcgagttgaaacctaatttttaatatgctataattgattggctttatatacctccttcgcataagttcgagttgaaacctaatttttaatatgctataataccacgacgagaacaaccaaggtaatctgggttcgagttgaaacctaatttttaatatgctataatttttcatctatagataaataagcgttagtggttcgagttgaaacctaatttttaatatgctataatttaagttgcttttgtcgtttgtgctcctctgttcgagttgaaacctaatttttaatatgctataatgaattaattgaaaaggataaaacaacatgggttcgagttgaaacctaatttttaatatgctataatatcagcaaggtctaaataaaatgtggagcagttcgagttgaaacctaatttttaatatgctataatgttacaccagaaagtattggctattgctgcgttcgagttgaaacctaatttttaatatgctataatcagcgcagaagataaaccaggcggagtatggttcgagttgaaacctaatttttaatatgctataatagcgatgtttgccacattaacttacaacaagttcgagttgaaacctaatttttaatatgctataatcaacaaggaggtggagctcaaggaggcaacgttcgagttgaaacctaatttttaatatgctataataattaaaaacatacataaacattaaacatagttcgagttgaaacctaatttttaatatgctataatccctgattagtttccgcgacctcatttcttgttcgagttgaaacctaatttttaatatgctataatgataaggaccttctaccgcttccagggatagttcgagttgaaacctaatttttaatatgctataattgaaaatctataacagttttcgttccgcctgttcgagttgaaacctaatttttaatatgctataatagtccaaaatctttatgaacatcatcctcagttcgagttgaaacctaatttttaatatgctataatatgatgaagatttagagccgcctttgagatgttcgagttgaaacctaatttttaatatgctataattaaaagtaatacgagggagatacattccatgttcgagttgaaacctaatttttaatatgctataataatggatttagattaaacgatattccaaatgttcgagttgaaacctaatttttaatatgctataatcatcgtcgtattccccagcgcagtatatgggttcgagttgaaacctaatttttaatatgctataatataaagtaataggactaagaggaggacgaagttcgagttgaaacctaatttttaatatgctataattcaacgatatggcaaaagcaggactgaaccgttcgagttgaaacctaatttttaatatgctataatagcgcaaggaacaattaaaacaggcagctggttcgagttgaaacctaatttttaatatgctataatataaacaagtgaaggggttaattttattgaagttggaatgtttttagcaaataaaaaatgcatgtttttaataaaagaatcttctaattttatttgtttataaaatatattaaaattttgacaaactaaaaaataatatttattatataagtagcatattaaaaattaggtttcagaatctcgtaacaagataatatatcataacattaaaaagctagattattctagctttttttattatcctatataaagaatccagtatttatttttgctataaaagggaataaaattatagagggaaataattattctatgcagaataatctatatcaaataacaaaataatttataaattaacataagaaataataaaatgaacgaatttgatattatagaaaaatattttatgccgttagcggcaaaggcaggaaaggaatctctcaatttaagagatgattgtgccataattacatctaacaatcaaatagttatcaatgttgacagtattattgaaggcgagcatttttttacggcagatccgccttcttcaattgctcataaattactgcatgtaaatttatcagatattgcagctatgggagctagtcctaaatattggactttagcaatttctatccctaaaaatcgctttataaacgaaaaatggctaaaagaattctgttatactttagaaaatatccaaaatcagcataatttttatttaatctcaggcgataccacattcagcgccagcaatctaattttaactgcaaatatttttgcagaaatcccgaaacttcaagctcctttaaagaaatctacggcgcaggttggcgatgctatttgtgtatcaggatatattggcgacggttattggggtttgcagatgcgccgtgatgatattaaaaatcaaaataatttccacatttctatagatgataaaagctatcttataaacagatacctttatccgcaggcaaggttagaactggggcagatgcttatcactgctgccaattccgcaactgatatttctgacgggctttgggcagatctggaaaaattatgcaaatattcgggagttttgggggttattaatgctggttatgttccgctgtcggcagctgtgcagaatattagcgatagagataaaattataaaatctatcaccggaggcgatgattatgaattggcatttaccataaatgaaagtaaattagctgatttaaaaaagcagctaaccgttaataatattacaattcccattacaaaaatcggctatgtagaaaaagctgcagaacaagattatataaagttttttcataatgatgtcttactgcaaacaagccataaaggttataattattagcttctaaaatatggtgtagaaaattatctcacagtagcaggaagtaggaagatttttttatagttgtaatcatcatagaaggtagggcttcttttaaaaatgttgtatctaattccaatatcaacagattgaaagttattatcgctaagcgttttgtatgttcctatcatattgatgttggaatagttaagagtaatatccatattattattaaaagaataataagctcccattttatattgataagcagggtaggtaatttgctgggctgaaaaggcgttatttccgccgattgctgccataccatagcctaagccaactcctgtaaatatggtaaaactttgtgcaagcggcagctcatacaaaagattcataaagcctaaataattattagcatttacaggttttgtatcaaatagttctttattaacttcaggcgagaaaaaagcagccccagaggatgtatctattaaaatattattaaaggtgttatcttgtgttccgtttatagttgtttcaacccatacgccattattaggagagcatatagtaggataaccaggagcgttgcaaaaagattgtgtagtatttatatagttagaatttaaagaaatatcatagagggaacttttaggtttagtttttaaaaaagtagttttaacttctccttcaattctaatattcttaaaagcaaatcctccggttaaggcaaaagcaggtgtgttttcctgcttaaagttaattcctttaagaacgctgttgtaagtatcaacagattgatagtcgttaattatttctacaaaacaactagagcatccgggtgtagtaaatttgtattcattatgctgtgatacattctgctgaaaagtttttgctgaattaatattgctaattttaatatcacctttataaatatatccaatagttcctccaacataaaaacctctgccgtcttgtgcttgtaatgctgaggttaaagaaacaactaaaattattaatgcaaatattctcattagtttccctacagtatatacattaggctaaaatcaacactattctgtgaaattggcttaacattaaagctattaaatttaacatcacctatagaatgaatgcttgtgaaagaaagcattaagcgaaggtgctgagagttataaggattgtagtatgttccaagtttgtattggtaggcataaaacgagctattctcgtttaaatctatacttatgttgctttgtgaagataatttaattgctgctaaacctgctccaactccgctaaacaacccaaaatattgcataactggaatatcgtatagagcatttagaaagtaatagttaatattatttgataatgctatattaggggtttctccattgttgggaattaaactaaatatatcgctagaaacactataattattattatagttttcctcgtaattcatttccgcatatggacatctgttgttattatcacatatatagctaaattgagaatttaggttagaattaaccttaaatttagtttgcaggctttcaagattctttttaaagctagctaatttaaactctccttcaacccttaaattatttaaaaacatatagcctaaggcaaaattataagaaggagtttgagaattttttattttataactggcaactgaataatctgcggtctcactcctatcaattaccttatatacatcacttaaataaagagagctgccgctgcctgtatcgcctataatacacctgctgcagatcagctctttattagattgggaagaattaatggtaaagctaggaaatagttctgttttaccattattagcaatttctaaagtattattgcttaaagaaattcctgcagaaaaataaaattcagcataggatttttgcaaattaataactgtaaaaaaaataattaaaaagattccaaaaataatttttaagctaatatgcaattactaacaccccatacgatactaattgaagcatagaatatcataggaggggtgagtaaagcaagtttatacttgaatgttgatactttattgcgcagttttgtgtaaaaataagttaattactgctaaaagtattaatattgttaaattgagaatctcttggattggtttttataaggatattttgagttttagctcttacaataggaatatttcttcgtttattgtaatctaaaacttcaacatttttgattttattattttcatcaaaattgataataataactttagattctatgatagttttatttaaaaatcttaattttctattatatttttcataaatataataccaagtattttcattaaaattagctttaatggtggtagcccctagcattgcaaaaacttgatctttacttaagccgggtttgattttatctagcttgtcgggaaaaatataattaccctcaattcttagtccggaagaacaaccataaagaacaactacaacaataaggataagaatacttttcaaataattcatttttctttctatttttttcgttaattttaatcataacaaaaaaactataaaaataaaagcaaatgatgtaaagtttaattttatagtttttggaatctattttaatgtataaatttttgttctttttcatattgctttttcctttagaggcaatgggaaagctaataaccagcatagaagttagcggacttaaaagaacaaatcctgctgtcgtgcgcaatgccataagcattcaagagggtgatgatttcagcagctttagtgaaacagaggttaggcaagcccttaataaacttggattgttttcaagcatagaagtatctgctgtagaaagctctgatgatgtgaaaataaaaataaatcttaaagaaaaaatcacaaagctagtagttcctttagctaaaagcggcactaatgaaactgcagtgggattattatttttagacagcaattttttagcacgcggcgatttatttgtagcagttgccatttacggacaatctacaaatttatactccatagggttagataataaacacttccttgatactaattttaccaataaaatgtatatttcttatgattcctcgcaatttagcaaccaaagtattctacactccagtatctataaggaatattttcaaaaaactgctaaagcatcttacgcttttggttatgattttggctggattaccccgcttttaagcgtctcttataaaaattttgcaatttccaataaaataaatgataggcaaaagggggaaacttatgcaatatcacccattgtatccatagataaaatgacttatgccgattttctagcacatggttttgacggcaaagttagtgtatctaggaatattacaaaaatagataactgcacaattccaagcaccgcatttacaggtcaaagcagctattcttttaaaacatctaacaataataaagttttaatggctttagatacttttatttcagatctgccttttatagagcaaaacaggacatcttacggcagaggcatgcgcagccttgtagatagaaatatttcttaccaaaattttttcggcggaacattatctaatgaatatttgttccatcgtaatacaatgtttggattcagcaatataaattttgtggaaagcggtaaaattaatggagaatttgataaacattatgtggcttatacagggataggcagcggcattaatatatattttagaaaagttgctattcctgctgtaggattatatattacaaataactttagaactaaggcggctcaagttatttttgtaatgggaatgtctatttaggaggaatttaatgcttaaccataaaattaatgttaatagcatcagtaatacagcaaaaattttgaaaattaaagctaatgcagaagaattgcttaatttagcagcacaaacagaggttttaaagttcaatttgcttgaaggcgaggttagtataactaggaatcttaatagatttgcggttctaggtgaaattaaggctgagtttattcaagcagatgctgtaagtttagaagaaatagatgcttctatttttctgccgattaaaagaatctatgagaaaacggcgcggattgagaattctaaaaaaattaaaaatgtagttatgaactttgataaagaagaagatgatatagataccctagagaacgataccattgatgtaggctttataatattagaagagttaattttgaatattgatccgtttgctagaaaagaatagaataataataaaaaagaggcattatgcttaaaattaagttaatagttggtttatgttttttattgtggcatctgccgctgcaggcaaatgttttttctaatacttttgataatatgcaaaaaactctgtattctccgcaaaaagatttgtatctgcctttttttacttggcatgcaaggtctacctacgatgattatagaatagcgtcctataatgaaagtcctggcggaataggtttcggcaaaagttattgggacgaaaaaaataattggcatggcatttatgctatggcttttagagattcccataacagctggaagccaataatagggtatggctgggagtatatatggtttcttgacggcaatcaagattttcatgcaggtttaggctatacggcaggagtagctacaagaagaagctggggttggcgtcctttgcctattatattgccgattacttccgtaggctataaaaaagtttccgtgcaaatggcttatatcccatggattggacaaaattcaggaaatatttggtttttttgggttagggttaatttaatataatagatagaagataaactcaatagcaaaaaaaatatttgctattcttatttttttatatataatatgttgattgtaggaaaaattatgcaaggagtttacaa

SEQ ID NO: 3863 - DNA, 23378 bp, synthetic construct
  source 1..23378: mol_type = other DNA
  misc_feature 1..23378: note = Synthetic
ccgaatccggcccttccaggccgcgctcggactcatagaggctgtcctgtccttccaattcggcgcccaggttgaggcgcctgccgttgcggatcgcgaggaaacccagctcgccctcgacgttgctggcgccgccggccgtggacgtgcgcccttcaagctcggcggtgacggcgcggaaccgctcgcgcagcacgatgttgacgaccttctggtcggcgccgtagccgtagcgcaggcccacttcctccggcagcacgtcgacgcgctggatggcttcggagggcaggctggcgatctcccgcgggctggacatgcgacggccttccagcagcatcaccggcgggcggccgctggcgctctgcacctgcggccccagttcggtgaggaggtcgctgatgctgctgacgccgagggcgcggatatcgccggcatcaaactgctccagcggcttgacgtcgcccaccaccgcccctcgctcgcgcgtggccgtcacgacgatcgcatcgccgtcatcgtccaggaaggcgttttcttcgtcctcctcgtcgacctggggcacatgctcctgcgtggtcggcggaggcgcgggcggttgcgtctgggccctggcaggcgccgtcgcgagagcaatgggcgaagaggcggcgagcaacgccagccagagagagttatgcgcagtcataaggcctctggacctatccaatctgagaatcgcgtgaggggtttaggatggctggacattccatccataacagccggaaatggcgctttcatgtgcttccggcgcgcgtatggctgaaatacgctgcgtcccggccccaccttagaacaccatttcgcccgatctgaacgaaatgccgcttttccctagtcaggcaatcctgtcgcaaagctgactggcgttctttgatcgacgaagctgaagcgcttatgtcagttttgacacgtttatcaaaaagtgccgcacacattgccgcgcggggcggaacatgctctacgcgatactgaccggccacacccggccgcaaagcataaactcaggaaagggaaaccaacgtggcgttggcaatcgaagaccggctcggcctgcaagatctcatcgcgaactatagctgggccctcgatacgggcgatgtggaggcgctggtcgcctgcttcacgccggatgcgcggatgatcgaggaggtgttcgaggaccccgacatctgggaaggccatgcgggcattcgcggcatcgccgagcattatcgcaacgcccccggcttccccggtcgccagcatcatgtgacgcagacgcagttcatgccgcaggacgacggatcggtgaagatgcgctccttcgccttcgtcaccgaatgcgagggcgagccgccctatctgctgcgcttcaccggctggtacgaggaccatgccgtgaagggcgaggacggccagtggcgcttcttccggcgcacggtgcgcctgtgggacggcgaggtgctcaagaatttccccggccggggcgaatgggtgccgcgcaagcgccccgcctccctcatcatcaagcgctgagacgcgggacggccatgcccgccaaggccccgcccttcaccgaggcgcgctatcgcgattatctggccgccttcaacaagccggatcatgagacgctgttccgggatttcttcgcgccggacgttgccctggtgacactgggcaacgtgctgcgcggggaagcgggcatccgcgcattctacggctatttccacagctgcgtgcgcgagcatatcgacctgatcgccttccatccctgccccggcggcgcctgggtgcatgtcgccatgcggctggaggccttcgaggcgctcacgcaggaggggctggaggccatcggtatcaccggcatgcccgcgatccccaagggcttcgcttatgagaacgagatgttcatccactatgcgctggacgagaacaatcgcctgaagctgctgcgttgcgccgaatatatcccgccgcgcgagcccgtctgacgggaagaaggcccgccccttagaaggggaagaaggcctggatcgcgaggatggcgacggcgccggtgatgatgttgagcggcagacccacccggacgaagtccatgtagcgataaccgcccatctgatagacgatcacattggtctggtaaccgaacggcgtggcgaaggccgcgctggccgccatcatcacggcgacgaggaacgggcgcgggctcaccgcgaggctctcggcaagggcgacggcaatgggcgtcaccagcacggccacggtggcgttggagagcagctcggtcagtaccatggtgatgagatagagcacgatgagcgccaccagcgggctgaggccgtggaccctggtgatgagcacgcttgaggccgcgtccgccagcccgctcgtttccagcgcgatgccgatgaccaccatgccggcgatcaggatgaggatttccggcctgaggccgcgataggcgtcatccgcgctgatgactcgcagcaggatgagcagcaccgcgccgctgagcgcggtggcggcgatgggcgctacgttaagcgcggccagcgcgatggcgcccgcgaacacggcgaaggcagtgatcgccttggcggggtgcagcggccgcttcaccgaaaacaggctggcatcgcccacctgggcattgccgatctcgacggagctgaccgggtccggctcgttctcgcgctcttcccgttcgccggcggcaagcaggcggttactgaccaggaacagatagagcccgcccgccatggccatgggcagccccaccggcgtgatctcgaagatgccgaagcgcgcctgccccgccacgctggccatgtcgtcgaccagcaggttggtcgacgtgccgatcagagtgcagcagccggtcagcacggtgatgtaggaaagcggcatcagatagcgcttgggcgattgcttgagggccagcgccacatcgcgcagcaccggcgcgcccagcacgacgatgggcgtggaattgaggaagcaggagaccccgccgatcatcgtgagcagcagccagatgcccttggtgcccatcgtccggcaaagctccacgcccaatgcgatggcgcgatcgagcaggccggaaagctccagcgcataggcaatgacgaacagcgaggcgagcgcgatgatggccgggctggcgaaggcgccctgcacatcgaccgggcggaccacgccggtcatcaggagcagcgccgcgccagacagcgccaccacgtcggcacgcagccgatcccagatcaacagaccgatcacggccgcgaggaccagcagagtgaggccttgatcgatcgtcataagccgcgtgactcactggagcggagcccgttgtcaatgtcttgacaccttatcggcgttaaggactggagcaatcgggaggatttgctatcaagctgccatgcacgaacccagcctcaggtccagccgtcttgccattgcgggcggtcttgccgcggccgtcgcggtggccggcgcgggcttcttcctgggccgggtgacgtcacccgcgccggagccggtgccgtccgcggaccccgtgcccaccccgcccctgcccgaactcaagacgccccgcgcccttggccgcgccgatctgatcgcgctggggaatcgcgcggcggacgccgtcacttccggccggccgctccccgccgatatcatcgccgcggcggggcggcgcttcgatgtcgcgctgcccttcggctgcgacggccccgcacccgagggcagcgcggtgccgctgcgctggcgctacgataccgacaagcagacgctgcgcatccacgccgccgcgacccgctggaccttcagcgactggggattggcatccgccggcgataccgagccgcagatggagggcttctgggtcagccggccctggtcctcggccgacagctgcccgcaggcgcgcgggcaagccgcggtcacgagcgcgcagccggtgacgctgccgggccagacgctcgccctggccgagatcctgcccgatgggcagcgccgcgccagccgcccttatgagacggtccagctcctcccgcccgaccgcgtctcggccacccacggcttccggctgcgcgtgaccggacatgtcgagaagctgcccggcggtgaggcggtgcaatgcgcccagccttccggcatcgagcagcggccgatctgcctgatcggcgtcgccttcgacgcggtccgtatcgagaacccgctggacgacaagatcctcgccacatggtccatcgccaaggcaccgcgcacggcgccttgaagcttgcccgatcacggaaggccgcgccttcgtcgtcccgtcaggccccggaggaccgacaaccgcggggctttggtgccgaactttctcttgaaccggggcgcaaagtggctcgtgtcagacgcaggccgatcacctctccgccgaaggtcgcgcctgtccttccgatgagcccgcgcagtggcgcgactggcccgtaaggctccgggcgatcagaccgcgaccggcgccgcgatgtggggctgcggcgcataatcctccaccgcgaaatcctcgatcgcatgctcgaagatggtggcgggccggcgcaggatgcgcagccgggggacgcccacgggcgtgcgggcgagctgtgtttccaccagcgcggcatggttgagatagaggtgcacgtccccgccctgccagacgatctcgcccggcgtcagatcggcatggagcgccagcatgcgcgtgatgagcgccaggccgaagatgttgaacgggaagcccagccccaggtcgcaactgcgctggaacagcaggccgttgaggcgcccgtcagcgacatggaactggtaagtcatgtggcaaggcggcaaggccatgcggtccagttcgtccacattccagccggtgaagatatgccggcgcgatcccggattggcgcgcaggctctcgaccagcgcggcgatctggttgtggcccttctccgcccggcgatagagcccctcgcccgcctccggcgcgggttcgtagcgcggccagtcgacccattgccgcccatagaccggccccagatcgccccaacgcgcggcgaaatccccgtcttccacgattcgccgttcaaaatccgccatggcgatatcttcacccgtggcgcggcgatatttgtccagcggccagtcggtccagatgctcaccccctgtgccacgagcgggcgaatattggtctcacccgagaggaaccacagcatctcgcgcgccgccgccttccagaagacacgctttgtggtgagcagcggcacagcgtcgccggcaaggtcgaagcgcaatgtcgcgcccaatatggagcgcgtgcccacgcccgtgcggtcgatgcgctcatgcccgtgccgccagatatgcgccatgagatcgagatattgctgctcataatgcggcgcggcgcctgtggaggcggcggactcggcgggcgaaaggaatgtatgggacatggccgcgaccatagctttccgccccgccccgcgccagtggaggcgctgcccccgacacggaaaacgtccagcaccgggctcgggacacgggccctattgtgacccgcatccgacgacggcatttgaaagaatttagaagaaaatggtcggccttcgcgttgtcctatagaactttgtgcgaggcgccgggcaacgatctccgagttcgcttggaagagatccggcgcgatgaaggcgggtggttgcgtgcggcgtaacggcatctcatcaacggttcgaagcttcggtcatgtcattgccggatagctatcgttttcggtgctgttggatcgcacgccgctagagcggcgttttcggtgtcatagagaagtcgcgcgcgggcaacaggtttgggcgctgtccagtcagcctcgccctgctcctgaaaccgcgcgatcgtggcctcgacaacctcccggtcgatctcttcagcatccacaacgagatagaggccgattccatatgcgtattcccgattggttcgaaagctttcgtgcaccggtggcggctcgttgcggatgattccggccgccacctgctcctcatactcttcgaaagtcagtccaccaaaagcctcgtaagtccgtctttcacgcggtttgagttgatacatcttcaggccgcggtaggcgatgggttcgaactccagcttgaattcggctgcccgctcctcctcgctcatcagcgccgtggcgtggtcccaggcgatagaccctaccttatcccaaaaacgtcttcgcgctgtgtgatttccgcgttccagatcgtgcgcccgtccttgcctaggaacaggaaatcgaaccactgattgaacagcgcgggccgctccggctcatcgaggattagatggctagtgaatttgtctccaaaggtcggcgtattgcccagtatcttgccgcgtagtcggatgaacgcatcccggcgacggcgcggcgaaagctcggagtagggggtgtatttatgtggtcggcgacggcggcgaatcatgatgaaaactcttcgctcagctggtggatagggcgtgaagtgtgatttgcagcggcacctatatagcttgatctagtgtaatagagtgtcagcacttatcagtaagcaccgaatttttatcaatctcctaggcgattttcgagatcatacgctcagcaacccatcgggagcacgaggtgtttctgtcttacggtcaaaaacgtggcttgcatggccggatggtattgcttcggcatatcgagaggaccggatgcaccattgcgggggacccagtctggagcgaagccgaaatcgccgatctgcggcgctgctatccggatcgcgaagcagcgcatacggctttgccacgtcgaactcccggcgcaatagcgaaaaaggcttggcgccttggcctcgtgcctccgcgccgtatctggactggggatgaggtctttcgccttcgcagaccctatgtgactggcgttcccattgcggaactcgtcgagatgttccccggaaagagccgttcccaaatatggaagaaggcgcagcacatgggatatcggcgtcctcgccgcccgccccagctgacgggcatgccattggtcgacagcatccggcatcgcgcatttgaatgctacctatcgatgaccgatctcgatgctttcatcggtcgcaaacgctattttgtttcgccccgctatcagaattggcgggccttggagaaggcgctggaaatcctgggcggccgtccgacggttcattggcccaatgggtaggcctcaggacggcagcaagacagccaagcgtgattcacgatggtcggatagggaagatgccctgctgtgtgcctattacccggactattcagcgcttcgagcgcaccttccgtatcgaacgatgtcggccctgaagcatcgtgtccgtgcgatcggtatcgtgaagcagcggcatatctggaccaatcgagaggtcgttcggcttcgccaagcttatgaagaaggcgtaacggatcgcgagcttgctgctttgtttcccgaattgcgattgtgtcaggtcaagagcaaggcgtctcatataggcgccgtgcgatgcaggcctaagccggtgcgatttgatgttccggcgctcgatgccatccgcgcgcggtcggtggaaatgcggctgtcgttcgttgaactcgatcggcaagcaaagacagggcggtactttcagaagtcttgtcgccgcccatcattaaaacacattgttcgcgccgcagcatttcttggcgcggaagttttgatcgaatggagtgagtgaggctcgaactcctatttggcatcgattgacggccgggcttatgtgcagccgagataacgaattgaggcggcaaagctggtatcagatcgcgagatggatagcttcgcgggtttcagtatgattgcttcctccgattctgatcgagataacgatctctcccacggcggacaggccgtaaaagatagcagtgcgctcaaagcagagcatccgaagacgtcacggcgcattcagagcgctgcaagcgctctctctttcggagaaaaggctgctcaattacgtgtcgtgactacgaataggtggcaaacccctcagagatcatcctgcgcgaaagccgagatgagcgatagcttcctagacgctgcgtaagcatcgttctttacccccgcatggtgccgaaggttttccggtgacagattcagcttgacggggagcatcaggtcaaaagggagagtcccgacaagcaggtcattgactcctaatttccgcctcattgactcccaaatatcattattatatgttccaattatccaagatggagaggtggcatgtacgagcggtttgtagagcgcagggtagaggaagctctttcagacacgccagtggtgctgatcgtcgggccgcgccgtgcaggcaagaccacgctcgtccggaaaatgggagaagcagggcgaacctatatcacgctcgacgaccagaccgtccttgcggcggcgcaatccgatccggtcggcttcgtgcgggggctggaccgggcgatcatcgatgaagtccagcgcgcgcccgatctgctgctggcgatcaagaaggccgtcgatgaggattaccgacccggacgcttcttgctgaccggctccgcaaatgtgctgactctgccacgcgttgccgacagcctggcgggccggatcgagacgatccgtatgttgccgctggcgcgtgctgaaatcgaagggagaaagccaactttccttgaacatttgttcaagggtaagttccagagcgaccatcaggcaatcgtaggcgacgatctggttcgcctggtgctgcttggcggtttccccgaagcgatcgcccgcaaaagcgagcgacgccgccaggattggacacggtcctatctgacatcaatgttgacgcgcgacctccgggagattgccgatgtcgagaagctgacggaattaccgaagtttgtccgcctcctcgctgagcattctgggcaattggtcaactattctcagttcggtgccgctatcggtgtgagccacaaaaccggacagcgctatgtagggctgctggaacaggtcttcctcatcgcgacattgcagccttggttcacgaacgcgctcaagcggatcgccaagacaccgaagttgcattttcttgattccggcctgctcgccacggtccgagggttggggttcgatcgggtgaaggccgagcgtggacaattcggctcgcttctggaaagtttcgtgttttccgaagtcctcaagctgatgaccgcgtcggacctgcggctgacgccatatcacttccgcgaccagcagatgcgcgaagtggacatcgtgctggagagagacgatggtataatctcggggatcgagatcaaggcgtccgccacggtgaaatccagcgatttcggtggcctgcgcacgctgacggagacttgcggaaatcgctttgcctgtggcgtggtgctttatgacggcgccgacgtcgtgccgttcggcgaccggttggccgctgtacctttgtcgtcgctgtggaattaaggccgtttgcgactgttcaattttacgatgagcaatgcaaaaagccgacccccgaaggggccggctcgattttttggactaatccttgttaacggaaagaccacgctgcttggactgctaaatcaagcggaggcaagctagcacacaactggaccgagtcaagcaattgagggaactggcccggaccactacaagaatcagcagtccaagcagcctgggccagccgcaactagaataatggaggccctgtgaacttctcattccattgccgatcatgccaagaggtttgaacgctctcctagactgctgtcgcgagcagcaactgcgtgatcgcgtgtcgcataccacggcttgccagaagatgcaaattccattattctataaaacttcataagttgtgatcgaagcgatgacttggcagggggcgtgatatggcaaccggattctcgcaggtaggtgaggcaaagtggcggttgggcctggatttgggcacaaattctctgggttgggccgcactttcactttctaaaggcagtccggcgcgccccgatggcctgctcgatctaggcgtgcgcatctattccgacgctcgcgatccgcaaagcaaggaatccaacgccgcgacacggcgcggcccacgcggcgcccgccgcaatcgcgagcgctacttgctgcggcgtgccggcttccttcgcgcgctgatcgaaaccgggctgcttcccgcggatcaggccgagcgccacgcgctggaaaagtccgatccgtggatcctgcgcgcgcgggcgttgtcggagccgctaacccttcacgaggtcggccgtgccctgtttcatctccagcagcggcggggcttcaagtccaacaggctgaccgacaagggcagcgatgagaaaggcgcggtggaaagtggtgcggaaaccgcgcgggaagaaatgaacgagtgcggcgcggaaacattgggcgaattgaaaggccgcccgcgccagtcgattcaggaagagaatcgcgaactaccgcaaggcgtgcgcaaaccaatgccgcttgctcgtgttcgtgccgaaagcgaagggtcgaaactcgcctatagctattacccgctgcgttcgatgatcgaggtggagttcgacgccatctgggacgcacaagcgcgccaccatccggatgcgatgaccgataccgcgcgttcgtccttgtgggagttgctgtctttccagcgtcccttgaagccgcagccagtggggcgctgcacgttcgaaagcgaggaagagcgtgcgcccagtgccttgccgtccatgcagcggctgcgcatctaccaggaactgaacaacttgcgcgtgtcccggagttcgggcgagccgcaattgccgctgaagccggatgaacgggacaagctgaccgtggtagccctgtcaaagccgaaactcagcctcacccagatgcgcaagacgctcggcctgtcttccaccgcgacgttcagtattgaggcgggcgggcgcgattttctggatggcgacaagacgcacgacatcatcacggccaaccgcaaatccaatagcggcagctgggcgggctgggctgatttgtctcccgacgagcaggaggctctggcggagatcctgttgggccgggtggcgccggacaagggaagccatcccgctgtggtcgaaacgcaccagaaggttgtcgcacgaatcgctaaagggcttggcctgaccgaaggacaggcgcgccagttgctagaggcaaaggaggatgaagcgctcgttgctttcctgtccgaacgatatggactcgaatggagtggggctgaacggattgtctcgcttcgcctgcccgacggacatggcaggctgagtcgcacggcgggcgcgaaggtgctcgcccaactggaagcgccggacgagaatggcgaattgcggacctacgacagggctgttgtcgccgctggctatttccatcacagcctccgcggcacgggcgaagtgttcgatcatctgccctattatggcgtggtgctggaacaatcggtggctttcggcaccggcgatcctgacgacatcgaggagaagcggatcggcaagctggccaatcctacggttcatgtcgcgctgaaccagcttcgcaaggtagtgaacgcgctgatcgaacgttacggaccgcccgcggaaatcgtggtggaattgtcgcgcgacctcccgctgggcgcggtcgagaagaataagctggaaaagcgccagcgcgacaatcgccaggaaaacgagaagcgtgcggagagactcgccgaattcggcgtcgccaataattacaacaatcgtctgttcttgcgcctgtgggacgagttggatgcattggggcgcaaatgccctttcagcggcgagcatctgtctcaggatctgttggttcgcagtatgagcgggtctggcgaactggaaatcgagcatatcctgcccttttcccgcacgctggatgacagcttcaacaacaaggcgctggccttgcgcgaggccaatcgccgaaagggtagtctctctccgtgggaagccgtcgagcggggtattttcgaccgggagacgatcgagcgctccctgcgtgactttccgcctgccaaggcttggcgcttcggtcccgacgcgatggaccgcttcgagaacgaagagcgtgattttctcgaccggcaactgaacgacaacaaatatatttcccggcttgccgcgcagtatctcaagagtttgggatcgaaagtctgggtcatcaacggacggctgaccgccgatctgcgccatcactggggtctgaacgcggttctgaccggccacaaccgcgcgccggccgatagcgaggcggaaggagtgaagaagaaccgcaacgatcaccgccatcatccggtggatgccttcgtcatcggctgtaccgacccttggatggtgcaacaggccgcgagcgaagcgaaaaaagtggaggaggaatttgccgccggacagcgcgaccatcgccgcctgctcgccggaatccccgatccctttgccgactatctgctggcggtaaaggaagcggtgggtcggattgtggtcagccacaagccagatcacggcattcagggcaaattgcatgaagataccaactatggcgtggtgcggacgcaagcgggcgaaacgcgcctcgccacgcggaagtcgattgccggcctgacgcccggcgagatcaagaatatcggcgatgatcgtatccggcgtgaacttgtcgcgctgaccgaggggctgggcgacaaggagcgcaagcaggcgctgatcgaatatagcgagcgcaccggccacaagcgggtgcgcgtccacaaggtgcaggccagtttcgagcggatcgagcacgggccggacagcaagggtaaacgccatgtccgcgccgtgatccccggcgataatcactgcatggacattgtcgaaacatcagacggcaaatggcatggcgtggccgtcacccgctttcaggcgcacaagtccggatggcagcggaactggcgcaaggttcatcccgatgcgttgcttgtcatgcgggtgcgtaacggcgacctaatcagactagaaaatgaggggatggaaagggtgatgcgtgtggttcggcttaacccttcaggcaaccgcatatatcttgccgcagcgaatgaagcgggagactatcagcggcgtcacgatgatccggacgatgatttccgttgggatctggcgggaataggtgggctaaaatctcgcaaggcccgcctcgtgcgagttacgcccgatggccagctgatcgaccccggcctgccgtcctaacgggctgttaaccatagtctgcgataccggcggcgctcttttttgggggagtgcgccgaatgcagcagcgcattgtcgaaatcgccagcgatggtgtccatctttccgctttccgcggcttcatgaagatttcgcggcaggatgaggaattgggtcgcgtgccctttgccgatatcgctgccgttgttctgcgcggccacggatcgacgctgtcagtcagtctatgcatacgcctgtccgatgccggcgtgccgctggtgatctgcggttcgaaccagtcgccgtcctctcttctatggccagtgcgcgggcattatgagcaggggcgccggatggaggcgcaagcggtggcgtctcgcccgttgctcaagcggacatggcgcgatctcatcgcggccaagatcgcggcgcaagctgctgtgctcgaagcgacgacgggcgcggatgcacgcctcacccgcatggcgcgcgaggtgaaatcgggcgatggcgacaatctggaagcccaggcggctcgccgctactggggtgcgttgtttggatcggattttctgcgcgaccggcaggccgaagggatcaattccgcgctgaattacggttataccgtcctgcgcgccggaaccgcccggtcgatactggcggtgggactgcacccgtcgctttcgatccaccatgccagccggggtgacgcgctgcgtctggccgatgacctgatggagcctttccgcccctatctcgatttccttgtctggcgattggcgcagggtgagccaaacatggaactgactagcgaggtgaaggcgcatctggcaagcgtgcttacgctcgatttgcccggtggagggggcgtaagccccatacagatatggctcgatcgcctcgcgctttcatgggctaaaacctgcctcggggaaatcggtaagctcgatcttcctggccagccgtctccgttggaactgcatgcgtgagccatctgagcggctatcgaatcatgtggatcatggtgctcttcgacctgcccgtattgacgccggaggaacgcaaggcagctaccgattttcgcaactaccttctcgatgaagggtttgaaatggcacaattttccgtgtatttacgatgcacacccagcaaggaggctgcatcagcctatatccgtcggattgaggctgtggttccagaagaaggcaaggtcgacatcctacaattcacggatcgccagtatgaaaatatcatctgcttccgcgggcgaacgcgcgaatcgagccgggaaaaaccgagccaactcctcctgttttaggcggaattggctcggtttcatgcggcataaatcaggatttcccttttcttccagctatttgctacgctgtagatttagcagtccaagcagcgcgggccaaccgcaacgagccagatcatcaatcgcttttctctcgtgatttagcagtccaagcagcgcgggccaaccgcaactagtcgccaatctgcatgaggaatgccttcgatttagcagtccaagcagcgcgggccaaccgcaaccgtgagctaacgacgctgagagcagctatcgatttagcagtccaagcagcgcgggccaaccgcaacacatggatgaggcggcagaaaccgaactgggatttagcagtccaagcagcgcgggccaaccgcaacgaagtggctggcatcatgggcggtcatgctgatttagcagtccaagcagcgcgggccaaccgcaacttccaccccgccaatgagctggtcggttcggatttagcagtccaagcagcgcgggccaaccgcaacgtaggcaagagtcggatcatccgcgccgacgatttagcagtccaagcagcgcgggccaaccgcaacaccaacgcggatggctcttcggatacgttcgatttagcagtccaagcagcgcgggccaaccgcaaccggggagggcggggtggcggcaaggtcgtagatttagcagtccaagcagcgcgggccaaccgcaaccggctctgaggcgggatcgagcacgaagcgatttagcagtccaagcagcgcgggccaaccgcaacaatgtttcggagctgcgccatcggtttccgatttagcagtccaagcagcgcgggccaaccgcaactcacgggctacacggccaacgttcgcatccgatttagcagtccaagcagcgcgggccaaccgcaacgaagaacagcgtattgtggcacggcatccggatttagcagtccaagcagcgcgggccaaccgcaacgatctcgtcaaagcgccaatcgtccggcgcgatttagcagtccaagcagcgcgggccaaccgcaacggagcggggccgcgcaccgacatgccggtcgatttagcagtccaagcagcgcgggccaaccgcaacacagttggctcctgggaaaatctggttgttgatttagcagtccaagcagcgcgggccaaccgcaacgctcttgatgatcggcgcgccgcgcgacgtgatttagcagtccaagcagcgcgggccaaccgcaacctacagccctgtgggacactggacgcaggggatttagcagtccaagcagcgcgggccaaccgcaaccaacaacctcatgtagaccggcttctgcccgatttagcagtccaagcagcgcgggccaaccgcaacgacaaggaacacacgctcgcgtcgttgcgcgatttagcagtccaagcagcgcgggccaaccgcaacacatggcccgacgcaggtatggttgccggggatttagcagtccaagcagcgcgggccaaccgcaacgcgctgctcggaaaccgggtcggttccggcgatttagcagtccaagcagcgcgggccaaccgcaacgctcaggagacgctcgaacgcgaggacaccgatttagcagtccaagcagcgcgggccaaccgcaacagtgtcggcgctttccagcgcaagcttgacgatttagcagtccaagcagcgcgggccaaccgcaactcatagatggatttgagacggtagcattttgatttagcagtccaagcagcgcgggccaaccgcaacggtagcgtaatggtctccatctatgagcgcgatttagcagtccaagcagcgcgggccaaccgcaacgaggtggtggtcgaggaactcctgcggccagatttagcagtccaagcagcgcgggccaaccgcaacgatacggttcaaggaattgatcgcggaatcgatttagcagtccaagcagcgcgggccaaccgcaactgtcagcccactgtgtcgccacgtcttttcgatttagcagtccaagcagcgcgggccaaccgcaacgaaaacgtcgcgcggcgcgccgatcatcaagatttagcagtccaagcagcgcgggccaaccgcaacgtctggcttcgagacgtggtagaccgcctcgatttagcagtccaagcagcgcgggccaaccgcaaccgatcacgtcataacccggaattgaccggacgatttagcagtccaagcagcgcgggccaaccgcaacctatgacgactgccagaaagcatctgtgacgatttagcagtccaagcagcgcgggccaaccgcaacgactcgtcgtcccagtcgtcatagaattccgatttagcagtccaagcagcgcgggccaaccgcaacccggtgaacagcaagtgaagtttcgtcgcagatttagcagtccaagcagcgcgggccaaccgcaacgggccgggccgcgacaatgtcccacggccagatttagcagtccaagcagcgcgggccaaccgcaacccaaaccgttatacgacgcggcgtccgcagcgatttagcagtccaagcagcgcgggccaaccgcaactggaaagtaagtcggaccttaaatgggtttgatttagcagtccaagcagcgcgggccaaccgcaacattgatttcatagagcatatgcgcgccgttgatttagcagtccaagcagcgcgggccaaccgcaacgcgatcatccagcgcgccatcaacgcgcccgatttagcagtccaagcagcgcgggccaaccgcaaccctgccgccgccgctgcgacgtgcgcagcagatttagcagtccaagcagcgcgggccaaccgcaacgcagtggcgccgctcatcgacttcattgcgatttagcagtccaagcagcgcgggccaaccgcaacaagatgcgcaatgcccagctgatggacgaggatttagcagtccaagcagcgcgggccaaccgcaacgcctatctcgatcaggttgccctgattgtcgatttagcagtccaagcagcgcgggccaaccgcaacctgcacggcggcaaagccggcggcgattttgatttagcagtccaagcagcgcgggccaaccgcaacgcaaccgcaaggtgggcccgcagcgcacgggatttagcagtccaagcagcgcgggccaaccgcaacgtcgcacacgatcatcagttggcgcgcctgggtttagcagttcagaaatcgcgggccgacttggcatgtcgttgcctgttagttccaaaccactgcgccaaaattgaaagttcgaaaagtgaataaatggtcggggaaagaggattcgaacctccggcccctgcctcccgaagacagtgctctaccaggctgagctattccccgaccgggccggtgcatcgctgcgccggcaagacaggcgctgccctatagtgggcacatatggtgctggcaagcgggagatggcgaatatctttcgcgcgggcgacaagcagtgccgacccggctcagcccggctcgcccccctcctgcggcccacgctcctggagcgaggtcaggatggggcaatccggcccgccgtcgccggggcatcgcatcgcaagatcgagcagggagcggcgcatggcctccagcgcttcggccttgcgcgccagcgcctcggcgcgagccagcgcgagggccttcacatcggcactcgcccggccgcgatcggaccagagcgagagcagctcgccaatctccgcgatgggaaagcccaggtcgcgcgccctggcgatgaaccgcaggcggtggacgtccgcctcgccatagtcgcgaaagccgccctcgcgccgcgccggatgcgggatcaggccgatcttctcataatgccggatcatccgctgcgagacgccgctcgcctgcgaagccgcgccgatattcacagcctcacccgattgaggcgcagcgcattgccgaccacgctgaccgacgaaagcgccatggcggcggcggcgatgaccggcgagagcaggatgccgaacaccggatagagcaggcccgccgcaatcggcacaccggcggcattgtagatgaaggcgaagaacagattctgacggatattggccatggtcgcttcgctcagccggcgcgcgcgcacgatgccggtgaggtcgccgcgcagcagcgtcacgcccgcgctctcgatggcgacatcggtgccgtggcccatggcgatgcccacatccgccgcggccagcgcgggggcatcgttgacgccgtcgccggccatagcgacgaccttcccttcgcgccgcaaccgctcgacgaccgcgctcttctcctcgggcagcacttcggcctcgacctgatcgatgcccagcgcatccgccacggcctgcgccgtcatgcggttgtcgccggtcagcatgacgatggcgatgccatccgccttcagggcgtcgagcgcctcgggcgtcgtcgccttcaccgcgtcggcaatggcaaggacgcccgccgcctgcccgtcgatgccgacgagcacgcccgtcgcgccctcgcggcccagcgtatcggcctgcgcggccatggcgcccggcgcgatgcccttttccgtcaggaagcgcgcattgcccagcaccacaaggcggccctccaccgtaccgagcgcgcccttgccggtcggcgaatcgaaatccgtcacggcgggaatgaccagacccttcgcctgcgccgccgccacgatggcgaccgccagcgggtgctcggaggcgcgctccacgccagcagcgaggcgcaggatatcatcggccgcccagccctccgccggcacgatgcgcgtgaccgaggggcggccctccgtcagcgtgccggtcttgtcgaccaccagcgtatccactttctccagccgttcgagggcctcggcattgcggatgagcacgcccagacccgcgccccgccccacgcccaccatgatcgacatgggcgtggcaagaccgagcgcgcaggggcaggcaatgatgagcaccgccaccgccgccaccagtccatatgcgaaacgcggctcgggtccccagaggccccagatgacaaaggccgcgacggcgaccagcagcaccgccggcacgaaccagcccgcgacgcgatcgaccagccgctggatgggcgcgcgcgagcgctgcgcatcggcgaccatctgcacgatgcgggcgagcatcgtgtcgcgaccgaccttctcggcctcgatgacgagcgcgccgctctggttcatggtgccggcgatgacgcgatcgccagcctcgcgggagaccggcatggattcgcccgtcaccatcgattcatcgagcgcggagcgcccttcccgcaccaccgcgtcgaccggcactttctcgccgggccgcacgcgcagccggtcgcctaccgcgacgagatcgagcgcgacttcctcttcgctgccatcggcggcgatgcggcgcgcggtccggggcgcgaggttcagcagggccctgatggcgccggatgtgcgttcgcgggcgcgcagctccagcacctgccccagtagcaccagcaccgtgatgaccgccgccgcctcgaaatagaccgcaaccgtatcgtctgcgccccggaaggccggcggaaaagcgcccggcgccagcagcgccaccatgctgtaggcccaggccacgcccgtgcccatggcgatgagcgtgaacatgttgagatggcgtgtgcgcaccgaaacccagccgcgctggaagaagggccagcccacccagagcaccaccggcgtcgccagcgcgccttgcagccagcccgagaggcgcgccggcacgagatgatgcaatgccgggaagatgtggctgcccatctccagcgcgaacaccggcagcgccagcgccaggccgatccagaggcgccgcgtcatgtccaccagctcggcgctgggaccggcgtccgcgctcaccagttcgggctccagcgccatgccgcaaatcgggcatgggccgggatgatcctgccgcacctccgggtccatcgggcaggtccagatggtgccgggcggcacgtcttccggctcgatgggcgcgccgctcaggtagcgctccgggtcggcgatgaatttcgcgcggcatccggcgctacagaaatgataatccgcgccgccatgatgcgcatggtgcgccgtcttgagcggatcgacagtcatgccgcagaccgggtccacaaccgttccggccgcgccgggcctgtccgctgcaccgccatgagaggcgcagcagccttgcgtcgcctgagtctcctgatgagtcgcccgagtcatcgtcctgttcctttgccgacgccgtcccatctagggtctgacatcgtgtcagggtcaagagcgaagcgtcttttcggcgccggtcccattgggggcttgaccttgacatgctgtcaaatgccatcgctatgaccaaccgaggccagcgctgccggtttcccatgaagggcgcccgatgaacaatgccacgatgaccggaccgatcgaccgcagaaccgtgctgcgcgccggcgcctgggggcttgccgggctcggcatggcggggctcatcccggcctgggcgcgcagcgggtcgccggggctgacggccgccctgcccgccctctccggcgaggacattcatctgcgcatcgcccacagcgccttcgcgctgggcaagcgcaccggccatgccgtcacggtgaacggcacactgcccgccccgctgatccggctacgcgaagggcagaccgtgcgcctgcatgtggaaaatctgctggacgaggacagctccatccactggcacggcctgctcgtgcccttccagatggacggcgtgccgggcctcagcttccccggcatcaagccggccggccgcttcgtctatgagttccccgtgcggcaatcgggcacttactggtatcacagccatagcggcctccaggagcaggagggactttacgggcccatcgtgatcgaccccgccggacccgatccggtcgcctatgaccgcgagcatgtgatcgtgctcagcgactggaccttccagcacccgcatcagctcatcggcaagctcaaggccgagggcggctattataatcggcgccggcagacgctgctgggcgcactgaaaggcgggccggaggaagccatgtccgccgccgagcgggccagttggggccgcatgcgcatggaccccaccgacatcgccgatgtgacggccgccacctacagctatctcgtcaacggccatgggccggagcagaactggacaggcctgttcgcccccggcgagcgggtgcggctgcgcatcgtcaacgcggcggcgatgaccatcttcaacctgcgcattcccggcctgccgatgacggtggtgagcgccgacgggctggatgtgcggcccgtgaccgtggacgaactacagatcggcaatgccgagacctatgacgtcattgtccagccgaccgaggacagggccttcacgctggcagccgaatccatcgaccgctccggcatggcccgcgccacgctggcgccccggccgggcatgaccgcgcccatccccccgctccgtccgcgcccgacgctgggcatgaaggatatgggcatgggcggcatggaccatggcggcacggatcatgggactctggatcacgggcccatggaccatacggcgatggaccatggcgccatggccggcatgacccacggcaccggcgcgggcaatgccggggcgccaaatcacggctcccacgagagcggccagagcgcgggcggccatggcagcagccattcgatgagcggtgtcgccatgcgcgacaagagcaaggtgcccgccagcgtcaaggtgggcgtgggcgtggacgccattgcccctgccccggccgaccgcaccggcgatcccggcgtggggttggaggatgtcggccaccgcgtcctcacctatcgcgacctgatggccctcgcgcccaatcccgaccggcgcccgccggggcgcacgatcgagatccatctcaccggcaacatggagcgcttcatgtggtcgttcgatggggagaaattcagcgagggagtcgagcccattcgcttcgagcgtggcgagcgcgcgcgcgtcgtcctcatcaacgatacgatgatgacgcaccccatccacctgcacggccatttcttcgagctggtgaacggccacgccggccattatccgcgcaagcacaccgtcaatgtactgcccggcggcaagctgaccttcgatctcaccgccgatgcgccgggcgactgggctttccactgtcacctgctgctccacatgcatgccggcatgttccgcgtcgtgaccgtgcggccgctggacggggacgcggcatgaagcacgccggcagcctcctgctcgccactcttgtcgcggcaccggcgttggcccagcacgatcatggcgccatgcagcagggcgaggccgagtctcatgcggtacatgcggcggcctccatcgccgccgagccggcagacccgcatgccggccatgccgccccggccgcgtcgccttccggcccgaccagcccacaggctgatccgcatagcggccatgcggtgccagcaacaaccgattcgcccgcgcaaccggacccgcacaccgggtacacagccgcccccgcgccatcgcgcccggccgatccgcatgggggacatgtcatgccgccaggagcgtccgcgccgtcatcgatgtcggatatccatgcggggcatg

SEQ ID NO: 3864 - DNA, 23609 bp, synthetic construct
  source 1..23609: mol_type = other DNA
  misc_feature 1..23609: note = Synthetic
cagagaattattgattactatattgacaatgtaaataaggacagggagcatgccaccatgcttataggaccttacggcaagggtaaatcgcatacactgctggtgcttctggataagctgagacatagggaaagaccgtatcttcccgttattatatcgggcactaattccgacctcaatcaggcatttcttgtcgggataaccgatgcattgaagcgggcagggcttgatagcattacaccggacagctattacagcgaggcagtcaggaagatagagcagtggaaggacagctttccggatgcgtacagtcattttgcgggagagcttcaaaaaaacggatgtaatgggaaaacattgcagcttggtcttgagaagaaccaaaaagaggctcttgatttatttcgcaggatatatcctatagtaaccaacggaagtgaatttaatcctattattgtgcttgagactgtgagaatatacgagcagattaaggatacactggcacgcgattatgggtatgcaggaatatatgtcatattcgatgagttcagcaaatacatagagggtcacgaagcggatacattttccaaggacatgaaggtgcttcaggatatgtgtgagctgtccgagagaagctctgaggggcagatgtttataacctttgttgcacataagagcattaaggagtacggcgctaagcttccggtggatatgagaaatgcattccgcggtgtggagggcaggataaaagaggttctgtttgtcgtctcctcccagaataactatgagcttattggaaatgtgttaaaaaaggatgaagccgcattgagtgagcttcctaagatagggagatactatgaaaatgctcttaattcttatcgattttcatgtttttcagggctgtttgatgaagctgattttaaaaaatatgtggttgagggctgcttccctctcatgccgtttactgcgtatatgctgcttcatataagcgaaaaggtggctcagaacgagaggagcatattcacctatctttcgcatgacgaaaagggaagcgtgtgcagaataattgaggattatggcgaagatattgcagactgcggaataactgcggatacagtttacgattattttaaaaatcttttcagggaggaagcctcggatacggttattcacaatgaatggcttaaagctgagtatgcactttcacgtacagtggataatctggagaaaaagcttataaaggttatcgccatgataaatattatagatatcccggatgagctgacggcggatgtgccacagctatcaagtgcgcttaatatttcggaggatgagtgcaggacagtggtggagcgtctggtggaaaagagaattattatataccgttcgcgcagacattcgtacagcttttacaataatgtcggtgttgacatacagaaggagatttcactgaaggcagcgaaattgccggcagattcggatatactcggaaccttgaaggagatttcagagtacgattatgtgcttcctaagaaatataatcagatatattcgatgaccagatattatgagtatgtatttatgtcaccggagcagatagaaaagcttccgtcaccggagattctgtttgaacagcacttttccgacggaaaaatagtggctgtggtgagcgataacaggacagattatagcaaagagctgtctgagcggcttaaggatgacagaatagttgtgcttgtgacaaaagcagcttttgataagggcggaagcataagaaaatacattgctgcgaagagtcttatgagtgacaggtcattcatagaggacaatattgtgctggggcaggagcttgtaaactactgcgatgacatttcatacgaggtgaataagtttcttaaggaagcgtacaatcccgaaagcggtgcctgtgaggtataccacaacggtgaagcattccggtcgggttttaggaacggcttctccttcaatatgtttttgagcagcataatgacggagtattacaataatgcgccggttgtaaataacgagctgattaatagacagaacatatcggctcagaataagaaggcgcgaaataagattgtagatatggtgttaagttctgaggattgttcgtcatttgagaagggaacctcacctgaggcaaccatatacagggcggttcttgtaaatacaggtattctcggcaatggcggtgaggacaggggctgtgcatatgtcctgtcggagattgagcggttcatagctatgtgcgattcaaataaatgctccttcaagctgctgtatgaccgtctgatgggcagcggatatggtgtgcgaaagggaattattcctatttatgtggcattatgcctgtccaggcttcaggataaaccgattgtaagcttcaaagaaaaagaggtaaatatagacgctgttattcttggaaatatcaacgattcgccatcggactattatctgtatgttgagcatgagagcatagaaaaacagaattacattgcggggcttatgaaattattcggagtttcagcaagagctgcgggggttgcaggtgacagagaagttttagatggaatcctgagatggtacagggcgcttccgcaggtggcagcgaacataggtcgcgttgtcgatgtgagtgagaacatggcagcggcgttaaagcggctgtgtatggcgctgaggcatcaggagtataacccgcatgagttcctttttaaggagcttgtcgatatagcaggaagaattggcgacggtgaaaaatactccgcagatggagctgtggtaaagagttccttgacagaatctccggtgactaatgcttcgccggaagcaggttcattagccggtgtactgcataatttaacacttttaaaggcatatcttgatagttaccttcagaagctttcaggtaatgtcgcggtgataataaaaaaacgctgtaaggcagacgatggtgacagccttaagtcggtgcttgaggagcattattccgagcacggaaagagacttgaaaagctggtgactaagagccggacatcggcaatattgtcatatatatcggatatacctacctatgacgaaggagagattgtgtcgaagttgtcgaagcttgtcacggatatatacattgacgactggcgtgacggaatgctggagaagttcagagccggctgggatgaattctgtgatgaggctgagaacaccgtaaacagcgagagcgcacttaacagcattattctaaagggagaaggcggaagcctgcttgaaaggagctatgccgatgtggaggatgacagcacagggtattttcttaaaaatgcgataaaggatgcactggatgaattcggcgacagtctggagactaatgcgaaagtggcagtgcttgcgcaggttcttgctgagcttgtggcaagggagagcagataattgcagtaaggatatatgaaacagaactaagagaaaaataaaaatgaggattacttatgagcatgatttattttgacaatgcagctaccacatacccgaaaccggaatgtgtgtatgaacagatggataaggtcaatcgcagcctgtcattcaatgccgggcgtggttcctatgctctggcgcagcagtctgcccagataatcgataatctcagaaaagaattactccgcattgtgaatgcgtcagatgtagcagaggtcgtactgtcggcctctgctacatttgcattgaatcagataataggcggcttggaaataaaaaaagaagattacatatatatttcgccgtacgagcacaatgcagtggtgaggacactctataaccagagggtgtttagagatgataacaagatggctgacagtgaagcgggtagaattaaaaatcatattattgtgatgccgtttaaagatgacggcaacattgatatagatagacttaagtatgagttcagcgtccatgctccggcatttgtatttatgacacatgtgagcaatgtcacgggctgcatactgccggtagaacagattgctgcagcggctaaggaatatggagcgatagtggttgtcgatggctcgcaggcgcttgggcttgtgccgtttgacatgtcgcagtctcttgttgatttctacgtctttgcgggacataagacaccgtatggtccattcggaataggcggattttttatcagaagcggtgtgaggcttgatacatttatcgcaggaggaaccggaagcgattcgctcaatgtccacatgcctgaaaccggcagcagccgatacgagccggcaagcccgaatatcattgcggcagcagggcttctagccgcaataaaagatgtcgatggtgaggagataaaaaggcggcttgacaaggaaatgtcgctcacgcgctacatggttgataaattacgccggctatacaatgtgaagctgtatctgcccccggcggacaggcatgttggaatagtggcattgaatgtaaaaggttatcagtcatccgatgtcggaatgattcttgatgccgattatgacatcgcggtgcgcacaggctaccactgcgcaccgctcatacatgaatatcttgacgacaaggaataccttggagttgtcagggcgagcataagcatgtttacaacaacggatgagattgacgcgctttgcggggcgttgggggagatttaggaggaggaattatggatttaagatttgcggagataagaaatctgggacaattgtgcaatatagaaaataaaggcaataagaaggagaatgttccgcttaatgtagttatcccatattaccaaagaccgtataaatgggacagtacaagaataggcaatctgattaccgattttcataacaacgaagaaggagaggctgaagatggagagggatattttgccggttcggtggttatggttgaggggcgcaatggggaatttgaggtcgttgacgggcagcagagaataacaacactttttctaacgaattatttgagatttgtgcttgtcagaggatatatcgaactgatgataaacatgaaaagaatttctaaaattcctattcttatgaatgaattgattgatacggcggtgaatatttttgacagggataaggttgaacaattcaaaaatgtcaaggagggagttgataattttataagctcggttgaagagcagagttcggatgatatagataatacgtgggatgatatgcttgaatattatcagtctaatatgtggcttccaaagaaaaatttttctaacatggatatttataagaaagagtattttaacctgaacagaaagctgctctcaaatgtcagtctggctctaagatacagtagaaacggttataatgaaaagctcaaggaagcactcagcagaattatgataattatgcccgaatcaagcaatccctgttttgaaacgctgtcattcgataaaaattcagaagcaaaaaatccggttacagagcaatacataaatgcggcaaaatgtatttatgagggtattgttgattcatatatcagcggacaggaaaagccgattgagtacataaaggcaaccgacagcgctatgaaaaaaatattgaataacattaatttctgcgtagttgtgacaggaaaagagaaggacgcgtacacactttttgaggttttaaatgataggaattttccggttgaagacttggagcttattaagaacctgttttataaatggtattgcaaacataatgaggatgattccggtgcagattattatattgagaaggcggataaaaaatgggtggaggaaatattccctatatcaaccaaaggaaaggagcgttccaagcttatttcgtatcttgcggcacagtatttcacagccgacagcaaattaaagtataacgataatgagaaatacagggaagtgattgaaaaaggatatctgaataagaaaaatatatatgaaggtgaagatttattgaatgatatccgcatttatgaaatgcttggaataatactggatgaatttgatttccagtatcagaagaaagctgagaatgtaataaaggcggagagggagagcgcaaaatccataacctacaaagcattaaatttgttaaacgcactcacattgtacggtgtaattccggctataaccaatgtgataatcaagaaatttctggacaagcacccatttgatgaatgtagcggagacgcgcagataatgaagttcagggaatttgtccaggggataataaaggatagtgcgaataataatgcagaatatattgatatccacaatgtttcatatagcttctggcgttatgcactgctggcacagaactcggacagagtcagaggcattgcaaaggattatattcttaagaataattcatttagcacggattatgtgttgaaagtggatagtcaggacatagacatgttgaatgaggagttcagacgatggataaatgcatggaaatatggcaatgaaaagtcgcagcttaaggtgaaggtattgtttataaatcttttttataccaacagagttgaaaataagcttattttcaacaagaccggaacaaaatttccgacagataatatccagcttgaccatttagagccggataaaattaattcaactgccatggaaaaatattttgagccttcttctaagaacgcaagggaggattatacggacagccttggcaactttatgattatggatgcggacagcaatgttgataaaagtacactgccgcttcaggacgcactcaagatatatgataaaatgggagaacattggctgataagggaaatccatgatgtgtttgaggaagatagctgtggaacgaacagaaatatagacaacaagatttacagagttccgaacgaagagttttttaacaggagaaaacagaggttaatcacttatttcaaggcaattttaaacaagagacttggcgatgacagcgtggaaattccggatatttagattatagatttgggggtaaatggcatgaaccagtacaatgaaaaacaaataaaatccgttatattcgaaatacttcacattgaacgaaagaaccttagaagcaaggctttcacggatttaaagatggcggatgagattgggaagattatatcggagagcagtaagcttagcaaataacaggaggcggggaaggtacagatgaaatttaaaacactgagaatgaagaatttcatgcgatacaagggtctgaatgagattaattttagctgtgacgaggagcataatgtcacggtggtattgggggataacactgtgggaaaaaccacgatagcgcaggcgttcaggtggtgcttgtacggcgcaatcatggttgaacgcggcaagaaggatacagactaccagctattgaataatgatgttctttcaaaaatggatgccaacggcagagctcctgttttcgttgagataatggcggtggatagcgagcatgtgtacactatccacagggaggttgagtatatgcgcgcctaccctaagtttatcgcgaaagaatcctataaaaccgtaaaaatgtttgtcgcagacatcgacagtccggacataaagcgtgaagttgagccgggaccgaactataacaagataaatgagcttataaatgagctttttccgcgaaatctatcacattatttcctgtttgacggagaaaggtggagcgattttgcaataaacggcgttcgcgagaatataaaggaatctgtgcacatattgaccggactttccgcatataaatcggcgatgtaccatctcaaggatatgggggataattcggtaataaaaaaattcaagaagaatattcagggaaaaggcaatgtctatgatgattacgagcgcgaccagacaaggcttgagcgcgaagtggaaaagtgccagaagcagatagagaaccttgacgcgagtatcaacctctgcaacaaaaaatgtgaggaaatagaaaattatcttgaggaaaataagaataccgaacagcttcagatggagtacaggcagacacagagaatgttgagggcacagggggagcgttatctggcgaattataaagctttcatttcagattacaattcttctgcgttcagactgtttgcaaagccgcttattgaagcttcattaaagatggtcaaatcagtggcaggcgagcgccgcgatataccacacatgaggcaggcgagcatagattatataatcagaagcggcaggtgtatatgtggaacccctgtaacgaagggttcctatgcccttgaatgcctgcttgaacagagaaattatctgccgcctgctgatatcggttcgctgcttggcgagtttgaaaagacagctaaccgctggaacagggtagaggatgagctttcttcggacgctgcgcgggtggatgatagtgccagagattatgatgagacctgtatacagcttcagaaaatggagaacaggatgaatgataacatagatttcgcagaaaagagggctcagcttaaaagatataaggatgaagccgccaaggcagccgaaaggaagggggagataaagggacttatagcatcataccgtagcagaatccagagcatagaagtgcagatgaaaaatcaggaagcaaaaaatgcggaaaatgaaaagtggagaaagcgtttagggcttgccgaggcggtatatgaaaaattatttgcggatttttccgagagggagaagaagatttttagcgagttaaacgatgaaattcaggttaatttttatcacatgttcaatgcaaaggataaaaaaatacgtttatcggaaaattatgagatacagatgtgctataagacagatttgggttatcaggaggaaaagaatctgtccgaaggtgaaaaggttgccagaaattttgcgtttatcgtgacaataatggattacagcaggcggaagaagctggaatatagcagagctgacggcagcagcgaagccacaggctttgaggagggcaatgacactctgccaatcgtccttgatggaccgttttccaagcttggcgcggagaatatatcgttggtggcgggcgttcttccacaggtatctgagcaggtaattgtgttcatgctcaggaaggactgggcgtacacaggacttgacaagtatgtaggcgcagagtactcaattgacaaaaatcctgatgagagctttgcttcgataagaaaggtggacagatgataaatgactgattttgaattttttaaaaagcagtttgaattcaagggcaaacattcgcggatggtgacggaattgtgcgttgccaatgattttgaacatacattttttaaaagagttattgacgtgtacatattcgcggcgataataggcatacgccttgacaggaaggctagagaggactattcgcctgtcgagactaaaagcattttccctgagcagatgatcaatgcgaaggaggatttggattttataatgcagatgatgataatgcttgattctgattccggtgcaactgatgaggacagggtgcgcgaggcatttaggggagctcagagcaaggaagagtatgacaggcttcttggaaccttcaacgattatgtgagaggcggtgtggaggagctgtatgaaaggctggttatcagaaagcgcgactccgaggacagattctatgatgacaggacagcgaatctcatggcactgtatgacagattaatgccgaaggaagaatagaatatgactttggtaatcgttagtattattggtattgttagggttttaacaaaaatgcttagcttacgattgttacttaaaatgttgttggatacttaaactgttgttgaatatttataaaaaagaaacttaaaactgaaaaaataataaaaatcacaaaatttttctttacttttttagatatgtggggtataataaacttacgttatatcgtaccaagcggtaaacggttacaacaataaggtcccgccactggcggtgtacctcaaagctctaatcccacttaaagtgaatactttaggtgggattatctattttatgttgaagggagtacttatggaagagattaagcagttaaacagaaaaacagatgtacctaagcctacagacttgaattatagaataggacttgatataggtattgcgtccgttgggtgggctgtgcttgaaaatgatagccatgatgaaccgttcagaatcattgatttgggtgtaagaatcttcgatgctccggataattcaggtgaattactttcggctaaacgtcgtgaggctcgttcaactaggagaagaaccagaaggcgcggacatagattagagcgtattaagaagctttttgagacagaagggcttatagatattgaagagtttgagacgcgttataaaaaggcagggcttcctgatgtatacaggcttagatatgaaggactagacagggtacttacagatgatgagctggctcaggttctgttacatattgcaaagcatagagggtttaagtcaaacagcaaggcagaagaaactgaaaatgatagtgatgctacaaagaaaaaggaaattggagcgataaaagaaagtataagcgctaataaaaggattatggaagaaaaagggtacagaacagttggtgaaatgctgtatcttgacgaaaaatttaaaatagactgtgatttgaatacaaatggatatatattctgtcctagaaataagaggggggaatataaagtaatcatacttagagacgtgttggtagatgaggttcataaaatatttgaatctcaaagaaaatacggaaatgaatcggcatctgataaattggagaaaaaatatttagatatatttttaagtcagcgttcatttgatcaaggtccgggatatcctagtaagtatgcattggatggatttgattttggaaagtgtccttttgaagaaaaaaatggggagagacgtgcaccgaaagcagcatatacatctgaattgtttgttgctttgcagactatgaatcatacaaaaattgtagataccgatggaaataaaagagcttttacagagttggagcgtaagaaaattattcaattgtttcatattcaaaacgatgtaaagtattccgaagttagaaaagagcttgctcttacggaaaatgaaaagttttataatcttacatatagtaaagggaagaaaaaagatagtgagcaaagcatatttattaaaatgacaaattatcataacatggcaaaagcattgaaagagaaatgcactggtgaaatattggacgataatcgcgcagatttatatgataaaatagcatataattttgccagatataaaaatgatgatagcaggttaaaagaattaagagctttggggataggagaggcagaatgtaatgatttacttaaattgtcatgcaataaagcacagggattatctctggtggcgatgaacaagataattccttttctacttgaaggtagagtatatagtgaggcatgtaagctggctggttatggtgattttgtgggtgacaattgtacgggaaaatcaatattgttaagggatgatgaaggacagaaaattaaagaaactttaaatgaaatcactaatccggtagtaagacgtgctgtgtcgcaaactattaaagtaataaatgctattatcattgaatatggcagcccgcaggctgttagcattgaattatcaagggaaatggcaaagaataagaaagaacgtgataagatagacaaagatatggaaaagaggtgcgcggaaaatgctaaaatccttgatgaaataagggaatttaaagcaattcctacaggcaaagatattgttaagtatcggctctggaaggaacagagggaaatatgtctgtatacaggtaaaaaaatatcggcatatgaactattttccggtgatggagggtatgatattgaccatattcttccgtatagtaaaacttttgatgacagctatcgcaataaagttcttgtgaggtctgaggcgaataggcttaaaggaaacagaactccgtatgagtatttaatatcacatggtggagagaaagattgggaagaatttactatcagagttgaacactgtataaatgattataaaaaaagacagaaattattaaagaaaactattacagatgaagatactaatgaatttaaaagacgtaatttgcaggatacgcagtatgccacaacatttatatataatttaatacgtaaaaatctttatctaaagccatatcagaattctacaaagaaaaagacacagcaggtgatggcgttaaatggttcaatcaccagttttttaagtagaggatggggacttgagaaaaaggacagaagaacacatattcatcatgcacaggatgcagttgttatcgcatgtacaacacagggaatgattaattctatttcggagtactttaaatatagggaatcaaagcttgaaagaattaatagacatgtaaaagatgagtccaaggagaaatttgaggacattgttgttaccagagaacaatatgataagcaatccggtaagaaatttccactgccatggcagaattttaaggaggagctggatattcgtatggcgcgttataatggagcggtaggtgcaatagattttaaaacatcaccattagaatatcttatggcatatacggatgtcagtaatcgtattaactatcctgagtggatgtttgtcaagggcagacctggacgaaggggagtgcttgacggaatatttgtttcaagaatgcctaatcataaggtaagcggacaggcacacaaggagactatacgttcagcgaaatattataaagaagggggaggtgttttagataagggatatgtggtatataaggtacctattcaagatataaaatatataaatggtgagataatttatgataaaaatgcagtatattttaatccagatagtgatagattgctttataatgcattaatttcacgacttgaacaattcaacggtaatgctaaagaggcttttttggagccattctataagccaaaggcagacggaacttcaggaccggtagttaagaaaattaaagtgtgtgaaaagcagacatcgggagtgccggttggagaaaatggaatagcatctaatggtgatatggtaagaattgatgtattctgtgaggagaataaaggtaagaagaaatattactttgttcctatttatgtatcagatgtggtgaaaaaaaggatgcctaatagagcggcaacacaggctaaaatacagtcagaatggcgagagatgagggaagaaaattttatttttagcttgtattcaaaagacttgatttatattgaaagtgataaaggtgtcccgcttcacgatataaataaaaatgtgtatagtgaaaattctgtttttgcatattacacaggtgctaatataagtaaggcttctattgatggagaatgtcatgataagaaagcatattttgatagtttaggtattcaaggattaagaaaacttgaaaaatgtcaagttgatgtattaggcaatatttcatttgtacacaaagaaaagcgcatgctatttaattaatccaagggaggatgtatgggatatcgcaacataaagattgatagttctgtaggtttacacattaaaaatgaccagttagttataggtgataaagaaatcagttttccgcttgaggatatcaattgtgttttgatagaaaatcaatctgtcgcggtatccgcatatatgcttcaaaaattcgcaagccaagggattgcactgtatgtgtgtgatgaaagacatctacctaatgctgtgcttttgcctatggttaagcacagcagacatttcaaaatgctcacaaaacagatggaagtcggaaagccgctgattaagcggctttggcagcaaattattatattcaagataaaaaatcaggcgttatgtcttaaaaacataggcttttcctctgaatatgaaaaattactttccatgacaaaagaggtgcaatcgggagataagacacatgttgaggcaaaggcggcggcatattatttccgtattttgtacggcgaaggctttacaagagcagatgaatgtattgttaattctgcaatgaattatgcttacgccataataagggggctgattgcaaggtcgattgtgtgctatggtttagaaccgtcgattggaatgtttcatcatagcgagttgaatagctttaatctggcggatgaccttattgaagtgtttagaccattggttgatttatatgttgcaagttattttgatatgtctgaggtggatgcagatttaacaccgcagataaaaagagatttgtttaatataattaactatgatatgtcactgaaaggagagaagcgcatcataagcaattgtattgatatacttgtttatagttacaatggagcgattcaaggcaacagaacggacttagaacttcctgaattaatacctttgcaggtgcatagctatgaataaatttatgagacttatggtattttttgacttgccggttgtgaaggatagagatagaaaagcagcagctaaatttcgcagattcctattaaaagatggctatgtaatggtgcaatggtcggtgtactcaagactttgcaatggttcggattcaatagagacacataagcaacgtcttaaacaaaatcttcctcaaaaaggttcggttcgttgccttatattgtctgaaaaacaatattcctctatagatattctattagggacatcaacatttcatgatttggatgaatcgacggacttgataaatattttttgaaaaaagagtattataagagagatagagtgcaattttctaagatttttttagatgaaaaatccccgtgaacatatataaacacggggatttttcgttccctattatatcataccaagcgataaccgggaacaacaactcggcttgccatagtcgaaagtagcttgtattatatcataccaagcgataaccgggaacaacaacacaggtagagaaagggggtgaaccgcatgaattatatcataccaagcgataaccgggaacaacaacacgtttccaacttccaacaacaaaaggctgattatatcataccaagcgataaccgggaacaacaaccattcgtaagtcatacaagggtggttggtattatatcataccaagcgataaccgggaacaacaactgaagcattaagttatctaggtattagcacattatatcataccaagcgataaccgggaacaacaacagagataggctcagacgctctgcctgtttaattatatcataccaagcgataaccgggaacaacaacatgcaatcactttaaatagtagtgacgcatattatatcataccaagcgataaccgggaacaacaaccaacgtacacgcattgcgtgtacgtgaatattatatcataccaagcgataaccgggaacaacaaccatactgctgataatatatgttcttacggattatatcataccaagcgataaccgggaacaacaactcggagctggttgactatgttctcattaccattatatcataccaagcgataaccgggaacaacaaccaacggtgtttctataggatgtatcaagtattatatcataccaagcgataaccgggaacaacaactgcacataccaacctttagttggtgtaagattatatcataccaagcgataaccgggaacaacaacccatctcttgttaaatgtcttttcattttattatatcataccaagcgataaccgggaacaacaactacgtcctacatattcattttttattttttattatatcataccaagcgataaccgggaacaacaacatgactagtatatgattgttacggattgcaattatatcataccaagcgataaccgggaacaacaacagtatttcaaaatctactaattcatagtgattatatcataccaagcgataaccgggaacaacaacaaaagacagaagtgctgtacggtctggacgattatatcataccaagcgataaccgggaacaacaacataagttttgggaaacatcttctgttacaattatatcataccaagcgataaccgggaacaacaactcatagcacagggaatacttgaaagtgggtattatatcataccaagcgataaccgggaacaacaacagtagtcgcctacttcgttaatatttctccattatatcataccaagcgataaccgggaacaacaaccaaacggtaaaagtctaattgctatagttattatatcataccaagcgataaccgggaacaacaacgtgctgcggaactgaaaaaggcttcttctattatatcataccaagcgataaccgggaacaacaaccctttggttgaaaatcctgaaccaatcagattatatcataccaagcgataaccgggaacaacaaccctttctttgcgtgttgaaacgcaagataattatatcataccaagcgataaccgggaacaacaacaaatacgtttttatacggggttactcccaattatatcataccaagcgataaccgggaacaacaaccctttcccggctatgtgataggcgttgcaaattatatcataccaagcgataaccggaaacaacaacaccatcaagggtgatgtttgagcttggtgcattatatcataccaagcgataaccgggaacaacaacctcttcgcaacggggaattgtatcaattctattatatcataccaagcgataaccgggaacaacaacaaaattcacctcacaattcttccacaaattattatatcataccaagcgataaccgggaacaacaacttacactaacgctataatacttgttgccgtattatatcataccaagcgataaccgggaacaacaactggtgagacgttcgagggttggtattgcgaattatatcataccaagcgataaccgggaacaacaactatcgggagtgcgtaccacgctaaagagaattatatcataccaagcgataaccgggaacaacaacgctactgggatatagtcgaggtgcaaatggattatatcataccaagcgataaccgggaacaacaaccgaccagagtgatgttctccgagcttttggattatatcataccaagcgataaccgggaacaacaacagaagtccataagttgagcgtactccactaattatatcataccaagcgataaccgggaacaacaacatgagcttccgcttgcggatcagcgattggattatatcataccaagcgataaccggaaacaacaactgctccactgcaacttgtgaccgttctcaattatatcataccaagcgataaccgggaacaacaactatcgtgaatgaggtagtcatagacattaattatatcataccaagcgataaccgggaacaacaacattgtgtgccctgtctcatcagtgcaggtgattatatcataccaagcgataaccgggaacaacaaccaaagtcgccgttcatcaggttgctggtagattatatcataccaagcgataaccgggaacaacaacttccaacctcatccaggatcactgtgttttattatatcataccaagcgataaccgggaacaacaaccaacatacttgagtgccgactcctggtcaattatatcataccaagcgataaccgggaacaacaaccgcagttgagcttgaccctaagacacgcaaattatatcataccaagcgataaccgggaacaacaacgagtgaattaagcgagttcaagaccatttattatatcataccaagcgataaccgggaacaacaacatactgcaatacatccaatatgtgtcttaattatatcatatcaagcgataaccgggaacaacaacaagcacttaaaaatagtactaaaatgtgatattatatcataccaagcgataaccgggaacaacaaccagctccggtgaaagctcaagttgcagatcattataccataccaagcgattattaggaaattggattatacattagatgataatgcgatggaaactttgcgatataattgcgaaatatttatacaatagaataaaaagagaaaaatatatactttatgataagttatctgttgaaaatgttttgcatcaccgtaaaaatatatagtagatgaattgaaagaagaaagctaagtataaaagatttttatacagtttctttttgtaaataaacgcacgcataaacacacgcgagcgtttgttgcgttgcaaaaacgctcggaaagtgatagaattgtcattggagatatggacgattagaatgataccaaaaaagaaacggtctcttcaagccctattaattacctactccaatgcttcggcggattcataatgagcaatatactacagattgagaagaatactgccgggcttggaacaatgtgaagcaccagaaatactgcggcggcaatcaaaataataaggattaaaataataatcaagataatcatttgtcggttccgctaaaagcgaaaacagtgattttatggttctttttgattatatatcattgcgctgtataagagaaaattataagcaaaagcctttaagcaaaaaagagttttaaagatagacatgaatttttgatttttgaacagagtatctatttagactaattgcctatttgaattaactgcctatttaaaccgatataaaggaggcaaactttatgaaaaaaatccgcttgacctacaatgccccggttacactcacatttgtgttgctgtgttttgcggcaacgctgctaaattatatgacacaaggggcgagcaatgcgcttttgtttatgacgtatcattcgtcgctcaccaatccactgacgtatctgcggttcttcacgcatgtgcttggacatagcgggtgggtgcattttataggaaatgcctcatatctgctattgcttggacctatgcttgaggagaagcatggtggggacaatattttgaagatcattcttgtcacagcgcttgtgacgggacttataaattatatattttttccgcgggttgcactctgcggtgcgagtggagtggtgttcgcgtttatattgttgacatcgtttacgagctttagggagggagaaattcctatcagctttgtgcttgtagcaatgatttaccttggtcagcaggtgtgtgatggtatatttctggatgacaatatatctaatatggcacatatcgccgggggaattgtaggttcaatcacaggatacaaatttaacaagagaagttaacaatagcgtttgcaattaaagacaaatgtctgcgaagcagagattagtgcttgcagctataacagatgtgcttataatgcttatagtctaagaacctgcgtttttactataaacgctaatgcctgcaaaaccagttatgttcctgcgtaacaatcgtcagtgaccacaatgcaattattacagttgcagcagcctcagtttaaaaacgtacacaacaagccggattggtattatttgtgtcaggacagcccgaaggcggaattgtaaaatatttgtgaacaatgagcaatggcactgtaaatttcttgaaaaacgaaaaaaactgtattacaataatcacgtatgttatgaataggagaataaaagaataaaagaaacgaggacgtggttatggatgctgtatcggtaacgttattatttctgggactgtttagcggtatcgcacttttcctgtatggtatgagtgtgatgggagatggtcttaagaaggttgcgggaaataagcttgagacgcttttatatgggctgacaagtactccgcttaagggaattttgttgggagcgggggttacagctattatacagtcatcctcagcaacatctgttatggtagtaggatttgtaaattccggtatgatgaaggttgtacagggaattggtatcataatgggtgctaatataggaacgagtatcacagggtggattctatgtctgtcggatattcaaggggcaggtggcgttgcggcacttctgtcatcatcaagtattgccgctattgttgcgatagtcggtctttttgtgagaaacctttcaaagaaggagactcacaaggctataggtgatattatgtttggatttaccattcttatgattggtatgtcaacgatgaaggaggctatggctccgcttcaggataatccgttttttatgggaatgctcacgaagttttcaaacccttttcttggaatacttctgggtattattattactgctgtgctgcagagtgcgtccgcgtctgtgggtattctgcagtctgttgccatgtcgggatatcttccgttttcagcggcgctgcctatagttatgggtattggtgtcggtgcagcatgtcctgtccttatgagtggaatgagctctaataaaaatggaaagagaacagcgcttgtatatctttttaatgatctggcaggtatggttatctgcggaacacttttttacgcaatacaggctgtggtgactcgtggtggacagtttgcatttatggatttagagatgaaatctgtatcaattgcacttctcaacaccatataccgaacagttactatcattattctggcaccttttattaagcagattaacaagcttatgttctggataatcaaggattcaccggatgatgttgaagaccaggcggattttgatttgcttgaggagcgtttccttaggaaccctgagcttgctcttacacaggtcggaacagtcatgaatggtatggcgagaaaagcacagaagaatgttatgagagcatttgacctgatggaaaattattctgttgaacagtacaatcttattcaggagaaagaaactgtaattgataagtacgaggataagcttgatacatacatgatgaagataactgctataggtcttaacaaaaatcagaccagacagaactctaagtatcttcacacagtgagtgattttgagcgaattgccgaccatgcctgcggaatatcgcgtgcggcgagggagatagtggagaaaaagattaagttctcggatgatgccaacagggaactggctattttatataatgctgttaaggaagagcttgatatgaccgtgaagtcatttaccgaggataatatagatatggctcgacaggtagaacccttaaggataacagtgcgcatgctctgtgcggagcttaagagaaatcatatcgtgagacttcagagcggtaattgtgatgctatcaatggctttgtttttaatgaccttttgacaaatcttgagcgtattgtggcacactgttctaacatagctgttgcgatgatggaatttgagtccgatgatttcaatacgcaccagtatcttaaggatatgagaaattccgaggtatccgatatggcgaaggacgttaattactattcggagaaatattcaattgaaatgactgcacagaaagctgtgcaggacagatagtaccacggcaaaggacaagttattagcgtatatatttataaagccccatctgacaggtaaagctgtgagatggggctttattattattttttactgcgattaaggcgtgtgaactcacgggcgattaccagaatggattcattgtattcgagaggaagtgttgacatcatggaaacaacatctttttgcatgtcatcttcggcatcttttccaaaaactattgtgtccagtgaaacctgaagaccttttgaaagcttgattagggtgtccacggacatggattttcgtccgttctcgatttctgataagaatgttacagatattccgactttttctgcgagctcctgttgcgtcatgttaatggaacgcctaagctggtaaatcttattacctatgatacgattagtatcatgggaagtacaattcatataaaacctcctgtacattatttattgttaaagtaaaatttaacgataaatacaaaataccaaaaaacaaggactattgaaattaactagcaagtaatattggttaaactactgttgaaagtattgacataaataattatgtatgatgcttgtgtcaaaacatgcttatttaatgtacgagtgtataatacgctatacattctaaacttatagaacatgtttttatcactacatatctttaccactacattttattacaaaatatgaattccggaaataattaagtcggtataatcctggctgtcataggataacaatattcgattgtgtaacatttgccggcgcaacatttttcattattgaaatgtataaaatgaaacattataatatgatgttatagaataggaaaaacagaacatgaatatggggggaagaaaatgggaatagaattggatgatatattaggttttaatttttttcagtacggcagtccgtatatcggagaatgtggcggcatgcatttcaggctggcgcgcaatccgctggagaatgttgtgttcaaccatgacccacataaaaatgatgaggcattgttcgatgtgacgatatggagaggaccatataactatgataagacgaggcagaaaaagaccacagcacagtttccctttacggaggatgggcggcttgctgcggtacagtggcttaatgagaggtatgatgaacgtgtagattattgggcagatgggattcctctttttcctaaatataagactgacccggacgaaacggatacggttgaggtagatgagaatttgtctgatgatactaattaacaaaatatcaggagaaagggaatgtgctgttttatagtctgtaattatcgaggaaatccatagccgcacttgagaggggaatgttagagttgacgcaatagcttacctctcttttttttatgttcagattcgggggtgtcacttccatgagtgcaccggattcaagctcgctttttacaaattcgcgtatgacacagcctattccaagccctgttttggcaaattcgataagcagatccatgcttcctatctccatgagggttgtctgcgacagcattatatcattgaggtaggaatccacataggttcttgtaacattatcccttgtaaggagcatgaggttggctccgtggaaaagattgcccatatcagtgttttccctaagaagaaggttctttatatacccgggggatgccacaaaggtgtcatgtatggagcctgcactatataatttaagccctctctgcgaatcgggtgttgcaataagtcctatatcaatatcgcggttgtcgattagcgtgcgcgtatgaagtgaggactggcagttgatggagatgcttatatgtgggttcctgcgtacatatttttgaagtcttggcagaagaatatatttacagagggtgttgctggctccgaaacgtattctgccgatgccaagctcttttctggaattgagaagctgttcacctgtggctatctcattgaaagcgttaaaaatatgggaatataacagttcaccatcctcggttagctgtacgcctcttgaattgcggaagaacagtgtggtacccagttcattttccagctgtttt

SEQ ID NO: 3865 - DNA, 23606 bp, synthetic construct
  source 1..23606: mol_type = other DNA
  misc_feature 1..23606: note = Synthetic
ggtatattgcagtgaacagaacagccggacttgatatggtatattcaatgagcactataacgcctgagaaggttatagaaaaatactaccttgataagttggaaggtcagagaggatagctatggcagacagactaaaagattggattaagatagataaaagatttgaaaattccgttaatctttatcttgatttggacaataaaggaaagatagacagctatgtgtatacacgttcttcacagaacattatagactactatcttgaaaatatagaaaaagataaagaccacgcaacaatgcttatcgggccatatggcaaaggcaagtcgcatatgctgcttgtgctgcttgacaggctgaaaaatatggagaagccgtttctcacggtaattatatcgggaacgaatgagaatctcaatcaggcgtttttagtcggaataaatgatgcattaaaaagggaaggacttgcaggcatagctccggagagctattacggggaagcgttaaagaagattgcacagtggaaggaaaagttcccgaaagcatacagccattttgaggaagaacttataaagagcggctgtaaaagtattgatatattatgtgctcagcttgaaaaaaatgataaaaaggcattggatttgttctgcaaaatttatccggctgtaactaacggaagtgaatttaacccgatagtcatgttagagacagtgaggttatatgagcagattaaggctgttctgtcgcacgattacggatatgcgggaatatatataatattcgatgaattcagtaagtatatagaaggtcatgaaaaagagacattttcaagagatatgaaagtgttacaggacatgtgtgagcttgcgggcagaggcacgcaggggcgtatgttcataacttttgtggcacataagagtatcaaagagtacggcgctaagctgcctgaggatatgagaaatgcattcagaggtgtggaaggcagaataaaggaagtgctctttgtcgtatcatcgcagaataattatgagcttatcgggaatgtgttaaagaaggatgaagctgtattagagagaattccggacatagaaagatattataagaatgcagtgggctcttataggttttcgtgcttttccggcttgtttgatgaggaagattttaagaaatatgtagtgtatggctgttttccgcttatgcctcttaccgcgtatatgctccttcatataagtgagaaggttgcacagaatgagagaagcatatttacatatctgtcccacgatgaaaagggcagcctgtgcaggataatagaggaatgcgatgcggatgaagccgactatggcgtgacggctgacacagtatatgactattttaagaacctgttcagggaggaagcttcggacacgattgtccacaatgaatggctgaaggctgagtatgctctttcaaaaaccggcaatgagcttgaacagaagctgattaagattattgcacttataaatataatcgatataccggatgaattgccggctgatgtgccacagcttgcaggtgcgcttaatctttccgatgatgagtgcaggcagatagtaaaagcgcttacggacaaaagaattataatataccgcacaagaaagcattcatacagcttttataataatgtaggtgtggatattcagggagagatttcaaagagagccgcaaagctctcagcagacacagacctcctagagacacttggcataatttctgagtatgactatgtcctgcctaagaaatataaccaaatttattcgatgaccagatattttgaatatgttttcatgtcaccggagcagatagccaagcttccttctccacagcttttgtttgaggaacacttttcagacggtaaaatcgttgtggtcatctctgagcatgagatagattatgcacagctttcagataagcttagggatgacagggttgttgttattgtagcacatggattgtttgacaagagcgacagcatacgaaggtatattgcggcaaagactctcataaatgataaggcatttattgaggacaatgttgtactcgaaaaggagcttatcaactactgtgatgatatcgcttacgagattaacagatacttagaatcagcatacaatcctgagaatggctcatgtgcagtatttcataatggtgggaactataattcgggctttagaaacggaatgacttttaatatgttcctaagcagcataatggaagaatattacaataattctcctatagtgaacaatgaacttatcaacagacagaacatatccgcacagaataagaaagcgcgcaacaagattattgatatgcttcttgagaatgaagactgtacggcattcgagaagggaacatcgccggagtcaactatttacagagctgttttggtaaataccggtgttcttagcaatgtggaaatagacagaggctgtgacctcatgatttgtgagattgagcgttttatcacaatgtgcgataacaacaaatgctcgttcaagctcctatatgaccgtcttatgggcagcggctatggtgtgagaaagggaattattccgatatatatcgctctgtgtatttcaagattgcaggataagcctgtcataagcttaaaagacagagaagtaaatattgatgctgtcatattaggcaatataaatgacgctccgcagaattattttctgtatgtggagcatgagacaatagagaaacgcaattatattgaagagcttatcaagctttttgaaatcaagataaaagtgatgggtacaccgcaggacagggaagtgcttgatggaatcttaagatggttccgttctttgccacaggctgtctcaaacatgcatcatgtagatattgctgacggcatggataaggctcttagagggctgtgtgctgcattaagacatcaggattataatccgcatgagtttttatttaaggagcttttaagcgtattagaggcggaagagaataattatacagaagtattaaagagaatgaaatatctgaaaagatacatggatggatatttggacatactttcggacaaagtagccggaatcataaagatgcgctgcaatgcgggtgttaaggacagtttaagagctgtgcttgacgagtattatgcagagcactgcgctaagcttaaaaagcaggtaaacagaggaagaacatccgccatattgtcttatatatcaagcctttcgacttatgaggaaaaggagattgctgcgaagctttctaagctcgtcacagatatatacatagatgactggcgtgatggaatgcttgagaagttcaaggaaggctggaatgaattctgcaatgaagctgagaacagcttgcgggatgatgtacaattaaacagcattatcctaaaaggcggaagcgggagcctgcttgagcaaagctatgaagatattgaggacgacagcacaagttatttcctgaaaaatgcgataaaggatgcacttgacgagttcggagacagtcttgagacaaatgagaaggttgctgtgcttgcgagagtgcttgcggagcttgttgctggagagagctgacacacggatatttaatataataagtttggagattacaaatgagcatgatttattttgataacgcagcgacaacatttccgaagccggaatatgtgtatgagcagatggacattgtaaaccgcagtctggcatttaatgccggacgtggttcatatgctctggcgcagcagtctgccaacataatcgacaatctcaggaaagaattacttcgcatgataaatgcggcaaatgtagcagaggtcgtactgtcgccctctgctacatttgcattaaatcagataattggcggacttgggattaaggaagaacactatatatatgtatcgccatatgagcacaatgcagtggtgcggactatctataatcagggaatatttaaaaattttagagaggacgttaattgcggaaatcatatcaggattatgcctcttgcggaggatggaagcattgatatagacagactttcttatgagttcagcatacatgctcctgcatttgtctttatgacacatgtgagcaatgtcaccggatatatattgcctgtagaacagattgcagttgaagctaagggatatggtgcgacagtggttgtcgatggctcacaggcacttggacttgtgccatttgatatggcgcattcgatgattgatttctatgtatttgcagggcacaagacaccatatggaccatttggaataggcggtttttttataagacatggaaaaaaactggattcctttattgcaggcggaacaggaagcgattcgctgaatgtgcatatgccggagtcgggaacgggcagatatgaacctgcaagcccgaatgtgttggcggcagcaggacttctcgctgcgattaagaatgttgacaatgcagagatagaaaggcgcctggctttagagaaggaacacatgcgctacatagcagacaggcttggcagcctgcacaatgtgaagctgtatcttccgcctgaggacagacatgcaggaattgccgcattcaatgtaaaaggctataaagcatcggatgtagggatgattcttgatgctgattatgatatcgcggtgagaacaggctaccactgcgcaccgctcatacatgaatatcttgacgacaaggaatactccggtgttgtcagagcaagcataagcatgtttactacagtggatgagatagatgcacttgtaagagcggttggggagatttaggaggaagatatggatttacgatttgcagagataagaaatataagtcaattatgcatgcctaaggatggaaaggaaaatgtacctttaaaagtggagattccatattatcagagaccatataaatgggacagagacagaataaagagcctgataaaggattttcatgacaacgaggaaatggatgatgagaatgaggaatattttgcaggctcagttgtcatggttacaggtaaagacggcatatttgaaatagttgacggacagcagagaattaccacgctttttttgatgaattacttaagatttcttattataaggggatatatagatgagctgattcatggcagaaaaacatacaagcttgcaaatgggatgaatgagctgatagatactgccataaacatatttgacgaagataaggtcaaaaagctcagagaaattgacgctgtaataagtgattatgtggataaaattgaagggaaaagcgcagagcaggttgatgaaaaggaagaattatggaatgagctgacaaattattatcaatcaagccttggtcttgttgcaagaagtatttcggatgaggaacattataggactgcatgtgtggaaaagaacagaagattcttatcggatgtaaagcttgcacttacatacagcagaagcagctacaatgaaagattaaaggaagctttatcgaggatggtaatgaatttcacgaatttgactatgcccggattggataaagtaccctttgacaagaactcaagcaaagaaaattctgtcaccgagcaatatatgaatgctatggaagcaatatatgatgaactctatgatacatatattgtcgataagggaatcgtttttgaagaatatattaaaaagttaagtcaggctatcaaaaaaatattagaaaaaattaaactctgcgttgtcgtcacaggaaaagagaaggacgcttacacattatttgaggtgttgaatgacagaaattttcctgttgaagatttggagcttatcaaaaacctgttttataagtggtattgccatcacacggacgatgaatacagcacggatgaatatattgagcaggcagacaagctgtgggtggaaaaaatatttcctgataagggggcaaaggaacgctctaagcttatttcatatcttgcggcacagtattttaccgcagatagcagcttaaaatataatgacaacgaaaagtaccgtgaagcgattgagagaaaatatttaatcaacaaccctgattatgacggaaaggcattgttaaaggatatttacatatatgagatgctcggcattgtcttagatgagtttgattttgcatacaggaataaaacagatattgtcataaaaacagagagggaaaattctaaatccattacttacaaagcattaaatctgctaagtgcacttacaatgtacggggttataccggcaattaccaatattattatcaagaaatatttggacaagcacccgtttgataacattgacagcgatgaactaatgacaaatttcaggttatatgtccgtgggataaaggaagatagtgaaaataacaatgatgagtatgcaaagatacataatgtagcttatgagttctggcgctttgcacttcttgcaaaggattccaataacccaagaagcatagcaaaagattacattgaaagaaataatgttgtcgaaacggattatattttaaaagtgagcagcagaagcattgatgcacttaatgcggaatttaaaaagtggattgatgaatggagatatggcaatgaaaagtcacagttaaaagtaaaagtattgtttataaacttgttttattctaataaggcaggaaacacgcttatttttaaaactggtacaaaattcggaagcaacaatatccagttagatcatctagagcctgacaggaaaaataattcggcactggaaaggtattttgaaccttcaaccaatattgcaagggaaaattataccgatggactcggcaatttcatgattatggacggcagcagcaataatgataagagtgcaatgccattgcaggatgcacttggaaaatcaggtctttatgatgaaatgagtgggcattggcttattcaggagatacatgaaatttttgatgatgctgaatgtgtaatcgacaggcatgttgacaatgatattgtatatagaataccgaatgaagagttttttaacagaagaaaaaagcgtttgataagttattttagcgcaattttaaacaaaaggctgaacgatgacagagtggaaataagagagcaatgataaattctgaaaggaggcatttaagatggcagaggtagatgaaaagcttgtaaaatcggttatgtttgaaattcttcacattgaacggcagaatatcagaagcaaggcaaagacggatataaagatggtggaggagctgggagcggttatccgcgaaaatgtgaaattgagtaaatagtggcgaggagaaggcacgaatgaaatttaaaacattaaaaatgaaaaattttatgcgctacaagggtgttaatgagattgaattcagctgtgacagtgaaaaaaatgtgacagtgatattgggggataacactgtaggcaagactactcttgcacaggcatttcgctggtgcctgtatggagctattttgaaggaacgtgataagaaagagagtgactatcagcttcttaacaatgatgtattggctggtcttgacgcaaataagactgcgactgtgtttgttgagataacggcgatggacagtgaaagcttatatacaatccacagagaagttcaatatatgagagtgtatcctaagctgttagctaaagaatcgtataaagtgctgaaggcgtttgttgcagatattaacagtcctgatataagacgtgagattgagccgggacctaaatatgccctcacgaatgaatttataaatgagctttttcctaagaatctttcgaattattttttgtttgacggcgagcgctggagtgattttgcgataaatggtgtgaaagaagacatcaaggaatccgtgcatattctcaccggattatcggcataccgcttggcaatgatgcatttaaaggatttgggagatgcatcggttattaagaaatttcggaaaaatatccaaggtaaaggcaatatatatgacgattatggaagagaacttacgagattagaacgagaaatcgaacaatgtaagcataatcttgaaagccttgatgcgacaatcagtcatttcagtaagaaaagcagggaagtcgagttatatcttgaagcaaacaaagacacggaggagcttcagaaagcttacaagcagtatcagagtatactgagagcacagaacgaaggttacatagctaattttaagaattttgtaacagagtatgaccagactgcatacagagagtttgcaaggccgctcatagaagcttcgctcaagatggtgaagtcggttgcaggtgagcgccgtgatataccgcacatgaagcaggcaagtattgattttataataaaaagcgggcgttgtatatgcggtacgccgataacaaagggctcgcatgagcttgaatgtctgttagaacagagaaattatcttccgccagccgatatgggttcacttcttggtgaattcgagaggacagccgggcgctggaacagggctgagaatgaacttacagaagatgcaaagcaggttgatgattgtgcgagaaattatgaagatacacttattcagcttcacaagattgagcagaaaatagatgagaatatcaactttgcggagaagagaagtgagcttagaagatacaaggacgaagcagacggagcagcccgcaaaaagggtgagataagagctcttattgaatctaagcaaagtagaatccacagtatagagcttcagatgcatagtcaggagcttaagaatgccgagaatgagaaatggcgcaggagagttgagcttgctgaagctgtgtataacagaatcagcgcagatttttcaaaggaagagaaaaaaatcttcaatgaattgaatgaggaaatacaggctaattttcaaaaaatgttcaatgcaaaggataagaaaatacagcttaccgagaactatgaaatacagatgtgttataacaccggcgtgggttacagagaggagcgtaatctttcagaaggagagaaagtagccagaaattttgctttcattgtaacgataatggattacagccgcagaaagaagcttgaacgaaatgcgggcaagcatgaggagaacagattaaatgatgatgatacgcttcctattgtgcttgatggtccattttcaaaattaggtgatgagaatatttcgcttgtggcaggtgtgcttccgaaggtttctgagcaggtgattgtatttatgcttcgcaaggactgggtacatacaggtcttgacagatatgtcggtgcagagtatttgattgataagaagcctgaggaagcatatgcatcgataagaaaggtggagagagcatagtggcagattttgaatttttcaagaaagagttcgagtttgagggcaaacacgcacgcatggtgagtgagctgtggtcgaaagatgattatgagcatacatattttaagagggctattgatgtgtatgttttcgcagccataataggtatcaggcttgacagaaaagcaccgagagattattcacctgtcgagacaaggagtattctcccggatcagatgattaaagctaaagaagacttggactttataatgcagatgatgataatgttagaatcggactccgataagacggatgaggaaaaagtgcgggaagcgtttaagggcgcacagacaaaggaagaatatgacaggcttatgaaaagcttcaacgactatgtccgtggcggtgttgaggagctatacgagagactcattgaacaaaagcccggctctgagggaagattctatgatgaaagaacggcaaatcttatgtgtttatatgagagatttgtgccgagggaagagtgaagctgtaatatacatcaaaaaataacataaaaatagaaaaatttataaatttagtctttacttttgtaaatatatgggatataatagacttacgttatatcataccaagcgataaacggttacaacaataaggtcccgccgttggcggtgtacctcaaagctctaatcccatctaaagtgaatactttaggtgggattatctattttatgcagaaaggaatacttatggaggaaatgaagcatttaaacagaaaagcagaggtacctaagccgacagacctgaattacagaatagggcttgatataggtatagcatcggttggatgggctgtgctggagaacaatagtcatgatgaaccattcagaatcattgatatgggagtgcgtatttttgacacggcagagcagccaaagactggagcttcacttgctgcaccaagaagggaagcacgttctgcaagaaggaggttaagaaggcgcggacacagattagagcgcatcaagaagctttttcaggcagaaggacttattgatattgaagaatttgaagcgcgctataaaagagcaggacttccggatgtatataggcttagatatgagggacttgacaggaaacttaataatgatgagctggcgcaggtgttattacatattgcaaagcatagagggtttaagtcaacgagcaaggcagaagaagctgaaaatgatagtgataatgcaaagaaaaaagaaaatggagcaataaaagaaagtataagcaaaaataaaaagcttatggaagaaaaaggatatagaacagttggagaaatgctgtatcttaatgagaatttccgtacagaatgtcattggactgaggaaggctatatactcacaccgcgcaataaatcaggagattataagcacactgttttaagagatatgcttgccgatgaagtaagaagcttatttgctgcacagagaagcatgggtaatatgaatgctacggaagaacttgaaaatgcttatctcgatattatgttaagtcagcgttcatttgataagggacccggtgcacctagtaaatatgctatggaaggttttgaagacagagtaggattatgcacatttgaaggtaagaatggagagaagcgtgcaccaaaggcggcgtacacttctgaactttttgttgcgttagagaagataaatcatactaagattgtaagtaatgatggaagtaccagattttttacacaggatgaacgagatacaataatttcgcttatccacagacagcagacagtaaaatatataacagtgcgtaaagcgattggacttgcggagggagaaagattttacaatcttaattacagccagaaagcaggcagcaaaaagtctgctgaggaaacagattttgtcaagctggaaaattaccataaaatacgaaaagctctgaatgaggatgtggtatcagagcacctaggacaggaaaagatacagctatatgacagtatagctgctatacttacattgtttaaaaatgatgacagcagaataagcaggctggaaaagttaggtatttcaccggagtgttatgatgctttgcttgaaatgtcacctaataagtttcacaatctttcgttaaaagcgatgggtaagataattccgtttttgcttaagggtaatacatacgacaaggcatgtgtgcttgccggatatgattttaaggcggaaaacagcagtgaaaaatctgttttattaaagggcagaaacataacagatatagtaaatgatatcactaaccctgttgtaaggcgctccgtatcacagactatcaaggttataaacgcgattatacttgaatatggcagcccgcaggcggtgaatattgagcttgcaagagaaatgtcaaagaattttgatgagagaagaaagctcaagtcggatatggagtcaagagagaaggagaacgataaattcctaaagcgcgtaagggagttaaaatccaatcctacaggtcaggatatagtaaaatatcgtctttgggaagaacagggaggaatctgtctttactcaggagagaagatagatataaatgaccttttctcacagggcggaggctatgatgttgaccatattctgccatacagcattacttttgatgattcataccgcaacaaggtgcttgtgaaggcttccgagaacaggcagaagggaaacaggactccttatgaatatattatgtctgacaagggtgttgatgcatggaacagatacgaagcactgataaaaaatactgttaaagactataaaaagcagcttaaattattaaagaaacacatcactgacgatgagaaggcagagtttaaggagagaaatctcacagatacaaagtatattacacgaattatctataatatgatacgccagaatcttgtcttaaagccatatcttaatcttgaaagagagagaaaaaagcaggttgtggctgtcaatggagctataacacattaccttagcaagagatggggacttgagagtaaggataggcgtacagacacgcatcatgcacaggacgctgttgtaatagcatgtacaacggatggaatgattaataagatatctcgctactcaaaaggcagggaattatactattcaagaggatttaagttcgttgatgaggaaacaggagaaatcttaaatcgtgatagtttttcacgcgaagagtgggatgaaaagcatggtgtgcgtattcctctgccgtgggagcactttagagatgagttggatattcgcatgtcaaggtatcacggagtaatcgaggatgcaattttagagacttccccaagagaatttatcttgtcacatagagatgtatataattggattgattatcctgagtggatgtttgttaaaggaagacctggacgcaggggagtgcttgacggaatatttgtctcaagaatgcctaaccataaggtgagcggacaggcacatgaggaaacgatacgttcggcgaagtattatgagaatggcggaagtgtctttgagaccggaggttatgttgtaactaagaagtcgattcaggatatcaagctcaaagatggagaaatcaaagaatttttcaatccggacagcgacaggctgctctatgaagccttggttgacaggcttaatcaatatggtaatgaccctaaaaaggcatttgccgagccattttacaaaccaaagtcggacggtacaccgggacctattgtcaagaaaatcaaggtattcgaaaagcagacctcaggtgttatcgtaagagacggaaatggcattgccgcaaatggttctatggtgagaattgacgtattctgcgagcaggataagggaaagaaaaaatattattttgttcctatttatacggcggatgttgttaagaagagactgccgaatagagcggcgacagctaataagatgttatctgagtggcgtgtgatgaaggaagagaattttatattcagcctttattctagggatttggtttatattgagagtgataagggtgttgtttcgaaaaaagttgatggacaaacaatacgagtacataatttatattcatattttatgggtgctaatactgccacggcaagtatatctggtaaatttcatgatagtagtgccacatatgaaagtcttggtattcaaggacttaaagatttgcgaaagtgcaacgtagatgtgcttggaaatatatctttcgtaaaaaaagagaagcgcatgccatttaactaaatcgaggtaaaatgtatgggatatcgtaacattaagattgaaagctccataggcttacatataaaaaattcacagttaatcattggcgataatggagtaagctttccgcttgaagatattaattgtgttcttatagagaatcagtcagttacggtatcttcatacatgcttcaggagtttgcaaaaaatgagattgcattgtatgtgtgtgatgaaaaacatctcccaaacgcagttcttttgccattagtaaagcacagcaggcactttaagatgctaacaagacagattgaagttggaaagccgcttatcaagagactatggcagcagattattgtgtgcaagataaaaaatcaggcattgtgtctaaaagaaatgggattagacggttatgataagctcctagcaatgacaaaagaggttcaatccggagataaaacccatgtcgaatcaaaagcagcagcgtactattttcgtgctctgtacggtgatgattttacgagagataatgaatgtataataaattcggcaatgaattatgcatatgcgataataagaggtttgattgcaaggtcgattgtgtgctatggtctggaaccttcgcttggaatgtttcatcatagcgaactgaacagctttaatctggcagatgaccttattgaggtattcagaccgttggttgatttgtatgtggcgagtcattttgatatagctgaagttgattttgacttgactcctcagataaaaagagatttattcaatattattaattacgatatgtctgtgaaaggggataagcgcattataagcaactgtattgatatgcttgtgtacagttatagcggagctatacaaggaaacaggacagaccttgagattcctgaattaataccgttgcaggtgcatagctatgaataagtttatgagattgatggtattttttgatttgcctgttgtaaaagataaagacagaaaagcaacggctaaatttcgcagatttcttttgaaggatggatatgtcatggttcaatggtctgtgtattcgcggctttgcaatggtgccgactcaatacaaatgcataagcaacgcctgaaacaaaatttaccgcaaaaaggctctgtgcgctgccttgtcttgtcagaaaagcagtattcgtccattgatattcttcttggaacatcgacatttcatgatatggacgaatcaacggatttgataaatattttttgaaaaaagaataattttgcttacgaaaaagaaacttttgccatctttttttacatgaaaaatccccgtgaacgtaataaacacggggatttttcgttccctattataccataccaagcgataactgggaacaacaacaccatatacatctccatataatattagcctattataccataccaagcgataactgggaacaacaacacttcatactgcttgtttgtgcccttattcattataccataccaagcgataactgggaacaacaacatgaccatgatttcattgcggtgttaataattataccataccaagcgataactgggaacaacaactacttgtagccgtgttacacctttttaattattataccataccaagcgataactgggaacaacaactgagggttcaacctatcacggttgttcttattataccataccaagcgataactgggaacaacaactgacaatcacacgaaaatgtgatacgctttattataccataccaagcgataactgggaacaacaacgcatcattgcagtaccaagctgtcattgtattataccataccaagcgataactgggaacaacaacctgttttagataatctaaatgccgttgcccattataccataccaagcgataactgggaacaacaacctaggggctttttgtgtctagggtacaaatattataccataccaagcgataactgggaacaacaacgaatgactcggacgattttattcccggtatattataccataccaagcgataactgggaacaacaacaataagatttgataaccactgtttaagctattataccataccaagcgataactgggaacaacaaccatattagataaaagagtaccaactaaagattataccataccaagcgataactgggaacaacaacataatgtccaccgtaagaaccgaaatcaaaattataccataccaagcgataactgggaacaacaactcttgccgcctacgctgaatgttaactcgaattataccataccaagcgataactgggaacaacaacgcttttggggcaaagccaaattgtgtcttgattataccataccaagcgataactgggaacaacaacgactgcaccaagtgccctaagcaggctgaaattataccataccaagcgataactgggaacaacaactgttaagtaaatggtaacggctcattgcaaattataccataccaagcgataactgggaacaacaacctgttggcaacaactgacggcttaacggaattataccataccaagcgataactgggaacaacaacctgttggcaacaactgacggcttaacggaattataccataccaagcgataactgggaacaacaactcgacttattcgtgctattgacctgcgtacattataccataccaagcgataactgggaacaacaacgtgttgatgaatatatagcaagcgaaaaagattataccataccaagcgataactgggaacaacaaccatataagtgcattatttgtgaatgttgcaattataccataccaagcgataactgggaacaacaacatttgaggtgtgcgtatgtgcgaattttgattataccataccaagcgataactgggaacaacaactctcaccgagcgaagtcttgtatatctgatattataccataccaagcgataactgggaacaacaactacttccgctggcacatgaccggtagccccattataccataccaagcgataactgggaacaacaactgctaccctcacaaaagtaatcacatgtatattatatcataccaagcgataactgggaacaacaacggaattaaaaattccggaattgctattccgattataccataccaagcgataactgggaacaacaaccgaaggaaaagaggaagaacggcggcaagtattataccataccaagcgataactgggaacaacaactagtaacaggcttgaactgcttaccagaaattataccataccaagcgataactgggaacaacaactcggtaagtttgggtgaatatgctggagatattataccataccaagcgataactgggaacaacaacggttgcggttcggtttctcatcaactattcattataccataccaagcgataactgggaacaacaaccaacgatatcaagatagtcctctttaggaattataccataccaagcgataactgggaacaacaactgcaaccgagcaagattatcttgaatacatattataccataccaagcgataactgggaacaacaacttcacgtttgaccctaaaaaagtagatagtattataccataccaagcgataactgggaacaacaacgtctgcgttctgcacttccctgtagcggtattataccataccaagcgataactgggaacaacaacttggtttcgtaatattgccgatttctataaattataccataccaagcgataactgggaacaacaacattttatttctgtgataaatggaattaccgcacatagaccgtcgactaaagactatttttataaaatggattggatttactgaaggccattaagccagccggagaactgttcaagaacatttgtatataattcattgtcagaggcgttgtccaaatccttcattttagagaagccggtattatcatgggttcttccgggcatatcatctagggcaataaggtatttgaactgctcattaccgatacctatgaattgaataaatacattcatattagaagatttcttgataatcttatcagctgcaggcttgtcggcgttttcgccatcggtgatgaaaagaataaatgttgggtctccgtcatcaactaaagccttcgttgtaaccgtctttgcaccaaatccgaggaaaccgccttttttgtatgagctgccttcgataatagctttgagaacaggagcgtagcaagtgccgcccatagaataaccggaagtgttgacaacattctttacataattttcataattgtaagattaaggtcgggaagcttgcggtaatcgttctgaaaaagataaacatcaatagaaccattatcgtcaaatgttaatccgagtggtacaaggcggttaatagtcttttgaacggtaccattagaatataagttagccatagaaccgctgtaatccaagacaaccacaacctttgcacttgttgagcctaaatcgacaccgctttttttgcttaaatcaaccacacattttgataagcttacaacatgcttttcgaggtttaccttatcttttgagagactgattttgcccatcatctcctgtgcaagctcttcctcattttttcgtaactgtacatatatatagacttattataacatataaaaaagtgactttgtacaaaaaatttaaagtattttgacagatttttattttgtaagcattaaagcttattggagtcataaaattcatgcgaaggatagctcaatcagttaccttgcatatgaaatttaattctaatcattgactggatcaaaggagttgtatacaattatataaacgcaggcattttatgataaacgagaaacgatgggtgaacttttttgtccggtgtctggtacgagcaggtatcggatagaggtgcgaagcatcagtttttttatgaacaggaagcgagagcagattgtgaatatatgatataaaatactttgcgtcaggaatataagaaagttaaaatatcataaactatgatggaggagatagcagccatgaaaaagataaggttgacctacaatgcaccggtaacactcacttttgtcctgttatgttttgttgcgacattgcttaattatataacgcagggagcaagcaatgttctgctgttcatgacttataattcgtcacttacaaatccgctgacgtatctgagattctttacacatgtgcttggacatagcggatggatacattttatcgggaatgcatcgtatctgctgctgcttggacctatgcttgaggagaagcatggcggggacaatattttaaagattattattgttacagcacttgttacaggcattatcaattacatatttttcccaagagttgccctctgcggtgcaagcggtgtagtattcgcatttatactgctcacatcgtttacgagcttcagggaaggtgaaattccgataagctttgtgcttgtcgcattgatttatttggggcagcaggtatatgatggtatctttttgaatgataatatatcaaatatggcacatattgcgggcggtatagttggctcaataacaggatataagttcaataagagaagatgaattctaaaaaaaatgtgaattatgagtaataacaatgtaaatttcttgaaaaacgaaaaattctgtattacaattaaaccatatgtataaaagaataaaagaaacgaggacgtggttatggatgctgtatcggtgacgttattatttctgggattgtttagcggtgttgcactttttctgtatggcatgagtgtgatgggagacggtcttaagaaagttgcgggaaataagcttgagacgcttttgtatgggctgacgagtactccgcttaaaggaattttgttgggagcgggggttacagctattatacagtcatcctcggcaacatctgttatggtagtcggtttcgttaattccggtatgatgaaggttgttcagggaatcggtattataatgggtgctaatataggaacgagtattaccggatggattttatgtctgtccgatattcagggagcagagggagttgcggcattattgtcttcgtcaagtatcgctgcgattgttgcgattgtgggtcttttagtcagaaatctttctaagaaagagactcacagggcagttggtgatattttgtttggatttacaattcttatgattggtatgtctacgatgaaggaggctatggctccgcttcagaataattcatttttcatgggaatgcttacgaagttctccaatccttttcttggaatccttctgggtattgttattactgctgttttacagagcgcatcggcttccgtaggtatcttgcagtcggttgccatgtcaggatatcttcctttttctgcggcacttcctatagttatgggtattggtgtaggtgcagcgtgtccggttcttatgagtggtatgagctcgaataagaatggaaagagaacagcattggtatatctttttaatgatttagccggtatgcttatatgcgggacaatattttatacagtgcaggccattgtgacacatggtggccagtttgcatttatggatgtcgagatgaagtcgatatctatagcactcttgaatacgatttacagaacgcttactattattattctcgcaccgtttatcaagcagattaataagctgatgttctggataattagggatacgccggatgatgttgaggatcaggcagattttgatttgcttgaagaacgtttcttaagaaatcctgagcttgctctctcacaggtcggaactgtaatgaatggaatggcaagaaaggcacagaagaatgtaatgagggcatttgaccttatggataattattctgtagagaattacaatctgattcaggagaaggaaaatgtaatagataaatatgaagataagctcgatacatatatgatgaagattacagcgatagggcttaataagaatcagaccgtacagaattcaaaatatctgcatacagtcagcgattttgagcgaattgccgaccacgcctgcggaatatcaagggcggcgaaggagattgtagagaaaaagattaaattttcagatgatgcaaagagagagcttgagatactctacagtgcagtcaaggaagaacttgatatgactgtaaaatctttcactgaggatgatatcgatatggcacggcaggttgaaccacttagaataactgtccgcatgctgtgtgcggagcttaagagaaatcatattgtgagactccagagtggtaattgcgatgcgataaatggctttgtttttaatgacctgttaacaaatttagagcgtattgttgcccattgttctaatatagcggtagctatgatggaatttgagtcggatgattttaacactcatcagtatcttaaggatatgagaaactcggaaggctcaggcatagctaaggatgtaaattattactccgataaatattccgttgagaagtctggacaagacaaataattgtggtgtaaaataatcactgtgcagaaatgtacggtgatttttttataaaaacaccccatccacaagcatttcctgtgagatggggtgtcttctgcaatacttatttaatttttgttgcgattaagacgtgtgaactcacgggcgattagcagaatggattcattatattcgagtggaagagttgccatcattgaaacaacatccttttgcatatcgttctcggtgtcgtttccaaatacaatagtatccagggaaacttgaagaccttttgataacttgactagggtatccacggacatagatttgcgtccgttctcgatttctgataagaatgtgacagatattccgattttgtctgcgagctcctgttgtgtcatgtttatagagcgtcttagctggtaaatcttattgcctatgatacggttagtatcatgggatgtacaattcatataaaacctcctatgtattatttaatgttaaagtaaaatttaactataaatacaaaataccaaaaaatggaaactattaaaattaacacaagtttataatttgttcatttgaagttgaatcgtgtttgctgtaggagtaatattttattatcaaggagagagaatatgaaaatagaagaaaaagacatattgggttttaatttttttcaatatggaagtccttatattggtgagtgtggcggaatgcatttcaggattgcgagaaatccgcttgaaaatgttgtattcaatcatgacccgcacaaaaatgacaatgctatgtttgacgtgactatttggagaggaccatttaattatgatacgacaaggcagaagaaaaccactgtgcagtttccgtttactgaggatggcagagtacagtcggtgcagtggcttaatgaaaagtataaagagcgtgtcgattattgggcggaaggaataccgctttttccaagatacagcagcgaccctgacagtgaggacgaggttgaggtcgatgaaaatttgacagatacagcgtcagagtgatggatggagcggtgtcaaagtctgtaattattcaggaaatcgagagcagcgttagagagaggaaggttagaattaacgcaataactgacctctcttttttttatttcgaggttaggcggagtaacctccataagtgcgccggattctaattcggatttaacaaactcgcgtatgacacatccgattccgagtcctgttttggcaaattcgatgagcagatccatgcttccgatttccataagagttgtctgtgagagaatgctgtcgttgagatatgagtcaacataggtacgcgttacattatctcttgttagcagcataagattggctccgtggaacagattgctcatagtagtgttctctctgagaagcagattttttatgtagccgggtgatgcgacaaaggtatcctgaatggagcctgcgctgtataatttcagacctttttggtagtcgggagttgctataaggcctatgtcgatatcgcggttgtcaataagtgctttggtgtgtattgatgactgacagttgattgagatacttatatgaggattctttcgtacatatttttgaagttttggcagcagaatatatttgcatagtgtgttgcttgcaccgaagcgtattctgccgacaccgagctcttttcttgagtttaggagctgttcgccgatattaatctcattgatggcattaaagacatgtgaatacagcagttcgccatcgtctgtcagctggacaccttttgagcttctgaaaaaaagggctgtgccgagttcgttttcaagctgcttgatggctttgctgattgcaggctgacttataaaaagtctttttgaggcagccgacaggcttttagtctgtgcaacggcgagaaaaatattgtagagattgagagttacatgattgggtgaacttttttcgttattgttactcataaaacgattcctttcataagagcgcaggtttatatatcaatgtataactataagttatagaaagtataaataatatgtattattagaatagcaaaaaatgtgatattattcaagcagtaaccttgataatccggtacgaaatagccggatacaggaaaagaaatgaggaattattatgggtatgacgatgacacagaagattcttgcagcacatgcaggtcttccttatgttgaggcaggacagcttattgaggcggatcttgaccttgttcttggaaatgatatcacatctccggtagcaatccatgagatggataagatgaagaaaagcggagtctttgataaggataagatagctcttgttcctgaccactttgtgccgaataaggatatcaagtcggcagagcattgtaagtgcgtcagagagtttgcaaagaaaaatgagattaccaattattttgaagtcggacagatgggaattgagcatgcacttcttcctgagaaaggtcttactgttgcaggcgatgttgtaatcggagctgattcacat

SEQ ID NO: 3866 - DNA, 23594 bp, synthetic construct
  source 1..23594: mol_type = other DNA
  misc_feature 1..23594: note = Synthetic
cgcctgagaaggttatagaaaaatactaccttgataagttggaaggtcagagaggatagctatggcagacagactaaaagattggattaagatagataaaagatttgaaaattccgttaatctttatcttgatttggacaataaaggaaagatagacagctatgtgtatacacgttcttcacagaacattatagactactatcttgaaaatatagaaaaagataaagaccacgcaacaatgcttatcgggccatatggcaaaggcaagtcgcatatgctgcttgtgctgcttgacaggctgaaaaatatggagaagccgtttctcccggtaattatatcgggaacgaatgagaacctcaatcaggcgtttttagtcggaataaatgatgcattaaaaagggaaggacttgcaggcatagctccggagagctattacggggaagcgttaaagaagattgcacagtggaaggaaaagttcccgaaagcatacagccattttgaggaagaacttataaagagcggctgtaaaagtattgatatattatgtgctcagcttgaaaaaaatgataaaaaggcattggatttgttctgcaaaatttatccggctgtaactaacggaagtgaatttaacccgatagtcatgttagagacagtgaggttatatgagcagattaaggctgttctgtcgcacgattacggatatgcgggaatatatataatattcgatgaattcagtaagtatatagaaggtcatgaaaaagagacattttcaagagatatgaaagtgttacaggacatgtgtgagcttgcggacagaggcacgcaggggcgtatgttcataacttttgtggcacataagagcatcaaagagtacggcgctaagctgcctgaggatatgagaaatgcattcagaggtgtggaaggcagaataaaggaagtgctctttgtcgtatcatcgcagaataattatgagcttatcgggaatgtgttaaagaaggatgaagctgtattaaagagaattccgggcatagaaagatattataagaatgcagtgggctcttataggttttcgtgcttttccggcttgtttgatgaggaagattttaagaaatatgtagtgtgtggctgttttccgcttatgcctcttaccgcgtatatgctccttcatataagtgagaaggttgcacagaacgagagaagcatatttacatatctctcccacgatgaaaagggcagcctgtgcaggataatagacgaatgtgatgctgatgaagccgactatggcgtgacggctgacacagtatatgactattttaagaacctgttcagggaggaagcttcggacacgattgtccacaatgaatggctgaaggctgagtatgctctttcaaaaaccggcaatgagcttgaacagaagctgattaagattattgcacttataaatataatcgatataccggatgaattgccggctgatgtgccacagcttgcaggtgcgcttaatctttccgatgatgagtgcaggcagattgtaaaagcgcttacggataaaagaattataatataccgcacaagaaagcattcatacagcttttataataatgtaggtgtggatattcagggagagatttcaaagagagccgcgaagctctcagcagacacagacctcctagagacacttggcataatttccgagtatgactatgtcctgcctaagaaatataaccagatttattcgatgacaagatattttgaatatgttttcatgtcaccggagcagatagccaagcttccttctccacagcttttgtttgaggaacatttttcagacggtaaaatcgttgtggtcatctctgagcatgagatagattatgcacagctttcagataagcttagggatgacagggttgttgttattgtaacacatggattgtttgacaagagcgacagcatacgaaggtatattgcggcaaagactctcataaatgataaggcatttattgaggacaatgttgtactcgaaaaggagcttatcaactactgtgatgatatcgcttacgagattaacagatacttagaatcagcatacaatcctgagaatggctcatgtgcagtatttcataatggtgggaactataattcgggctttagaaacggaatgacttttaatatgttcctaagcagcataatggaagaatattacaataattctcctatagtgaacaatgaacttatcaacagacagaacatatccgcacagaataagaaagcgcgcaacaagattattgatatgcttcttgagaatgaagactgtacggcattcgagaagggaacatcgccggagtcaactatttacagagctgttttggtaaataccggtgttcttagcaatgtggaaatagacagaggctgtgacctcatgatttgtgagattgagcgttttatcacaatgtgcgataacaacaaatgctcgttcaagctcctatatgaccggcttatgggcagcggctatggtgtgagaaagggaattattccgatatatatcgctctgtgtatttcaagattgcaggataagcctgtcataagcttaaaagacagagaagtaaatattgatgccgtaatattaggcaatataaatgacgctccgcagaattattttctgtatgtggagcatgagacaatagagaaacgcaattatattgaagagattatcaagctttttgaaatcaagataaaagtgatgggtacaccgcaggacagggaagtgcttgatggaatattaagatggttccgttctttgccacaggctgtctcaaacatgcatcatgtagatattgctgacggcatggataaggctcttagagggctgtgtgctgcattaagacatcaggattataatccgcatgagtttttatttaaggagcttttaagcgtattagaggcggaagagaataattatacagaagtattaaagagaatgaaatatctgaaaagatacatggatggatatttggacatgctttcggacaaagtagccggcatcataaagatgcgctgcaatgcgggcgttaaggacagcttaagagctgtgcttgacgagtattatgcagagcactgcactaagcttaaaaagcaggtaaacagaggaagaacatccgcaatattgtcatatatatcaagtctttcgacctatgaggaaaaggagattgctgcaaagctttctaagctcgtcacggatatatacatagatgactggcgcgatggaatgcttgagaagttcaaggaaggctggaatgaattctgcaatgaagctgagaacagcttgcgagatgatgcacaattaaacagcattatcctaaaaggcggaagcgggagcctgcttgagcgaagctatgaggacattgaggacgacagcacaagctatttcctaaaaaatgctataaaggatgcacttgacgagttcggagacagtcttgagacaaatgagaaggttgcagtgcttgcgagagtgcttgcggagcttgttgctggagagagctgacacacggatatttaatataataagtttggagattacaaatgagcatgatttattttgataacgcagcgacaacatttccgaagccggaatatgtgtatgagcagatggacattgtaaaccgcagtctggcatttaatgccggacgtggttcatatgctctggcgcagcagtctgccaacataatcgacaatctcaggaaagaattacttcgcatgataaatgcggcaaatgtagcagaggtcgtactgtcgccctctgctacatttgcattaaatcagataattggcggacttgggattaaggaagaacactatatatatgtatcgccatatgagcacaatgcagtggtgcggactatctataatcagggaatatttaaaaattttagagagaacatagataatggaaatagtaatgtagatgaatataggctgggatattgcagtgaggatgacgttaattacggctgccatatcatagttatgcctcttgcggaggatggaagcattgatatagacagactttcttatgagttcagcatacatgctcctgcatttgtctttatgacacatgtgagcaatgtcaccggatatatattgcctgtagaacagattgcagttgaagctaagggatatggtgcgacagtggttgtcgatggctcacaggcacttggacttgtgccatttgatatggcgcattcgatgattgatttctatgtatttgccgggcacaagacaccatatggaccatttggaataggcggtttttttataagacatggaaaaaaactggattcctttattgcaggcggaacaggaagcgattcgctgaatgtgcatatgccggagtcgggaacgggcagatatgaacctgcaagcccgaatgtgttggcggcagcaggacttctcgctgcgattaagaatgttgacaatgcagagatagaaaggcgcctggctttagagaaggaacacatgcgctacatagcagacaggcttggcagcctgcacaatgtgaagctgtatcttccgcctgaggacagacatgcaggaattgccgcattcaatgtaaaaggctataaagcatcggatgtagggatgattcttgatgctgattatgatatcgcggtgagaacaggctaccactgcgcaccgctcatacatgaatatcttgacgacaaggaatactccggtgttgtcagagcaagcataagcatgtttactacagtggatgagatagatgcacttgtaagagcggttggggagatttaggaggaagatatggatttacgatttgcagagataagaaatataagtcaattatgcatgcctaaggatggaaaggaaaatgtacctttaaaagtggagattccatattatcagagaccatataaatgggacagagacagaataaagagcctgataaaggattttcatgacaacgaggaaatggatgatgagaatgaggaatattttgcaggctcagttgtcatggttacaggtaaagacggcatatttgaaatagttgacggacagcagagaattaccacgctttttttgatgaattacttaagattccttattataaggggatatatagatgagttgatccatggcagaaaaacatacaagcttgcaaatggaatgaatgagctgatagatactgccataaacatatttgatgaagataaggttaaaaagcttagagaaacggacgctgtaataagtgattatgtggatagaattgaaggaaagagtgcagagcaggctgatgaaaaggaagaattatggaatgaattgataaattattatcaatcaagtcttgggcttgttgcaaggagtatctcagatgaggaacattataagactgcatgtgtggaaaagaacagaagattcttatcggatgtaaagcttgcacttacatacagcagaagcagctacaatgaaagattaaaggaagctttatcgaggatggtaatgaatttcacaaatttgactatgcccggattggataaagtaccctttgacaagaactcaagcaaagaaaattctgtcactgagcaatacatgaatgctatggaagcaatatatgatgaactctatgatacatatattgtcgataagggaatcgtttttgaagaatatattaaaaagttaagtcaggctatcaaaaaaatattggaaaaaattaaactctgcgttgtcgtcacaggaaaagagaaggacgcttacacattatttgaggtgctgaatgacagaaattttcctgttgaagatttggagcttatcaaaaacctgttttataagtggtattgccatcacacggacgatgaatacagcacggatgaatatattgagcaggcagacaagctgtgggtggaaaaaatatttcctgataagggggcaaaggaacgctctaagcttatttcatatcttgcggcacagtattttaccgcagatagcagcttaaaatataatgacaacgaaaagtaccgtgaagcgattgaaaaaaaatatttaattaacaacccggattatggtggaaaggcattattaaaggatatttatatatatgagatgctcggcattatcttagatgagtttgattttgcatacaggaataaaacagatattgtcataaaagcagagagggaaaattctaaatccattacttacaaagcattaaatctgctaagtgcacttacaatgtacggtgttataccggcaattaccaatattattatcaaaaaatatttggacaagcacccatttgataacattgacagcgatgaactaatgacaaatttcaggttatatgtccgtgggataaaggaagatggtgaaaataacaatgatgagtatgcacagatacataatgtagcttatgagttctggcgctttgcacttcttgcaaaggattccaataacccaagaagcatagcaaaagattacattgaaagaaataatgttgttgaaacggattatattttaaaagtgagcagcagaagcattgatgcacttaatgcggaatttaaaaagtggattgatgaatggagatatggcaatgaaaagtcacagttaaaagtaaaagtattgtttataaacttgttttattctaataaggcaggaaacacgcttatttttaaaactggtacaaaattcggaagcaacaatatccagctggatcatctagagcctgacaggaaaaataattcggcactggaaaggtattttgaaccttcaaccaatattgcaagggaaaattataccgatggactcggcaatttcatgattatggacggcagcagcaataatgataagagtgcaatgccattgcaggatgcacttggaaaatcaggtctttatgatgaaatgagcgggcattggcttattcaggagatacatgaaatttttgatgatgctgaatgtgtaatcgacaggcatgttgacaatgatattgtatatagaataccgaatgaagagttttttaacagaagaaaaaagcgtttgataagttattttagcgcaattttaaacaaaaggctgaacgatgacagagtggaaataagagagcaatgataaattctgaaaggaggcatttaagatggcagaggtagatgaaaagcttgtaaaatcggttatgtttgaaattcttcacattgaacggcagaatatcagaagcaaggcaaagacggatataaagatggtggaggagctgggagcggttattcgcgaaaatgtgaaattgagtaaatagtggcgaggagaaggcacgaatgaaatttaaaacattaaaaatgaagaattttatgcgctacaagggtgttaatgaaattgaattcagctgtgacagtgaaaaaaatgtgacagtgatattgggggataatactgtaggcaagactactcttgcacaggcatttcgctggtgcctgtatggagctattttgaaggaacgtgataagaaagagagtgactatcagcttcttaacaatgatgtattggctggtcttgacgcaaataagactgcgactgtgtttgttgagataacggcgatggacagtgaaagcttatatacaatccacagagaagttcaatatatgagagtgtatcctaagctgttagctaaagaatcgtataaagtgctgaaggcgtttgttgcagatattaacagtcctgatataagacgtgagattgagccgggacctaaatatgccctcacgaatgaatttataaatgagctttttcctaagaatctttcgaattattttttgtttgacggcgagcgctggagtgattttgcgataaatggtgtgaaagaagacatcaaggaatccgtgcatattctcaccggattatcggcataccgcttggcaatgatgcatttaaaggatttgggagatgcatcggttattaagaaatttcggaaaaatatccaaggtaaaggcaatatatatgacgattatggaagagaacttacgagattagaacgagaaatcgaacaatgtaagcataatcttgaaagccttgatgcgacaatcagtcatttcagtaagaaaagcagggaagtcgagttatatcttgaagcaaacaaagacacggaggagcttcagaaagcttacaagcagtatcagagtatactgagagcgcagaacgaaggttacatagctaattttaagaattttgtaacagagtatgaccagactgcatacagagagtttgcaaggccgctcatagaagcttcgctcaagatggtgaagtcggttgcaggtgagcgccgtgatataccgcacatgaagcaggcaagtattgattttataataaaaagcgggcgttgtatatgcggtacgccgataacaaaaggctcgcatgagcttgaatgtctgttagaacagagaaattatcttccgccagccgatatgggttcacttcttggtgaattcgagaggacagccgggcgctggaacagggctgagaatgaacttacagaagatgcaaagcaggttgatgattgtgcgagaaattatgaagatacacttattcagcttcacaagattgagcagaaaatagatgagaatatcaactttgcggagaagagaagtgagcttagaagataccaggacgaagcagacggagcagcccgcaaaaagggtgagataagagctcttattgaatctaagcaaagtagaatccacagtatagagcttcagatgcatagtcaggagcttaagaatgccgagaatgagaaatggcgcaggagagttgagcttgctgaagctgtgtataacagaatcagcgcagatttttcaaaggaagagaaaaaaatcttcaatgaattgaatgaggaaatacaggctaattttcaaaaaatgttcaatgcaaaggataagaaaatacagcttaccgagaactatgaaatacagatgtgttataacaccggcgtgggttacagagaggagcgtaatctttcagaaggagagaaagtagccagaaattttgctttcattgtaacgataatggattacagccgcagaaagaagcttgaacgaaatgcgggcaagcatgaggagaacagattaaatgatgatgatacgcttcctattgtgcttgatggtccattttcaaaattaggtgatgagaatatttcgcttgtggcaggtgtgcttccgaaggtttctgagcaggtgattgtatttatgcttcgcaaggactgggtacatacaggtcttgacagatatgtcggtgcagagtatttgattgataagaagcctgaggaagcatatgcatcgataagaaaggtggagagagcatagtggcagattttgaatttttcaagaaagagttcgagtttgagggcaaacacgcacgcatggtgagtgagctgtggtcgaaagatgattatgagcatacatattttaagagggctattgatgtgtatgttttcgcagccataataggtatcaggcttgacagaaaagcaccgagagattattcacctgtcgagacaaggagtattctcccggatcagatgattaaagctaaagaagacttggactttataatgcagatgatgataatgttagaatcggactcagataagacggatgaggaaaaagtgcgggaagcgtttaagggcgcacagacaaaggaagaatatgacaggcttatgaaaagcttcaacgactatgtccgtggcggtgttgaggagctatacgagcgactcattgaacaaaagcccggctctgagggaagattctatgatgaaagaacggcaaagcttatggatttatatgagagatttgtgccgaggaaggagtgaagctgtaatatacatcaaaaaataacataaaaatagaaaaatttataaatggagtctttacttttgtaaatatatgggatataatagacttacgttatatcataccaagcgataaacggttacaacaataaggtcccgccgttggcggtgtacctcaaagctctaatcccatctaaagtgaatactttaggtgggattatctattttatgcagaaaggaatacttatggaggaaatgaagcatttaaacagaaaagcagaggtacctaagccgacagacctgaattacagaatagggcttgatataggtatagcatcggttggatgggctgtgctggagaacaacagccatggtgaaccgtttagaattattgatttgggagtgagaatttttgatgccccggataatacgggggaattgctttcgggtaagcgtcgtgaagcacgttctatgagaaggagaatcagaaggcgcggacacagattagagcgcatcaagaagctttttcaggcggaaggtcttatcaacatagaggagtttgaagcgcgttataagagggcaggactgcctgacgtgtataggttaagatatgaaggacttgacagaaggcttgccaatgatgagctggcacaggttttgctacatatcgcgaagcatagagggtttaagtcgacaagcaaggcggcagacaatgagaataatagtgatgatgcaaagaaaaaagaaaatggagcgataaaagaaagtataagtaataataaaaagcttatggaagaaaaggggtacagaaccattggagaaatgctgtatcttgatgaaaaatttaaaatagatagtaattggaatgcatgtggatatatcttttgtcctcgaaataaaatgggcgaatataaagtaattatacttagagatatgctggtggatgaggtacatgcactattcaatgctcaaagaaaatatggaaatacagtggcatctgacggggttgagaaagcgtttttggatataatgttgggtcaacgttcatttgaccttggtccggggtatcctagtaagtatgccatagatggatttgaatttggaaagtgcccttttgagggtaaaaatggaaagagatgtgcaccaaaagctgcatatacatctgaattgtttgttgtcctgcagaatataaatcatactagaattgtagatgatggtggaaatgtgagaaattttacggaagaggaaagaaataaaattattgaactggttcataaacaaaatgaagtaaaatattctgcagttagaaaagagattggtcttaaaaacaatgaaaaattttataatcttacatatagtaaaggaaagaaaaaagatagtgaacagagtacatttataaaaatgataaattatcatagcataactaaagcattaaaaagggaatgtactggtgaaatattaagtgatgaatgtgcagatttatatgatgaaatagcatataatcttgccagatacaagaatgatgatagtagactgaaagaattaagagatttggggatagaagaggaacaatgcaatgatttgcttaaattgtcatgtaacaaaccacagggcttatcgttggatgccatgaaaaagataattccttttctgcttgaagggaaagtatatagcgatgcatgtcaaatggctggttatggtgattttgcggcagatatttgtactggaaaatcaatattgctgaatgataatggaggagaaaagattagagaaacattaaatggaataactaatccggtagtaagacgtgctgtttcacagactattaaggttataaatgctattataaccgaatatggaagtccgcaggctgtcagtattgaattatcaagagagatggcaaaaaataaaaaagagcgtgacaaaatagataatgatatgaaaaaaagaagtgaggaaaatgataaattccttgatgaaataagagaatataagccaattcctacagggaaggatattgttaagtatcgtctttggaaggaacagaaggaaatatgcttgtatacaggtaaaaaaatttcggctgatgaattattttcaggagatggcggttatgatattgaccatattcttccatatagtaaaacctttgatgacagctatcgtaataaggttcttgtaagggctgaggcaaatagaattaaggggaacagaactccgtatgaatatttaatatcacacggtggagagaaagcttgggaagaatttactatcagagttgaacattgcataaaggattacaagaaaaaacagaagttattaaagaaaactatcacagatgaagatacaaatgaatttaaaaagcgtaacttgcaggatacacagtatgctacaacatttttatataatttaatacgaaaaaatctatatttaaagccatatcagaattctacgaataaaaaaacacagcaagtaatggcattaaatggttcaatcactaattttttaagtaaaggatggggactcgagaaaaaagatagaagaacacatcttcatcatgcacaagatgcggttgttattgcatgtacaacacaggggatgattaattctatttcggattattttaagtgtagggaattggaacttgaaagaattaatagacatgtaaacaaggagtcaaagaaggaatttgacgacaatattgttaccagggaacaatatgataagcaatttggtaagaaatttcctctgccatggcagcattttaaagaggaattggatattcgcatggcacgctatcatggagtagcaggtgcaatagattttgagacatctccattagaatatctcacgtcacatgcagatgtttgcaatcgtattaactatccagagtggatgtttgttaaaggaagacccggacgcaggggagtgcttgacggaatatttgtctcaagaatgcctaaccataaggtgagcggacaggcacatgaggagactatacgctcggggaagtattatgagaatggggggtgtggtgtcgaaaagggttatgttgtgtataagactgcgattacgaatctgaaattagataaaaatggggaaatacctaattattttaatcctgaaagtgatagtttattatataacgctctagtaaagcaattgaaggactatgaaaatgacccaaagaaagcttttgaaaaagcattttataaacctaaatcagatggaacaaatggacctattgtgaaaaagataaaagtgtttgaaaaaaagactataggtgtaccgttaaaaaaggtaaatgggtttgctaataatgacagcatgattagggttgatatttattgcgttaatggaagatattattttgttccggtatatgtttctgatgtcgtgagagatagattgccaaataaatgtgctgctaaaaataaaaattcatcagattgggaaactgttgatgataaaaattttctttttagcttatataaaaatgatttattatacataaaaaaagataaacttcctttaaaaagtatagataaatgtaaatatcctatacccaatagtagtgaaggagtatatatgtattttggtggggcagatgttagtggtttagcattttcatgtgaggcgcatgataaatctttttcttttagaagtagtatagtgacggttgataaactatataaatgccaggtcgatgtgcttggaaatatttcttttgtaaaaaaagagaaacgcatgacattcaattagtttttaggaggtgtatatgggatatcgtaacataaagattgacagttttataggtctgcatatcgaaaacgggcagctggttataggcgaaaagggcgttagctttccgcttgaagatattaattgtgttcttatagagaatcagtccgttacggtatcttcatacatgcttcaggagtttgcaaaaaatgagattgcattgtatgtgtgtgatgaaaaacatctcccgaacgcagttcttttgccattagtaaagcacagcaggcattttaagatgcttacaagacagattgaagttggaaagccgcttatcaagaggctatggcagcagattattgtgtgcaagataaaaaatcaggcattgtgtctgaaagaaatgggattagatggttatgataagctcctagcaatgacaaaagaggttcaatccggagataaaacccatgtagaagcaaaagcagcagcgtactattttcgtgctctgtacggtgatgattttacgagagataatgaatgtataataaattcggcaatgaattatgcatatgcgataataagaggtttgattgcaaggtcgattgtatgctatggtctggaaccttcacttggaatgtttcatcatagcgaactgaacagctttaatctggcagatgaccttattgaggtattcagaccgttggttgatttgtatgtggcgagtcattttgatatagctgaagttgattctggcctgactcctcagataaaaagagatttattcaatattattaattacgatatgtctgtgaaaggggataagcgcattataagcaactgtattgatatgattgtgtacagttatagcggagctatacaaggaaacaggacagaccttgagcttcctgaattaataccgttgcaggtgcatagctatgaataagtttatgagattgatggtattttttgatttgcctgttgtaaaagataaagacagaaaagcagcggctaaatttcgcagatttcttttgaaggatggatatgtcatggttcaatggtctgtgtattcgcggctttgcaatggtgccgactcaatacaaatgcataagcaacgcctgaaacaaaatttaccgcaaaaaggctctgtgcgctgccttgtcttgtcagaaaagcagtattcgtccattgatattcttcttggaacatcgacatttcatgatatggacgaatcaacggatttgataaatattttttgaaaaaagaataattttgcttacgaaaaagaaacttttgccatctttttttacatgaaaaatccccatgaacataataaacatggggatttttcgttccctattataccataccaagcgataactgggaacaacaactgcttgtccttgatttgactgcttcatcaaattataccataccaagcgataactgggaacaacaacttccttttgcgtcacgcctgccgcttttctattataccataccaagcgataactgggaacaacaacccaagattataattttagtattggtgatttattataccataccaagcgataactgggaacaacaacctatgtttctcgcaatcgcaagcgcattacattataccataccaagcgataactgggaacaacaaccagatgcctattgcctgttcttcttcggcgattataccataccaagcgataactgggaacaacaacattttatttctgtgataaatggaattaccgcacatagaccgtccatcattctgattttaaaatcagaatgatggacggtcggctaaagactatttttataaaataggttggatttactgaagaccattaagccagccggagaactgttcaagaacatttgtatataattcattgtcagaggcgttgtccaaatccttcattttagagaagccggtattatcatgggttcttccgggcatatcatctagggcaataaggtatttgaactgctcattaccgatacctatgaattgaataaatacattcatatcagaagatttcttgataatcttatcagctgcaggcttgtcggcgttttcgccatcggtgatgaaaagaataaatgttgggtctccgtcatcaactaaagccttcgttgtaaccgtctttgcaccaaatccgaggaagccgccttttttgtatgagctgccttcgataatagctttgagaacaggagcgtagcaagtgccgcccatagaataaccggaagtgttgacaatattctttacataattttcataattggtaagattaaggtcgggaagcttgcggtaatcgttctgaaaaagataaacatcaatagaaccattatcgtcaaatgttaatccgagtggtacaaggcggttaatagtcttttgaacggtaccattagaatataagttagccatagaaccgctgtaatccaagacaaccacaacctttgcacttgttgagcctaaatcaacaccgtttttttgcttaaatcaaccacacattttgataagcttacaacatgcttttcgaggtttaccttatcttttgagagactgatttttcccatcatctcatgtgcaagctcttcctcattttttcgtaactgtacatatatatttacttattataacatataaaaaagtgactttgtgcaaaaaaatttaaagtattctgacagatttttattttgtaagcattaaagcttattagagtcataaaattcatgcggaggatagctcaatcggttaccttgcatatgaaatttaattctaattattgactggatcaaaggagttgtatacaattatataaacgcaggcattttataataaacgagaaacgatgggtgaacttttctgtccggtgtctggtacgagcaggtatcggatagaggtgcgaagcatcggttttttatgaacaggaagcgagagtggattgtgaatatctgatataaaatactttgcgtcaggaatataagaaagttaaaatatcataaactatgatggaggagatagcagccatgaaaaagataaggttgacctacaatgcaccggtaacactcacttttgttttgttatgttttgttgcgacattgcttaactatataacgcagggagcaagcaatgttctgctgttcatgacttatcattcgtcacttacaaatccgctgacgtatctgagattctttacacatgtgcttggacatagcggatggatacattttatcgggaatgcatcgtatctgctgctgcttggacctatgcttgaggagaagcatggcggggacaatattttaaagattattattgttacagcacttgttacaggcattataaattacatatttttcccaagagttgccctctgcggtgcaagcggtgtagtattcgcatttatactgctcacatcgtttacgaacttcagggaaggtgaaattccgataagctttgtgcttgtcgcattgatttatttggggcagcaggtatatgatggtatctttttgaatgataatatatcaaatatggcacatattgcgggcggtatagttggctcaataaccggatataagttcaataagagaagatgaattctaaaaaaaatgtgaattatgagtaataacaatgtaaatttcttgaaaaacgaaaaattctgtattacaattaaaccatatgtataaaagaataaaagaaacgaggacgtggttatggatgctgtatcggtgacgttattatttctgggattgtttagcggtgttgcactttttctgtatggcatgagtgtgatgggagacggtcttaagaaagttgcgggaaataagcttgagacgcttttgtatgggctgacaagtactccgcttaagggaattttgttgggagcgggggttacagctattatacagtcatcctcggcaacatctgttatggtagtcggtttcgttaattccggtatgatgaaggttgttcagggaatcggtattataatgggtgctaatataggaacgagtattaccggatggattttatgtctgtctgatattcagggagcagagggagttgcggcattattgtcttcgtcaagtatcgctgcgattgttgcgattgtgggtcttttagtcagaaatctttctaagaaagagactcacaaggcagttggtgatattttgtttggatttacaattcttatgattggtatgtctacgatgaaggaagctatggctccgcttcagaataattcatttttcatgggaatgcttacgaagttttccaatccttttcttggaatccttctgggtattgttattactgctgttttacagagcgcatcggcttccgtaggtatcttgcagtcggttgccatgtcaggatatcttcctttttctgcggcacttcctatagttatgggtattggtgtaggtgcagcgtgtccggttcttatgagtggtatgagctctaataagaatggaaagagaacggcattggtatatctttttaatgatttagccggtatgcttatatgcgggacaatcttttatatagtgcaggccattgtgacacatggtggccagtttgcatttatggatgtcgagatgaagtcgatatctatagcactcttgaatacgatttacagaacgcttactattatcattctcgcaccgtttatcaagcagattaataagctgatgttctggataattagggatacaccggatgatgttgaggatcaggcggatttcgatttgcttgaagaacgtttcttaagaaatcctgagcttgctctctcacaggtcggaactgtcatgaatggaatggcaagaaaggcgcagaagaatgtaatgagggcatttgacctcatggataattattctgtcgagaaatacaatctgattcaggagaaggaaaatgtaatagataagtatgaagataagctcgatacatatatgatgaagattacagcgatagggcttaataagaatcagactgtacagaattcaaaatatctgcatacagtcagcgattttgagcgaattgccgaccacgcctgcggaatatcaagggcggcgaaggagattgtagagaaaaagattaaattttcagatgatgcaaagagagagcttgagatactctacagtgcagtcaaggaagaacttgatatgactgtaaaatctttcactgaggatgatatcgatttggcacggcaggttgaaccacttagaataactgtccgcatgctgtgtgcggagcttaagagaaatcatattgtgagactccagagtggtaattgcgatgcgataaatggctttgtttttaatgacctgttaacaaatttagagcgtattgttgcccattgttctaatatagcggtagctatgatggaatttgagtcggatgattttaacactcatcagtatcttaaggatatgagaaactcggaaggctcaggcatagctaaggatgtaaattattactccgataaatattccgttgagaagtctggacaaggcaaataattgtggtgtaatataatcactgtgcagaaatgtacggtgatttttttataaaaacaccccatccacaagcatttcctgtgagatggggtgtcttctgcaatacttatttaatttttgttgcgattaagacgtgtgaactcacgggcgattagcagaatggattcattatattcgagtggaagagttgccatcattgaaacaacatccttttgcatatcgttctcggtgtcgtttccaaatacaatagtatccagggaaacttgaagaccttttgataacttgactagggtatccacggacatagatttgcgtccgttctcgatttctgataagaatgtgacagatattccgattttgtctgcgagctcctgttgtgtcatgtttatagagcgtcttagctggtaaatcttattgcctatgatacggttagtatcatgggatgtacaattcatataaaacctcctatgtattatttattgttaaagtaaaatttaactataaatacaaaataccaaaaaatggaaaatattaaaattaacacaagtttataatttgttcatttgaagttgaatcgtgtttgctgtaggagtaatattttattatcaaggagagagaatatgaaaatagaagaaaaagacatattgggttttaatttttttcaatatggaagtccttatattggtgagtgtggcggaatgcatttcaggattgcgagaaatccgcttgaaaatgttgtattcaatcatgacccgcacaaaaatgacaatgctatgtttgacgtgactatttggagaggaccatttaattatgatacgacaaggcagaagaaaaccactgtgcagtttccgtttactgaggatggcagagtacagtcgatgaagtggcttaatgaaaagtataaagagcgtgtcgattattgggcggaaggaataccgctttttccaagatacagcagcgaccctgacagtgaggacgaggttgaggtcgatgaaaatttgacagatacagcgtcagagtgatggatggagcggtgtcaaagtctgtaattattcaggaaatcgagagcagcgttagaaagaggaaggttagaattaacgcaataactgacctctcttttttttatttcgaggttaggcggagtaacctccataagtgcgccggattctaattcggatttaacaaactcgcgtatgacacatccgattccgagtcctgttttggcaaattcgatgagcagatccatgcttccgatttccataagagttgtctgtgagagaatgctgtcgttgagatatgagtcaacataggtacgcgttacattatctcttgttagcagcataagattggctccgtggaacagattgctcatagtagtgttctctctgagaagcagattttttatgtagccgggtgatgcgacaaaggtatcctgaatggagcctgcgctgtataatttcagacctttttggtagtcgggagttgctataaggcctatgtcgatatcgcggttgtcaataagtgctttggtgtgtattgatgactgacagttgattgagatacttatatgaggattctttcgtacatatttttgaagtttgggcagcagaatatatttacatagtgtgttgcttgcaccgaagcgtattctgccgacaccgagctcttttcttgagtttaggagctgttcgccgatattaatctcattgatggcattaaagacatgtgaatacagcagttcgccatcgtctgtcagctggacaccttttgagcttctgaaaaaaagggctgtgccgagttcgttttcaagctgcttgatggctttgctgattgcaggctgacttataaaaagtctttttgaggcagccgacaggcttttagtctgtgtaacggcgagaaaaatattgtagagattgagagttacatgattgggtgaacttttttcgttattgttactcataaaacgattcctttcataagagcgtaggtttatatatcaatgtataactataagttatagcaagtataaataatatgtattattagaatagcaaaaaatgtgatattattcaagcagtaaccttgataatccggtacgaaatagccggatacaggaaaagaaatggggaattattatgggtatgacgatgacacagaagattcttgcagcacatgcaggtcttccttatgttgaggcaggacagcttattgaggcggatcttgaccttgttcttggaaatgatatcacatctccggtagcaatccatgagatggataagatgaagaaaagcggagtctttgataaggataagatagctcttgttcctgaccactttgtgccgaataaggatatcaagtcggcagagcattgtaagtgcgtcagagagtttgcaaagaaaaatgagattaccaattattttgaagtcggacagatgggaattgagcatgcacttcttcctgagaaaggtcttactgttgcaggcgatgttgtaatcggagctgattcacatacctgtacatacggtgcgctcggcgcattttccacaggtgtaggttcgactgatatggcagcaggaatggcaacgggcaaggcatggtttaaggttccttccgctatcaaattcgttctgacaggtaagccttctaagtgggtgagcggcaaggatgtaattttacatattataggaatgattggtgttgacggagctctttataagtccatggagttcgtcggtgacggaataaagaacctttcgatggacgatagatttactattgccaacatggctatagaggcaggaggcaagaatggaatattccctgtagatgatattgcggaagcatatatgagagagcattcaacaaagaaatatacaatatatgaagctgacgaggatgcggtgtatgatgagacatatacgattgacctcgctgaactcaagcctacagtcgcatttccgcatcttcctgagaacacacatacagtagatgaggcaggagaagtgaagattgaccaggttgtaatcggttcatgcactaacggacgattggatgacctgcgtattgcagcggaagttcttgaaggaagaaaagtggcgcagggacttcgtgttataataatacctgctactcaggcaatctatcttcaggcaatggaggaagggcttttaaagacatttatagaggcgggagctgttgtcagcacacctacatgtggtccgtgtcttggaggctatatgggtattcttgctgaaggagagcgctgcgtatcgacaactaaccgtaattttgtcggacgtatgggacatgtcaggtcagaggtatatcttgcaagtccggcagttgcagcagcaagtgcagtgacaggaaagataagccagccgtcagagcttggattgtagaaactgataatagaaatgaggattagtatatgaaagcatcaggaaaagtatttaaatttggagataatgttgatacagatgtaattatacctgcaagatacctgaattcatcggaccctgctgagttggcagcacattgcatggaggatatagacaaagattttgtaaataaggtgcataagggcgatattattgtcgctgacaagaattttggctgtggctcatcaagagagcatgctcctatagcaatcaaggcggctggagtaagctgtgttattgcggagacatttgcaagaattttttaccgcaacgctataaatataggtctgcctatcattgagtgcgctgaagcaagccgtgatattgaggatggcgaccaggttgatattgattttgacagcggtattatcacaaatgtaactaaaggaaagcagtacaagggccaggcatttccggagttcatgcagaagcttatagcagcaggcggacttataaattacattaacaataagtagaaacatatttacggaaatgttttgacagctttatgctattgtagagcttggcatattcgattgcagatatgttttcaatataattttccggatatgcggtagtacagcctttgtcgcgaagcattgccacagccttgttgtaggctatggcagcttcgttttctgagctgtatcttcctattatatagtttccattgatatggatgcgggaacggtagcttatgcggccgttcttttttattgcttcgacaccgtagtagcggttgattatgcggatgttgtgatagcggtagtcatggtcgtctccgtttataaattcatagtccctgttctttacagcatggcttcgtatgccatagcgtgagagaatattaatctgcattccatagtccgcgacaaaaagatagccctgtcttttcattatcgaatggttggaaaagtagaagaggtcatcaacatcaaatttaagtatttcattctcggaaatgtaatagttaaagtgtgtttttaccatatatataggtgtctttatgtatatgccattgtcgcggaaatttaacaggcttatatatttgtcaaatgagagaattt

SEQ ID NO: 3867 - DNA, 23576 bp, synthetic construct
  source 1..23576: mol_type = other DNA
  misc_feature 1..23576: note = Synthetic
gcttgtgtactcactcaatcgtgagctgtgtgtgtattctggcttgcaggagcttccggagagctctgtgtcagcggatgtgacagccattatcaatatgtattcgagagataagggcagagattatgacccggaggagaagaagctgagtccgtttgcggaactcggacttctgaagcgggacaacaggtatgtgagaaagcagacacctgtatcggatgatgcacttgagtatgcggttctgtatctgttaaggagatactttgaacaagagaagatggacagcgtgagcatagataagctcttgacgggaagcggacttatggggcgtatatttaatctcaaccgtgtggagctcaatttttatcttgataagctcgcagcagatgaatatatcactgttaacaggactgcgggacttgatatggtgtattctcttagaaatatgagcgcgcaggatgtaataagtgcatattataagaacaggcagacacttttaaaagatgaggacaggtaaggacaagatatgcttaaggatatggttaagatagataagagatttgaaaattcaattaatctctaccttgatatagataacaggaataagatagacagctatgtgtatacgcgctcatcgcagaacataatggactattatcttgacaatatagataacgacaggaatcatgcgacaatgctcatcggaccttacggcaagggcaagtcacacatgcttctggttcttcttgataaggtgagaagtatggaacatccatacctcccgataataatatccggcacgggggatgacctcaatcaggcatttcttataggacttaccgacgcgcttaagagggcacggcttgaaaagcttgcacctgagagctattacagcgaagccgcaaggcgtatcgggcagtggaaatgtgattttcccgatgcgtatgacagattcaaggcagaacttcataagcttggcataggcagcgtcgatgattttaccagggagcttggcaggcagtcgaagaaagcacttggcatgtttgagcagatataccctgttataacaagcggcagtgaattcaagccgtttctgatggtcgagacggtgagaatatatgagcagataagggatgtgcttgcgagggagtatggatattcgggtctttatattatttttgatgagttcagcaagtacgtcgaggggcatgagaaggacacattcgctaaggatatgaaggtgctgcaagatatgtgtgagctggcgggaagaagtggtgacggaagaatatatctcacttgcgttgcacacaagagcatcaaggagtacgatgctaagctctccggcgagatgaagaacgcattcagaggtgtagaggcaaggcttgatgaggtgagatttgttgtttcctcacagaacaattacgagctcataggaaatgtaatcaggaaggacaataatgctttaaaaagaatccgtagaattgagcggtattaccaaaacgctataaagtcctatagcttttcatgtttttcgggactttttgatgaggacgatttcagaaagtatgttgttgagggatgttttcctcttatgcctctcacggcatacatgcttttacatataagtgagaaggttgcacagaatgagagaagcatattcacgtatctgtcgcacgacgagaagggaagtctgtgcaggatagtggaggagtgtacccttgatgaggcagattacggtgtcacggcggatacaatatatgattattttaaaagccttttcagggctgacggcacggatgcactaatacacaacgaatggctcaaggcagagtatgcacttgaacgtgcaggggatgaggatgaaaagaaagtaatcaaggttatagcacttataggcataatagacagacctgatgaggtatcggcggacatggagcatatcgcatgctccctcaatattacctcagaggaatgcagtgcgataatggacagacttgtggagcgcaaggcggttatttaccgcaggagaaagcatgcttactgcttctataacaatgtgggggttgacattcaggcggaaattgctggcagagcggcgaagcttccggcagatgcggatattctcggaacattgaagagcatatcagaacttgattatgttcttccgaagaaatacaatcaggatttttcgatgacaaggtactttgagtatgtgttcatgacacctgagcagataagcaggctccctaagccgtctgtgctttttgaacagcgtttctccgacggaaaaattgttgcggttgtgtctgaacagcctgtagagtacgatgagcagctttttgaaagacttaacgataagagaatagtggtgcttgtgccgcagatggtattcaatcagacggacaatataagaaaatatatagcggcaagggagcttatcaaggataaggcgtttatcgatgagaacgcagtgttagagcaggagcttgtcaattattgtgatgatgcagcttacgaggtgaacagatacttagaggaggcatttgacacagaaagcggaatgtgccgggtatatcatgccaatgagaaatatgccggaggtttcagacattcaatgacatttaacatgtttttgagcagcataatgatggattattatgacaatgcgcctattgtcaacaacgagcttataaacagacagaacatatctgcacagaacaaaaaggcaagaaataagatagtggatatgattttgtccaatgctgactgctcggaatttctgaagggaacatcgcctgaatcaaccatatatagggctgtccttgttaatacaggagtatgcggaggcggaaatattgagtccggctgtgagcgtgtcattatggaaatcgaccgcttcattgcacaatgtgatgacaacagatgctcattcaaggttctgtatgacagaattatgggtatgggatacggaacaagaaagggaataatcccaatatatatatcactatgtctttcaagactgcatgataagccggtgctgagttttaaggagaaggaagttgaacttgactcgggcacacttggcaatgtaaatgacgccccggggaactattatctgtatgtggagcacaaaagcatagagaagcagaattacattaatgaattaaaaaagctctttggtgcaggcaccgggcaggatgatgacagaggtgttcttaccggaatactcagatggttcagggctctgccgcaggcggcatccaatataggaagggatgcacgatgtgatgagaacatggcggctaagcttaagaagctgtgcagtatgctgagacgtcaggattacaaccctcatgatttcctttttaccgaacttcctgcaggggtaggggcagacaagggagattatgtatcggcgatagatgaactcgtcaggttaaaacagtttctcgaccactatctcgagaatgtttcatccgaggcggcttcaattataaggcgcagatgtggtgcggacgagcaggacagcttgagagcggttcttgacggttataatgcaagatatgcaggacagcgtaaggacattattttaaatcgacgcacacagtcaatcgtaaggtacatttccggactgtctacattcgatgacgcagagattgtgtcgggattatctaagctcgtcacagatatatatatagatgactggcgcgacggaatgcttgagaactttaaaagaggctggaatgagttctgtgatgaaatcgagagtgaacattccgccggaagcggcaccgggatagaaaagctgctcctggaaggtcagaatcagaacctgcttgatggcagcgacacagacgacaacagcacaagctactttttaaagaatgcaataagggaagcaatagatgagttcggtgacagccttgataccaaggagaaggtcgccgtgcttgcgagagtgctcgccgagcttgtcgccggagaaaatacatagaatcggggagatacagatgagtgtaatataccttgacaatgcagcgaccacctatccaaaaccggatggtgtctatgaacagatggataaagtcaaccgcagtctggcgtttaacgccggacgtggttcttatgctctggcgcagcagtcggcagttatcattgacaatctcagaagagaattattgcgcattgcgaatgcgatgaatgtagcagaggtcgtactgtcggcttctgctacatttgcattgaatcagataatcggcggactgggtatgagggcggagcagtatgtgtatatatcgccttatgagcacaatgccgttgtgcggactctttacaatcaacagatattccgggacggcaaaaacagctcacacataatcgtcatgccggttctaagcaatggaagcatcgacgaggagagacttttatatgagttcagtgtgcatgttccttcgttcgtgtttatgagccatgtgagcaatgtgacagggtacatactgtcggtggagaaaattgctgccgaggcaaagaaatatggtgccacaatagttgttgacggctcacaggcattgggacttgtgccgttcgatatgtcgtcatccgccgttgacttttatgtctttgcgggacacaagacaccttacggtccgttcggaatcggcggattttacatgaaaaacggcatgcggctcgacaccttcattgccggcggcacgggaagcgattcactcaatgtgcgtatgcccgaggcaggtgcgtcgcgctacgaacccgcaagcccgaatgtcgtggcggcggcagggcttcttgcggcagtaaaggctttaactttggaggagataagacaccggcttgaatatgaaatgaagctcacggattacatcgcctgcagcatgaaaaagatacggggaattaagctgtaccttccgccaaaggaggcacatgtcggaatcgtagccttcaatctgacaggttataaggcatccgacatcggaatgattcttgacgaggattacaacatcgcggttcgcacaggctaccactgtgctccacttatacatgaatatcttgatgacagagaatacctcggcgttgtcagggcgagcatcagcatgtttacaagctttgatgatgcggatgcactggtcagggcactgggggagatttaggaggatggaagatgatagcaaaagaagcatcaattaaggatgtagttgagactgaaccacatcgtcttgaggttccgttttttcagagaaagtatgtatggaacaaaggtaattgggatgaaatgttgcaggcagttgaaaattttgatgatgaaagacctttttggggttctattattttaaaaaaatcggagaaagttaaaggtaggaagtatggtaaggcatatatagttgatggacagcagaggcttactacaatagctatattgacaaaggcaatatatgatgcatcaagtaagatggaaagagaacaaagatttaggagtatcatagattgcgatttactttttaaaccttatgcttcggcaaaaccggatgaatatgagattataattgaacattcaagagcggatagggcagagtttgaatatttgattaaaacgggaatttacgatgataaggatgttgagattgatgacacaaaggttgatgtagaaaaacagacagggagtgcggttctcaggtgttataaatattacagacggattatggaaagcaggtcacaaaaggaacgtgagcagcttatgaataatttgtacaatgacgagaaagtgtttgttttaatacagcttgatgaggatgacattaatgaacaaataatatttgattctattaatagggcaggacaaaaactcactacatctgacataataaaaaataatttgtttaaaaaacttatggctgaaactgagaatgaaaaagaagtagagacgcaatgtgatatatattgggacaatattttctgggaagatgaattttggtataacagccgacggtttggcaatacggaaagatcgcatatagatttccttttatattgtgtcgcttgtaatttatggccaaaagagagccttcttgagaaaggaattaattgttctcttgaaaaagtctatgaaaataatacaaaaggttattcttatgatgaaatgttcaatgttgtaaagaagattgcggagtttgcaattatgtataaaaaatacatatttgacttttccgagaggatagagacagaaagtttttgcaaaaatgatagattaaatattctattgcttataatggataaattccaaatacagatgttttatccggtggttttaaaattattgtcacaatgtattacatacataaatcttgctgaaaagaaagtgatatgtaatttgaatgatgaaatatgtattgaggaagcacataaactagaaacttatatagttagacataagattgttggagccagtacatcgcagtattcgaagaaatgtcttgaagttatcagaaaagggacatcgattttgtacgcagaaggaaaaataggcagaacgcaagtaattcaggatgaaaataataggataagagaggaattggaacatcctaaaacagatgtggctaagatgattcttttttgcttggaacttgaaaaatgggatgaaaaagatgatatagattctttttcgtataattttcaacttgaacatataatgccgcgacattgggaaacttattggccgcttacaaaaggaagttcatcgccggatgagaggaatatggcaataaacagtataggaaatatgctgttactaagccagaaactcaatgcacaaattagaaatcgtgaatttaaggtgaaagtggaaggcgagatgagcggaaagaaaaagagggagggatataaaaacaaaacacagttaaaaacaactaaggaaattatagatgaatatgatatgggaatgacagagtggacggaaacgcatatcaaggaaagatgtaaaaagatatatgataaagttatagaacactggaatgtggatattgtgtaggaggtaacgccgtgcagaaaacagacgaaagacagataaaaaccgccatgcttgaaatactccatcttgagcggaaaaatcttagaagcaaggcaatgacggatcagaagatggtggaggaaatcaagcacataatagtggagacatcgagaatcggcatgtgattgggaggatgggaaggtacaaatgaaatttaagacacttaaaatgaaaaattttatgcgttataagggtgtgaatgaggtaaatttcagttgcgacggcgagcataatgtcacggttatacttggcgacaacacggtgggaaagacaacaatagcacaggcgtttcgctggtgcctgtacggagcaatcatggttgagcgtggaaagaaggagagcgactacgagcttttgaacaacgatgttttggcaaagctcgatgcgaacgggagagctacggtgtttgtcgagattagtgcacttgacaatgaaaagctttatacaattcatcgtgaggcggagtacatgagagtgtatccgaagtttatcacacgcgaatcgtttaaaactttaaaaatgtatgttgcggatgtggacagcccggattcaaaaacggaggtcgaggcgggcgtaaattataacaaaataaatgagcttataaatgaactttttccgaaaaatctttcgcattatttcctgtttgacggcgagagatggagtgatttttcggtaaacggagttcgcgaaaacatcaaggaatcagtgcatattctcacgggcttatcctcgtataaggcagcaatgttccaccttaaagatatgggagcaaattccgttatcaaaaagcttaaaagcaatattcagggcaagggaaatatgtatgatgattttcagcaggagttgacaaagacggagcgtgatatagagaaataccgtagacagatagaaagcattgaggcggatataaggcgttacaacaaaaaaagcgaagagattgaaagctatcttgaggaaaacaagaacacggaacagcttcaggcggcatacaggcagtcgcaaagaacattgcgggctcagggagagagatatattgcagattttaggacatttgctacggagtataattcgaaggtttacagggtgtttgctgttccgcttattgaagcgtgtcttaaaatggtcaaatctgttaacggtgagagacgcgacatacctcacatgagacaggcgagcattgattacataatacgaagcggacgctgtatctgtggaacgcccgtgactgacggttcccatgcacttgaatgtctgcttgaacagagaaattatcttccgcctgctgatatgggctcgctcctcggagagtttgaaaagaccgctaaccgctggtgtcgatacgagaatgaaattaagcagaatgccctcagggtggacgatagcgcaagagaatatgatgagacatgcattcagcttcaaaagatggaaaatcaaatgagtgagaatgttgattttgcacaaaggagagcggagcttaagcattacagggatgaagagagccgggcccttgagagaaagggcgaagtaaagggaatcatagtttcactcaaggataagattggcagcattgaacttcagatgagaaatcaggaggcaaggaatgctgaaaacgaaaagtggagacagaggcttgctcttgcagaggcagtatacgaaaatttgagtgctgatttttccgagagggagaaaaaaatcttttgtgagctcaatcaggagattcaggcaaatttttctaagatgttcaatgcaaaggataagagaattcaactgtctgaggactatgaaatacagatgtgttataagaccgatgtcgcatacaaggaggagaaaaatctgtccgagggcgagaaggttgcgagaaattttgcctttatcgtcaccataatggactacagccgcaggaaaaggcttgagagcattgagaatgcgggagacgatgagtctgccaatgacactctgcctatcgtgcttgacggacctttttcaaagcttggcgaggaaaatatttcacttgtggcaaatgtgctccctgaggtttcggagcaggttatagtgttcatgctacgaaaggactgggcgtacacggggcttgataaatatgtaggagccgagtattcgattgataaaagacctgatgagagctttgcatcaatcagaaaggtggagagggattaatggcggattttgagttttttaaaaagcagtttgagttcaagggaaaacattcaaggatggtaaatgagctctgtgttgcaaatgattatgagcacacgttttttaagagagttatagatgtctatatctttgcggctgtaataggaatcagacttgacagaaaggcgccagaggattattcaccggtggaaaccaagagtatatttcccgagcagatgattaacgccaaagaagatttggattttataatgcagatgatgataatgcttgattctgcttcgggaacatcggatgaggaaagagtgcgggaggcgtttagaggtgcgcagagtaagggggagtatgaccgcctttcggatagctttaatgactatgtacgcggtggtgtggaggaactttatgaaaggctgatcttgcgcacgcccgattccgaggacggattttatgacaagcggaccgcaaatctcatggcactctatgaaagatttgagccaaagaattaacggtaaaagattggcaaaaaatagaaaatatgctttacttttttagatgcgtgtaatataataaaactacgttatattgtaccaagcgatatacggttacaacaataaggtcccgctttcagcggtgtacctcaaagctctaatcccatctaaagtgaatactttaggtgggattatctattttaaaatgaaattattattaaggcgaagaaaataataacatccaatccctgaaaatatgacggcagtgtatgcggagaaagtaattgattgcctggtaaaaaggttttggaggaaaggactatttatggaggaaatgttaaacaaaaaagcagaggtgacgaagccgacggatttaaactacagaatcggtttggacattggtattgcgtcggttggatgggctgtgcttgagaatgacagctatgacgaaccgttcagaattattgacttgggagtgagagtttttgacactgccgagcagcctaagacaggagcgtctcttgcgttgccacggcgtgaggcgcgttcggcaagaaggagaataagaaggcgcagggacagagttttgcgcatcaagaagctttttgatgcagaagggcttataaatattgatgagtttgaggcgcgttatgaaaaggcagggcttcctgatgtctaccgcctcagatacgagggacttgacagaaggctctccaatgatgagctggcacaggtattgctgcatatagcgaagcacagagggtataagtctaccagcaaagcggctgacggggcagattccgacacgggcgaggttaagaaaagtgtaagtgccaacaagtcactcatgcaggaaaagggctacagaaccgtgggagaaatgatttatcttgatgaaaaattccgcaccgactgttcgtggagcgacaacggatacttgcttactccacgcaacaaggcaggtgactataagcatacggtgttgagagatatgctcgctgacgaggttgaacagcttttcaagtctcagagagcgcttggaaacagcagtgcaacagaggaacttgagaaagcatatattaatattatgctgagtcagcgttcatttgacatgggaccggccgctccgagcccttatgctatggaaggatttgaggacagagtgggcttgtgcacattcgaggggaaaaatggtgaaaagcgtgcggcaaaggctgcatatacctcggaattatttgtggcattggaaaagataaatcataccaagattgtcggtgccgacggaagtacaagatttttaactgatgatgaacgacgcagtattgtctcactgatacataaacagcagaaggcaaaatatacagcggtgcgcaaggctatagggcttgcggaggacaagaaattttataatctcaactatagtcctaaagcgggaaataaaaagtcgccggaggaagcggagtttgtcaaactggaaaattaccataaaatctgcaaggcgctcaatgacgatatgacgtcagaacaactgcctcctgaaaaagcaaagcagtatgacgatattgcgacggttttaacgctctataaaaacgatgacagcaggataaaaagatttgctgagatgggcattgataaggaatgctatggggctttacttgagttgtcaccgagtaaatttcagaatctttcactcaaagcgatgaaaaatattataccgtttttgcttgaaggaaagacctatgacaaggcttgtgaattggcgggatatgattttaaggctgaaaatagcgcagaaaagactgttttgctaaagggaaagaatataacggataccgtgaatgatattaccaatccggttgttcgacgcgcagtttcccagaccatcaaggttataaatgcgattatactcgaatatggcagtccgcaggcggtcaatattgagcttgcaagagagatgtcaaaagattttgacgaaagacgaaagctcaagaccgaaatggagtcgcgggaacatgaaaatgacaaggtgttacagcgcataagggagtacaagttaaatcctacggcgcaggatatagtgaaatttcgcctctgggaggagcagggaggagtatgcctctattcgggagataagattgatataaatgatcttttttcaaattcgggaggatatgatgttgaccatattctgccgtacagcattacattcgatgactcgtaccgcaataaggttcttgtaaaagcttctgagaacaggcagaagggaaacagaacgccgtatgaatattttatgtcacgaaatgacgagaacgcatggaatgaatatgtggtaagagtggaaaatgaaaatacagttaaagattttaaaaagcgcttaaaattgctcaaaaagcagattactgacgaggagaaggcagagtttaaggaacgaaatctcaccgacacaaagtatattacaagagtgatatacaatctgatacgacagaaccttgttttaaagccgtatctcaatctgggtaaagagcgaaagaaacaggtaatggctgtgaatggttcaataactcattatctcagcaagagatggggacttgagagcaaggacagacgcacagacacacaccacgcgcaggatgcggttgttatagcttgtgcgacggatggaatgattaacagaatatcacgttattccaagggaagggagcttcgctattcaagaggattcaggtttgttgatgaggagacaggagagattctgaatcgcgataatttttcgcgggaggagtgggatgagaaatacggcgtaaaagtgccgatgccgtgggagcatttcagagacgagctggacatccgtatgtcaaggtatcatggaatcggagagagcatgattgacagtatgacgccgagggagtttatcatgtcacatcgggatgtggacagatggcttaactatcctgaatggatgtttgtaaagggcagaccgggacacaggggtgtacttgacggaatttttgtttcaaggatgcctaatcataaggtcagcggacaggcacatgaggagacaattcgttcggctaagtattatgagaacggaggatgtggaatagaaaaggggtatgttgtttataaaaagtctattcaggacataaagcttgataaaaatgatgaaattgctgagtttttcaatcctgacagtgacaggctgctttacaatgccatggtaaacagacttaaaaagtataataacaattctaaggaagcatttgcagagccgttttacaagccgaaggcagatggcactcagggaccgcttgtcaagaagattaaggtatttgaaaagcagacatcgggagttattgtgagaaacggacatggcattgcggcaaatggcgagatggtgcgaattgatgtgttctgtgaggaaagcaaaggcaaaaagaaatactattttgttcctatctataccgcagatgttgtgaagaagaaactgcctaaccgtgcggcaacggctgcaaaaatgccgtctgagtggcgcgagatggatgagaagaacttcattttcagtctctattcgagggatttgatttatattgagagtgagaagggaattgcgcttcataatatagacggaaatgtttattataaaaacagtctgttttcatattatacgggagcaaatattaacaaagcttcgataaatggggtactcaatgataatagtgctttttttgatagtcttggcattcaaggattgaaaagtttagaaaaatgtcaggtagatgtcttaggaaatatttcatttgttcacaaagaaaagcgtatgatatttaactgatacaaaaattgggaggcatatatgggatttcgtaacataaaaattgacagttcgatagggctgcatataaaaaatgagcagttggtgataggtgacaagggcgtaacttttccgcttgaggatgtcaactgtatccttatagagaatcaggctgttacaatatccgcatatatgcttcaggagtttgcaaagcagggaattgcgttgtatgtgtgcgacgagaagcatcttcccaatgctgtccttttgccgatagtcagacatagcaggcattttaaaatgttgactaaacagatagaagcgggaaagccgttaatcaagaggttatggcagcagattattgtgtttaagattaaaaatcaggcactatgtctcaaagagatgggacttgacggttacgaaaagcttcttgcaatgacaaaggaagtgcagtcgggtgataagacacatgttgaagccaaggcggcagcgtattatttcagaattttatacggagaagagttcacgagggcggatgagtgcatagtcaattcggcaatgaattatgcttatgccataatacgaggattgatagcaaggtcgattgtgtgttatggcttagagccttcgctggggatgtttcaccacagcgaactaaacagttataatctggcggatgatatgatagaagtattcagaccgcttgttgatttgtatgtggcaagtcattttgatatttccgaggttgatgcagatttgacaccgcagataaaaagagacttatttaacataattaattatgatatgtcggtgaaaggagagaagcgcattatcagcaattgtattgataagcttgtttatagctacagtggggcgttacagggaaacagaactgacttggaactgcctgaattaataccattgcaggtgcacagctatgaataaatttatgagattattggtattttttgacttgcctgttgtaaaggacagggataaaaaagtggctgctaaattccgcagatttcttgtaaaagagggctatgtcatggttcagtggtctgtatattcaagactctgtaatggcactgattcaatcgaaacacataaacagcgactgaaacaaaatcttccgcataaaggctctgtaaggtgtcttgtcctgacagaaaaacagtattcatcaatagatattcttctcggaacagcaacatttaatgacgccgacgaatcaacggacttgataaatattttttgaaaaaaagagaatttaatggtaaaataaggtgtttttagcgtaaaaatctgcatgaaaaatccccgtgaacatatataaacacggggatttttcgttcccgattatatcataccaagcgataaccgggaacaacaactctgcttgtttcaaaagctggtaggtgtctattatatcataccaagcgataaccgggaacaacaacatgccccggtaccacgcgaggcttattatattatatcataccaagcgataaccgggaacaacaactgcgccgggatatctcataagtgccttcatattatatcataccaagcgataaccgggaacaacaacagaatacctttcataatgtactggtcatagattatatcataccaagcgataaccgggaacaacaactttgcagcagtgacaagcgcattcacaattattatatcataccaagcgataaccgggaacaacaacgtaggtatctgaatgttgccggaatacgatattatatcataccaagcgataaccgggaacaacaactgaaatgtagtttcttgtcaatcctaaatattatatcataccaagcgataaccgggaacaacaacacttgttgaaaagaaaatgctaagtgctcgattatatcataccaagcgataaccgggaacaacaacaagtgagaaatggctgttgatgctatcattatatcataccaagcgataaccgggaacaacaaccggcattttgtccaagaactgccgagctatattatatcataccaagcgataaccgggaacaacaacccaaagtcacccaagaggaagtaagctccaattatatcataccaagcgataaccgggaacaacaacagcgggcatacgcttctgcaaaaatgatttattatatcataccaagcgataaccgggaacaacaactgggcgtgataaagactttattactgtcttattatatcataccaagcgataaccgggaacaacaaccataagcaccgattctttcaacaccgccgtattatatcataccaagcgataaccgggaacaacaacggtctgacttggtaaaaatccgcacacagtattatatcataccaagcgataaccgggaacaacaacattaaattgtttttgatagattaagcccagattatatcataccaagcgataaccgggaacaacaactttagccttattagtagaataagtttgtaaattatatcataccaagcgataaccgggaacaacaacaattacatttcccagattgacatttgctaaattatatcataccaagcgataaccgggaacaacaaccaacagcactcatcataacgcggagcgaggattatatcataccaagcgataaccgggaacaacaacttatcccacatcatatacgaaccattattgattatatcataccaagcgataaccgggaacaacaacttggagcataaccaaaattaagcaatgtaaattatatcataccaagcgataaccgggaacaacaaccaagcttgccaagtgcggcgaggagcggtgattatatcataccaagcgataaccgggaacaacaacttacgcgaggaataagcatgagcgcgccttattatatcataccaagcgataaccgggaacaacaaccaagtgagataattgtgcagctccgttctattatatcataccaagcgataaccgggaacaacaacaaatggactgcgcaataacgaattagtgcgattatatcataccaagcgataaccgggaacaacaactctgcttatatgcgctgaactcgtccagcaattatatcataccaagcgataaccgggaacaacaacgaaccgtctcgctttcactttcagcaatacattatatcataccaagcgataaccgggaacaacaacacggggagctactctcatcgggtagctcaattatatcataccaagcgataaccgggaacaacaactaaaccaacggtaaacttgtgtggttcactattatatcataccaagcgataaccgggaacaacaaccacaaacacccacgtcataccgccctgtttattatatcataccaagcgataaccgggaacaacaaccggtcaaccagataagaaacaatctcgtcaattatatcataccaagcgataaccgggaacaacaaccatcaacgtaagacattttatcactcctttattatatcataccaagcgataaccgggaacaacaaccaccgtaagcactctgcgataccacgatgtattatatcataccaagcgataaccgggaacaacaggttgatggatggaacggtaacattatatcataccaaacgcgatggcagtatgcagaggataagaatggaggaccatgcaaatttattattttaactttctttctgtctcccatactgcataacgagtgcgatgcagaattttacatatccgagcaatatgaggaatattcccaattttaaaaacatagtcagcaccccttttcggtatcattaatgtaatctttaactttgctaaaataagatttgcgtcaatattattatatacagcccgctttgttaagatgtataaagttagtataaagattagtttacatttttgttgtaaatcttttttttttgtattagaatgaaatagatgtaaaaatatagtaaagaataatataagaaaacaagaaatgaggacgttttgttatggatgctgtatcagtaacgctgttgtgccttgggctgtttagcggaattgcgcttttcctgtatggaatgagtgtgatgggcgacggtcttaagaaggttgcgggaaataagcttgagacgcttttgtacgggttgacaagcacaccgattaagggaattttgctgggtgcaggtgttacggctattattcagtcatcatcggctacttcggttatggtagtcggattcgttaattcgggtatgatgaaggttatacagggaattggtattattatgggtgccaatatcggaacgagtataaccggatggattttgtgtctttcggatattcagggagcgggtggtatagcagctcttttgtcatcgtcgagtatagcggcaattgtagctataattggtctgcttgtgagaaatctttcaaagaaggagtctcataaggcagtcggtgatatcatgtttggatttacgatacttatgataggtatgtcaaccatgaaggaggcgatgtctccgcttcagaacaatcctttttttatgggaatgcttacgaagttttccaatccgtttcttggtattattttaggtatagttatcacggcagtgcttcagagtgcatcggcatccataggtattctgcagtcagttgcaatgtcgggatttctgcctttttcggcggcactgcctatagtcatgggtattggtgtcggggcggcatgtccggttctcatgagtggtatgagttctaacaagaacggtaagagaacagcacttgtgtatctttttaatgatttgttcggaatgattatatgcggaactcttttttacacaattcaggcgattgtgacaagaggaggtcagttcgcatttatggatgttgagatgaattctgtctcaatagcccttctcaatactgtatatcgagttgtcacaatcgtgatactcgcaccgttcatcaagcagattaataagcttatgttctggcttgtaaaggactccgaggatgaggttgaggatcaggcagactttgacctgcttgaggagcgtttcttaagaaaccctgaacttgcacttactcaggtaggtgttgtaatgaacggaatggcaagaaaggcacaaaagaatgtcatgagggcatttgaccttatggatgattattctgttgagaagtacaatatcattcaggaaaaagagacaatcatcgataaatatgaggacaagcttgacacatatatgatgaagattacggctgtgggacttaacaagagccagacagtgcagaactccaagtatctccatacagtcagtgattttgaacgtattgctgatcacgcctgcggtatatcgagggcagccaaggaaatcgtggagaaaaagattaagttttccgatgatgcgcggcgtgagcttgcaattctgtacagtgctgttaaggaagaacttgatatgactgttaagtcatttaccgaggatgatatagatatggcaagacaggtggagccgcttagaatcacggtgagaatgttatgtgcagagcttaagcgaaaccacattactcgtcttcagagcggtaactgtgatgcaatcaatggatttgtttttaatgatcttttgacgaatcttgagagaattgttgcgcattgctccaacgtagccgttgccatgatggagtttgaatcggatgatttcaacacacaccagtatctgaaggagctcagagattcagaggattcaggtattgtaaaggatgtcaactattattctgaaaagtattcggtggataagaaataaaatatatttgatggaggagtggaatgatgaagagagtaaaaataacgtataatgcaccggtgacacttacttttgtactattatgctttttggcgactttgctcaattacataactcagggcggaagtaacgtgcttttgtttatgacataccattcttcacttgccaacccgcttacctatctgcggttttttactcatgttttaggacatagcggatggtcacattttataggaaacgcctcgtatctgttgctgcttggcccgatgcttgaggaaaagcatggcggaaaagagataatagaagtgatgttattgacggcattcgttacaggtgttatcaactatattttctttccttatgttgcactttgcggagcaagcggagtggtattctcgtttattctcatgacttcgttcacaggctttagagatggagagataccgataagttttattcttgtagcggttgtatttatagggcagcagatttacggcggtatagtgtatgacaacaatatttcatacatggctcacattaccggtggtgtcgtaggttcggtaacaggttatatgcttaataaacaaaaataaaagttccccatctgcaggttgtgcctgtgagatgggggtcttttgtaatgttctattattcgtttcggttgcggttaagtcgtgtgaactcacgggcgattaacagaatggattcattgtattcgagcggaagagatgacatcatggatacaacatctttttgcatgtcatttgagttgtcgtgaccgaacactatggtgtcgagtgagacatgcagacctcttgacagcttgatcagggtatccacagacattgatttgcgtccgttctcgatttctgataagaatgtgacagatatgccggtcttttcggcgagctcctgctgcgtcatgttaagggaacgcctgagctggtaaatcttgttacctatgatacggttggtatcatgggaagtacagttcatataattcctcctatgctatttatttgttaaaaccttgtttaactataagtacaaaatacaaaaaaatggcaatttattaaattaacaatagtttataatttgttaaacaaagacgctttgacagttattttataaaatgttacaatgagcaaaactgaaatatatgaatattataggagtgtgagacagttgggcatagtgatagaggatattttaggcttcaatttttttcaatacggaagcccgtatacaggagaatgcggaggaatgcattttaggatggagagaagcccgctggaaaatgtggtgtttaatcatgatcctcacaagaatgatgaggctttgtttgcggttacggtgtggaggggaccgttcaattatgataccacccgtcagaaaaagattacggcacagtttccttttacggaggaggggagaattcaggctgtgcagtggttgaatgaacgatacaatgagaaggttgattactgggcagaggggataccactgttcccgagatacaccaccgatgaggacgaagtcgatgaaaatatctcagatgggaacgcggatgagaagatggagggctagcctgccgtgatgccggataggaagtctgtgacagcatcggagagagggagagcttcgcttacacagtaacttacctctcttttttttatgtataaatcaggtggggttacttccataagagcacctgtttcaagttcgtttttgacaaattcgcgtataacacagcctattccaagcccggtcttggcaaactcaataagaaggtccatactgccgatttccattagagttatctgtgcgagaggaagttcgtttatgtaggtgtcgacataggttcttgtcacgttgtccttggtgagcagcatgagattggcaccttgaaaaagattgctcatgtccgtgtgctccctgagaagaagattctttatgtacgccggggaagcgacaaaggtatcctgaattgaaccggcgctatacagcttaagtcctttggtagagtcaggtgtggctataagtcctatgtctatatcgtggttgtcgataagggctttggtatgcagggatgactgacaatttattgatatgctcacatgagggttcttgcggacgtatttttgaagccttggaagaagaatatatttacacagggtgttgcttgcaccgaagcggatgcgtccgacaccaagcagctttcttgagcttaacagcatttcgcctgcgttaatctcgttgaaggcagcgagaatgtgattatagagaagatcaccttcttccgtgagctttacacctctcgaacttcgatagaacagtgttgtgtcgagttcgttttcaagctgacggatggctttactgacggccggctgactgatgaagagcttttttgatgcctctgagagattgcctgactgtgcaaccatgataaaaatattgtatagattgagtgaggcgtgatttatattgttcattatattatattctccatttcgattcatacaaacataataacttgtagttataataaatataaataatatgtattttaagaatagcaaaaaatgtgctatgatgcaagtaataacttgataatcttattgctctatatgattattaaagaaaaacagtgaaatgaggaattattatgggtatgactatgacacagaagattctggctgcacatgccggtcttccttatgttgaggcaggacagcttattgaggctgaccttgatttggttcttggaaacgatataacatcacctgttgccattcatgagatggataagatgaaggtcaatggcgtatttgataaggataagattgcgcttgttcctgatcattttgtaccgaataaggatattaagtcggcagagcattgcaagtgtgtgagagaatttgcaaagagaaatgacattaccaactatttcgaggttggacagatgggaattgagcatgcacttcttcctgagaaaggactcaccgttgcgggcgacgttgtaatcggtgccgattcacatacctgtacttacggagcacttggagcattctcaaccggtgtcggctctacggatatggcagcgggaatggctacaggcaaggcttggtttaaggtaccttcagcgattaagttcgtgcttacaggcaagccttctaagtgggtgagcggcaaggatgtaattcttcacattataggaatgattggtgttgacggtgcactttacaagtcaatggagttcgttggtgacggaataaagagtctttcaatggatgacagatttacaattgccaacatggctattgaagcaggtggaaagaatggaattttccctgtagatgatattgcagatgcatatattaaggaacattcgaacaaaaaatacacgatatatgaggctgatgaggatgccgtatatgatgagacatacactatagaccttagcacacttaagcctacagttgcatttcctcatcttcctgagaatacgcacacggttgatgaagcaggagatatcaaaattgatcaggttgtaatcggctcatgtactaacggaagacttgacgatcttcgtattgcggcagaggttcttgaagggagaaaggttgcaaagggactcagagtcatcgtaattccggcaacacaggcaatttatcttcaggcgatggaggaaggtcttttaaagacatttatcgaagcgggagctgttgtgagtacgcctacatgcgggccttgccttggaggatacatgggtattcttgctgagggcgagagatgtgtctcgacgactaaccgtaacttcgtaggacgtatgggacatgtaaagtccgaggtatatcttgcaagcccggcagtggctgctgcaagtgccgtgacaggaaaaataagtgaacctgcagaacttggtctgtagatgaatggaggattaatatgaaagcatcaggaagagtgttcaaatttggagataatgtagatacggatgttatcattccggcaagatatctcaattcatccgaccctgcagagcttgcaacacactgcatggaggatatagacaaggattttgtaaagaaggtaaaaaagggagacataatcgttgccgacaagaacttcggctgtggctcatcaagagagcatgctccgattgccatcaaggctgccggtgtgagctgtgttatagcggagacatttgcgagaattttctaccgcaatgcaatcaatataggtctgccaatca

SEQ ID NO: 3868 - DNA, 23561 bp, synthetic construct
  source 1..23561: mol_type = other DNA
  misc_feature 1..23561: note = Synthetic
ctgtatacgatgaatctggacctgaatcaatctatattgatggtcaaaggcagttatctattacagaaaagattgaaaaacagatcaaacaacagtataaaaacgcagtaataaccggatttaatgctacggatttaaccggaacttttgaggctgataatggctcttattcgttttcctggattaacaatatattaaccgtatctgaagtaaataatcaaacagatgtttcttgttacaaagtctgccagtagaaaaacgaaagctaaaaaacacatatattaatattgaacaggagaagaattcattatgtctatgacaatagaagacgtaattcgtgatgaacgtcgtcgtgcacacaaaaagagagatttagcagaggcttttcgggatgaagcaaacaaaattccggcactgaagcatgcgaaacggcatgatcagatcgcagattggcttgaagcattaaagaagtcggaagaaaaacagaaagaagctgaagtttgcgcccgactacagctgctaaatgaattgttaacaaaatcaaaggatcacgcacttacggcaacagacattcaggcgctaattgatgaagagaacaagaaaattgagccacaaaaaggttggtactaatatggatgcagaaaaagaaacagcgcaaatccgtgaagtaaaacgaattctaaataatagcaaaagtggttctgcaaaagaacctgatgttaagatttcgaatttgtgcccgtctaaagaatttgtagacggattattagagagatgtggagatatcttaggaatcgaatatcatgctcgttaagtccggcacatatttagtagtaaacaaatatgaataaagaaaaggagagtttactatgtttgaaaattcaaaagagatcatgagaaagatcaaaaacaaagaaggtttgacagatgccgaattcacaacggttgaaagatgtttgttgctgggtgatgtcgatgacaaaattcttaattatcaattaggtgtgaaaattggagttatcgatgatcctttccgtcaggataaaatggagtttaaaaagacagataaaatcatgaatcaaatccgcaacaaagaagagttaccaaaaccagatcgcatgactttggagcgatatctacggttgtatgatgtatctgagtccattcttaattaccagtgcagagcggatgaagaaaatccttttgagattagtgaacagatttaaggaggaaacagatatgagtgtattcgtaacaggcgacattcatggagatccaagaaggctgaataccgggtctttttacgaacagaagcagttttctggcgatcaggacgaaaatattgttatcattcttggtgattttggacttatctggtcccgagactccgaaaacaaacaagagaaatactatttggactggttagaacagaaatcatttacaactgttttcgtcgatggaaaccacgaaaatcatgtaaggctggcaacatatcctgtaaaacaatggcacggaggccttgtacacgaaatcagacctcatgtactgcatcttatgcgtggagaaatgtttgatatcgaaggaagaaatttctttgccttcggtggagctagtagtcatgatgtgagtgatggtattcttgattatgaggattcagactggcgggaacaggcaaggaaactcgacaagcagtacaagttcatgtaccgtgtgaaagggctgtcatggtggcaggaagagttaccaacagaagcggaaatgcagcatggctttgatacacttgagaaatacggcaataaggtcgatttcattatcagtcatagtccatcgacatcagaactgtatctcatgggcggaagatggttatatgaaccggatgttctaactaactatttggatgaagtcaaagctagagcctcatttgattataaaaagcatctgttcggacacatgcatgtgaataaggcaatcaatacgcaggatatttgtatttatgaacagattatccagattctatgacgaagttttcaaaatgtgagccttattatttgtgtaaaaatgtaatggagattaaattatggaacagaaaataaggacaatcattgccggatgtcgtaattttaatgttatcgagatcgtcgagatggcaatgttaaacagatttaataacgattatagtgagatcgaactagttggcggcggagcaaagggtgctgatgcattagggaaacagtttgcgagagaacatggtattccatataaagagtttccagcagactggggcacctatcataatgccgccggacaaatccggaaccgtcagatggcacagtatgcgatcaaagggaaaggttccggcattttgattgcgttttgggatgggaaatcaagaggaaccaagcatatgatcgaaacggcaacagatttcggaatggaggtaatcattgtgtatgtttgatatcgtatcttcggttcaaactgcgaagctttcattgtttccattcgaacccatatttagtgtaataaaaataattgtaagctaaaaaggaggaaacgaaaatgacagcaggtgaatgcatcaaagactggttaggattagacaaaacaaaaagtttggcagattggttaggattgaacgaagagtccaaaaatgaatctgaaaatgaataggaggacaccattatgaccgttcgagaattcattaagaaaaatggatggcaagcagattgtgatatacacaaagccaaaagaatgagtgttgatatcgatttcttaaatccgaacaaagaggaagacgaaacgcagttcgatatcgctgctttcgacgtcaaggaattagcaaccctttttgcagacttctgtaaagagaacaaattcgcattgaataccgtcacaaatgtagtcattgttgcggttgacgatgaaatggacgtcgatttctaaaaacagaaaagaaagacctattgctttgcagcagtgggtcttttctttatgatttctgacgagttttcggatttatgagccttgttgttaatagaaacaaagaaatggaggataatgaagggctatatgaaaaagtataatacggaattagaaacgaaatgtacggaaaacacatatgaagggaactcgttcaattgcaatgcgtatgattctggatattgctacgttttgggacgagcattaacagaggaagaagacgcgttatgtgaagaccattgcattctgtgtaagtgaaaagagaaaattaatatatttcatagagaaaactagcaggtgtatgatagaattaagtgtgtaaaacgaaaaggaaaaacaatatgagtagtagaattataagaggttactggtcttgtaagtattgcggaactgctgacattgatggactggtagatgtttgcccgaattgtgggaaacagaaatcatcagacgtaaagtattatatgaaacaaggaattgcggaagaagtaacggatactgaattacaaaaagcgaagatcaagaaagaggagtgtgacggcaaacacaaagactggatatgtccatattgtaatcagttgaataattatgcagatggtgtttgcgtagcgtgtggtgccgaaaaatcggaagcagagtttgaatatggagaaacgaagatggataaatcggaaacaaaaacagatgtattcgaaaatacgcttccggatgaaacaacaccgaaagatgacgaaaacgatactttggttgacagaaaagatgtaaactcaaacgagatagttgaaaagtcgcctattaatctgcgtgatcgaattatgagtaaaatacgcggcaacaagaatatgctcaagattagtggtattattgccgcagtgttcgcggttattggattgctatttttcttgttccaaccaattacgaagtcagaaacggttgtcggattttcctgggaacgaactatcacaatcgaagaggagcgaacagtagaagaaagcgattggtacgtgccatctggtggtcgagtctatgacgagaggcaagagataaggagttataagtcggttcttgaccattacgagacaagaacagaaacaaaaagcagacaagttttcgaccataatgagtcatatacaacatattcggataacggaaacggaactttcacagagcaagtgcatgaaaatcctgtataccgtacagagtactatactgagacatacgaagaaccagtatacagacaggaaccagtatatgacaccaagtattattatgagattgaacgatggtttccaattgatacttacagttccaaagacgacgataaagagccatattggaatacggaatatacattaacagagaagcagcgtgacacaaagcgtgatgaactttattatgtgcattacgatgatggtcagaatgtcgtaaaagatgagacagactatgatacctggttagaaaccaagattggtgacggatatgaagtaacgtataaccgacttggaatgacgtataagagagaagcaattgaataggaaaaactgacaacgaactccatcattttcggtggagttttgttttgtagaaaacattatgacacatatttatgtttgacaataacaatcaggaatctttataatgaaatcagaaagagaggaaacgaatatgtatttgcttatgaacaaagacaaagagataatgcattttaatactttggcaggacctcttggaaattcatatgaaattatttcgcaaaatgaagatcagttgccatatggttttacaaatattgcggaatggatttcaaccagaaaaggtagcaagcataatgcacacttgaaacagatcatgaaagattgtggatgcgaagacgatcttggttatattcgtgttacgcatgctgcatcgttaaatgatacgtactggataaaaaatgaactggaatctgttacgtggaatgatgtttctttctatcggaacgaatttgatgaacagatttccaagcttgcatttgaaggtgtcggcttatatgggataaaactgagtagtacgtctccagaattatgtacagaaggcagttttcgcaaatgctggaagcgagaagacggtgaaatttatctgtacaagagagggacatccggagctatgaatgctggacttgaaccatattgcgaaatgatggcatccgaaattgcagctcagatatgtgataatgcaatttcttatcaaaaagtaacattacatggtgaaatcgcatcaaaatgccacttatttacaacggaatcagttgggtatgttccgtatgcaaaattaaaagaagatacgactgcaaatgcaatgctagatttttatgcatcaatcggtagcgaggataaatttcgacagatgcttgttttagatgcacttacttttaatgttgaccggcatgcaggaaaccatggagtgagtatcaataatgatacaaaacagattcttggcatggctccgatttttgacttaaatttatctctactgccatatgtattgccggatgaatttgaaaatataggtaacaaaatgttggagtacggtccacgcattggtgacgacttcacaagaatcggacagatggcattaacatcggaaatccgtgcaaaacttatcaatttaaaaggatttgagttttctttcagaggcaatgaaacattttcgaaagaacgtgtgcattttttggaacagatgattgagagacaaataactggacttctatcgaaagaacagttgtatacgaaagacgtttttgttccagaacaagcaaaagaaatacagcctgttaatagcgatgtaggattaaactcagctgctgatgaccttgctgataatctacaagacgttcttccggatgcattggtgtcagaaatgaatgattcttctgatgattttgttatcgtatcgttaaacgaagctgtagagatctatatttcggttttagatttttcagttgaaatttatgttggagggcaattgacagatgaatccagtctaacagaggaagaacgaatggattatacaaaaatatgccaaactgtggatgattttgaaattgaatatacaaactgtgatgacttggcgcgataatcaatatgttaatattctacttacgcaaagagactgactttgaagttggtctctttcttgtatgttttgtgtgcgtcagttttatcccatatttaggataacgaacaaattgcacacataaaaaaggaggaaacgaaaagatggggagttggaacgaaacatgtatgttaagtcatttacagattatgtatggagattctgtaaaagtaattattttggtaaacaacaaggcagatgcaaatgaatctactcgtgtttactacaatgaaacctattctccattgatattacctttcgatgcggaatatgacgattatggtggcgttaaaaacgagaaaattcctgaatacacagacagtctgttacatgagttagaattcgagcaaaaagatggaacgaaatatgaatataacaacatggcagattttattcaggatattaatgagacggatggcttgtacctaaaaggtttctatctcaatggtccgaaaaaacttgaatgtgtttttattcatgccgagctctatgatattttagcttcagaaatgagaaacagaataccatataaccaaaagaagaccctgtatgaattatacaatgaacggaaccaggaagtgaaagaactatggatcaagtaccatagtaattctgatgagtatgataaattatgcatattataccacgaaatcatgccaaaacttttcaaaacgtctgcatatggatatgagtttgctgtcatgattttagaaaaatcattaaccgaaaacaattttgatgatttctttgaagaatttacaaaatacatcctgtttgcaagagcattacaaaccggtagatacggatatataacaagatgtggagctggtggacaagattttgagtgttccattcaggttgcggttgccaaatttgttttgaaattctcgaagagaacaaatgaatgcggggatcgtgtatattgtaaaaaggaaacaattttctggtactaaaagcggcaatgaaaagattagagactgacgattttgtcggtctctattttctattgtattcattaattggaacgaaaagtaccaaatctcttataatgtcttttccgtatcccttctttgtgtgcgattaactcggcacatatttagtgtatcaaaataattcacacattaaaggaggatacaaaaagtatgaacaaagaagaagtaacaaaacagatgcaggacattatcaaccagatgaatgaggcaaccgctgtctacggaaaagatgcaatcatgactgatcataaatgggatgacctgtataatcagttaacagacttggaagaggaatccggtattattcttccagaaagcccgactcagagtgtaggagcagaggaggaagaagatattcctggtgaaaaagtagaacatgagttttcggcactgtctcttgcgaaaaacaaggatattaagaaacatatcaaatgggcccagggtcgtaaatgtttcgtttcttggaaggaagacgggatgaccttggtggttacatatgataatggaaatcttacccgtattgtaacaagaggtgacggatatgttggtacagatatcacgcgtttgaaagatgttatcaaaggaatcttaccaaagatcgactacaaaggacatctggttgtaagaggagaatgcgttatttcttatccggatttcaagcgtgtaaatgaatcactaccagcaggtgtaaaactgtatgataatcctcgtaatcttgtaagtggtactttgaagctttcagatgaggaggttatcaaagaccgtaatccacagtttattgcgtttactttgcggtatctggatgatgaatccgtattagatgcagttggacttcgaaattcatgggaaacaaggcagttattcttaaagaaacttgggttcaacattgtttcttacaaacctgttgaacatccggaaaccgatttacagtctgttattgatgaatttacagccgaagttgagcagtacgaaatgcctgttgatggtcttgtactctgctatgaagactgggattattcgttaacaggtggcgttaccggacatcacgcaaccagagcaggttatgcctttaaatggccggacgaagcagtagaaacaaaagtggttgacattgaatggtccgactcaagaacgggcttatttaatccggttgctatctttgaaccagttcgtctttgtggaacaacggtaacccgtgcttcgttatcaaatctttccaccgtaaagaaaaaagacatcaaaatcggagatagaatcaccgtttataaagcaaacatgattattccgtgcgtagaagataataaggatgccgatgttcaggatacggatgattggaatttcatttgcgaacgtcacaatatccctaaaatctgtccacattgcggaagacctcttactgttaaaacatcacaaaatgcagaacttgttatctgcttgaatcctgactgttccgcaaaactgattggaagtatgactcatttttgtgaacgtgattgcatgaacatcaatggtgtttccgaaaagaaattgcagcagctcattgatcttggcgttattgaaagtatttccgatcttgtagatctcccaatgagataccatgcgagcggaaacaatctgatcttcgttgatgaattcggtgatgactgtaatttggcaaaccagacaggatggggcgaaggatctgtgttaaatcttgtaaccgggattgagacagcatgtaaaaatgcgacctttataaagtttcttcatgctatgggtattcctaattttggtcgcggacaggcgaaactgttagctcctgtggttgcgaaatggatgaaacgacataatgatatgcataatgatatcacagatatgttatctgcgcttagctttatggtggaacgcgaatacgatttcacaaccgtagacggatttggtgaaatcattgttggttcattaacaacctgggctgagcataatttgcttccatatgaaatgtacggtgttatgaatgaaatcggacgtattttacagtgtcttacatttacagacaaaccggaagattacattaaggaaacatccggatcaccagttgatggcaagacttttgtagtcactggagatgttcacatctttaagaaccgcaaagaagtagaagtaaagattgaggaactcggtggtaagttatcaggctccgtttccaaaaagacagattacctgatcaataacgacatcgaaagtaccagcagcaagaaccagaaagcgaaaacgctgggaatcccgattattacagaagaacagttctgtgaaatgatcggaatgcagtattaattaacaaaaagagagaccgtttacctttattggtaacggtttcttttattttgtattcctttgtaaattggtcactcatatttaggataacaacaaaagagagaaaaacacggtcgattcaggattcgtaaattatggttgtttccaggttgcgtataccaccgttcacgattagtttcttccttatatagttatagaccctggttgtttccaggttgcgtatacctattctgcataccaataaggcgatatctgagttatagaccctggtcgtttccaaatggcgtatacctaaaactcgaaaaccagtctctataataaagtttaacacagtgttttcgctgtgtttatactgtgaagtttaaaacccttactcgtttattcgggtaagggttatcttcgttttagggtacatagggtacaaaacggagatcatacatctgcagtgtccaaatctcagtttttatacaaaaacagcagatttgaactcggttcctcaagagtgtaagggagttttattgtttttgaaaattaatcgtattttctgacgagttttcgaatttgtgagccttgttgcaggtgttattacgaaaacgagaacaagcagaaaggatgaaaactttatggaaaatggatttacatatcgattaggattagatattggtatcgcgtctgtcggtgctgcagttgtacagacaaatagttttgataacccatgtcatcttacagaacctgatgtacgaacatttccggcagcagaatgcagagaaaatggaaaatactatggaaaatcagcggcagtaccaagaagagaatgccgaacgactcgtagacgcattaaaagaaaacaacttcgaatgaattgtatcaaacagacattgcagaaggcaggtcttattgatgttgatgagtttatgaaacggtattctgatggaacacttccaaacgtataccagttgcgatacgaaggattagatcgcctgttgatagatgatgaatttgctcagattcttattcatattgcaaagcacagaggattcctgtcaacaagacgggctgacaagaaagacaaagaatccggagctatcctcgcagcgacgtccgcaaaccagaaacttatgatggaaaaaggatatcgaacagttggcgaaatgatgtatctggatgagagttttcatacaccgtgttccagtaatgaacagggatttattgtaactccgagaaacaaagcaaaagattacaaacatacgatctatcggtcaatgctggtcgacgaggttcatgccctttttgatgcacagcgtaaattcgggaacacaaaagcaaccgaaacattagaatccgaatatctcgagatcatgacgagacagagaagttatgatttaggtcctgggttgcaggctgatggaaccaaaagtccgtttgcgatggatggatataagagtaatgccggagaatgtactttttataaagaggaaacacgtgcagcaaaaggtacgtatacagcagaattatccataacgttacagaagatcaataatctgaaacttgttgatcgatatggagacggtcggtttcttacggatgaagagaagcagaagatccttgagtacatcagtaaacataaaaccatgaaatacaagacggttaaaacattattaggaatcgatccgatgattcgtttcaatcttttgaattatggcaaaaagaagaaaacgaaaaaggaatcagatgacaaaaccaaagacgattccacgaagaaaaagagtaccaagaagtcaaaaacaaaagcagaaaccagtgagaaagccggcaaagacgccaataaagaggaaacagagttagaacgtattaatcgaatcgaagatactgttttcgtttctatggaatttacgctttcttatacagactgcctgaaagctcggattaaaacgttatcggaaaccgaaaagagagatttgtttgatgaagttggagaacttcttacgtcatataaaacagatgcagccagaatcgagaagctttcgaatcttggtttaacgccagaagaagttgatcgtttgcttgatctaaatccaaaaggttatgccaaattatcacacaaagcgatgaaagagatcgaaccatatctgaaacaaggtcttacttatgacaaagcgtgtgctgcagccggtctcgattttcaggtaacctatactggagagaaaatgaagtatctcaaaggtcctgagatcaatcgtatcatcaataatattcagagtccggtagtaagacgttccgtagcccagacggtcagagtgattaatgcgatcattcgtaaatatggaagtccgcaggctgttaatgtcgagttatcgagagagatgtcaaaatcattcttggaacgaaagaaagcagaaacagcgatggaattaagacataaagaaaacgtgaagttctgtgaagagattaaaaaacttggtataaacagtccgaacggagaagatatcacgagatatcggttatggagagatcaaaatggtatttgtctgtattccggcgaaaagattccggcaagagctatgttttctaaagaatatgagatcgatcatatcattccgtatagcatttctcttgatgatcgttatcagaataaagtgttagtaaaagcaggcgaaaactggaaaaaaggaaaccgtttaccatacgagtatttcggtcatgataaaacaagatgggctgcctacgaaaacagagttgaatctttaatcaagagtgatggtaaaaaggcgcatctgttgaagaagaattacacaaaggaagaccagagagagtttaccgaaagaaacttaaacgacacaagatatgcaacaactgttgtttacaatatgatcatgcagtatctctatttggaaccttataactgtgacgggaaaacgaagcaggtatatgccgtgaacggtgctgttaccgcttatttaagaaaacgctgggggctcaataaaaaagatagaacgaatgacagacaccatgcgatggacgccgtagtaattgcctgctgtacagatgaaatgattgctaaggttacgaaatatatgcaggatagagaaacggcgtatagtaagaatttccgcattaccgatgaggaaaccggagaaatcttaaccagatcgaatttcacaagagaacaatacgatgaagcctatggagtccgtttcccagtaccatgggagacattcagagaagaaattgatcttcgtatattcaatgacgatccgtttggttatcttatgaaagaccgaaatttacagatcaagatcgattaccctgattggatgtatggggaagaagaaagtccggtcgcgaaaggtaagtacatcaattacatccgacctatgtttgtttccgtagcatgcagtcataaagcgacaggacgggctcatgaggaaacgatccgaagtgcaaaatatcatgattccgacagtcttgtaatctctaagaaagctttaaaagatctgaaattgaacaaagacaacgaaatcaaggactattacaacaaggaatgtgatcctctactctatgaagcgcttagaaaccgattattggaatacggcggagacggaaagaaagcgtttgctgaagaatttcataaaccaaaagcagacggaacagatggaccggttgtcaaaagtgtaaaagttattgagaaaaagacaacgggagttcaaattaatcatggtcttgctggaaacggaaatatggtacgagttgacttataccaaaaagagggtaaatattatgccgtcccgatttatatttctgatatggtgaaaaaagagatcccaagaaaagcggcgacaggcggaaaacagtacaaagattggcgtgtaatggatcctgatgattttctgtttagtgtatatccgagagatttacttcatttaaagaaaggaaaacctttcaaagatggactttcgaatgatatctatatgtattttgctggacttgatccagcttctgctagttttgcagttaccgctcatgacagcagtatcagtttacgaggtattggaattcaaaacctggaactgatcgagaaatgccaggttgatatgcttggagatatccacgtttgtaagagatagggaaaacaagaaaccggttatcattcaattatggtagccggtttatttcatatttaagataacgaaataattcaataattaaaggaggactcaaaaatgagtaaacaagttaatatggaatacctgattaaacttttcacagaaaagagttatgccgtatcgcgtgtggacaatggatctttggaacttggtatgacgctgtcggatatgattcaggtgatttcagaagcgtctggaattgtctatgccacagcatctcagagacttaagaacacgaagtctgtaaacacaaagaaagccagactggttctcggagttacagagcgggttgcagaagatcagtgggagtgtcatatgaaaactgttgatgttgacgttccgatttcggctgatctgaattcgaaaggtgctgacattattggcggacattggttgaaaagcgaaaagggtacggaaagcagtaagtaaaagattcaagccaatctgattcattataagagataaggaaggaaaagaaaactatggtacaaaaagacaacattaaacgaggtatgacaatttggtacttagacgcatattcttcttttgttgtctcaggaattgttcttgagacgtcggaaacgacaacagttgccggggaggaaaaggaatacgtaaaagtaagatgtattgaaaatgggggaacaagaggtgtcttattggaaaatgcgttcctgacaagagacgatgttatggaagacgagaaacgaaaacaggaggaatacgtaaaagaagtagatgctcagattcattccatttctgatctgctgcagttcgcatacagtaataccatatcgctcgcagaagagtatacagattggtatgcaagagcagcagtaaaagagattgcaaaaaagagattcgggattgaactggtatgaggtttcacgaatcccgaaaagagccttcttatcccatatttatgatatgagaaaagatgaatatacgtaaaggagacctatattatgcagtacacaacaaaaaccatttcaaaagatgaacagatcaaattattcgggagacaattacgattctcgcatgagtttgtagatgagcaacgaatcgactggtggaatattttggatcgacacttcggacaaccggtagttatggttcgacctgcaggagatcaaataatcgtgtccttggcagatggatcgattgctgctgatgataaacgcttattggattacaactctgaatcggacctgaaatctgtactttctgatatctttaaggaagctgataatgacgaatacgaggtgtttgaaagctatgctccgggtccgaaatgttcaggttccgtgtgggatacaattgtggaatgggttcacgaattctattaaacgcatccgaaaacaaacaaaaagagaccgctatttgtgaatgatagcggtttcctctatgtctgaaactagatactaatatcgtatccctatgttttgaactcgcccatatttaaggtaataaacgaatgtgggaaatgaataggaatatggcagcaaatgcaaatttacataaggcaaaggatgccaaaaatgatgagttttacactcagcttacagatgttgtaaaggaattgatgaattataaggcacatttcaaggacaagattgttttttttgtaacattatgacagagaaaacgcaacgtacaagatggaatatacaggtggcgatgacaatgatattgaagccggtgtgaatacaccattagatggcgacggagattttagaaataaggaggtctggatttgctggacgaatacgacattgttgtaacgaacccaccatttagcctgttcagagaatacgtggctgtgttgatgaagcatgagacgaagtttaaattttagagaaaggtcaataaaaatgagtaaagaagaacttgcaaaaagaataaaagaccgagttgttatgatagggacagcacttaatcatatggaaagtattataaaatatagtcgaaatgataaagggtttaaaaatgcttttgtaatgttgtatgtctctttacaaaattatgtttatattgagcttgataaaatatttgatggctcaagccaacatgagttttcagaatatgatgatactggcaaatgtatttatcactcgtcaaaatatagtatttataaacttattgaaaaaatggaaggcaataatacaaatggtattcatcattgttcgataaggaaatatcataacgatattatgtcaatcagaactttgcgagataaatattttgcacactgtgacggcaaagatttatatgaactaataaaagataactacatttcaggtttgcaagatttattaatgtgtgttgctgaaatatgtcacgaggcaaatccagatttatttccgaatacttatgtatctaatgtacgatgttttgatgactggtgttatatagctataacatcgattaatgaagtttgtgcattaaatgataaacttacgaatgcttctgttgagaaagagttatatgaagaaaatcttgattggtttataagttatctcaaggatacatcgcaaacacatcaatgtcacaataactgatcttacaaggtacttaatgtgggattaataaaagacttgttataagatttgtggcgaaaaacccattctggtgttaattttgagatccttgacgaatttcctaaaatgtgagccttgttagtattaagacacaaaacgatttggagtttggagacttgaatatgaataattcaaaatatgtagaatttgttaataacaatattgaacaaattgcagaatacgtaaatcagagttttgaacaatcgaaagaatatattaggatgaagcttattcgtctaataaaagcgtatctagtagcaaaacctattcattatgttaatgaagacgatgggaacccatacgattgctcaggtatattagtaaaagatggatatgtttcgttcgatcagactgtgacggaatttctacaggaggaatatactggtgacaaagaacccacatatattagcggaatgggttggcattataatacatatgcagatgatctgagttacgatactattaatatagcatatgatataatgctttctgtaattcgtagatatatagaaaatgaattcactgttgctctttcggatgatgactttgaagatatcaaatccgtctgcagagactttgatgatatctatgataattgtatagcttccgatttcttttttggtgaaccagctgtagaattttgtggtctttcagatataaaacttagcgatcttatgaaaacagctcataaatccaaatgattctttactaacaagaaacatcaatttcggaaacgtatatttagggaactttaagaagtagggcgggaattctcggttacttgtatccgagatcacgagaatttatttcgaatgattcaactcctgcggagtacagatcactcattaccattcgtgatcttgagagctgaatatttttattcagtctctaaagatgaaagcccgtgtgtttcaaaacacatatttatatataaatgtatacgcagaaaggaagtgaatcactcgttatgaataaggcaatcaagtacagaatttatccgacaactgaacagaagatcttattcgctaaaacctttggctgttgtcggaaggtctataacctgatgctttctgacaagatcagttcctaccaggtatccaaatccttcggtaagcagactcctgccatgtacaaggatgaatttccgtatctcaaggaagtggacagtcttgcacttgccaatgctcagatacacttgcagactgcaatgaagaaccattttgacaagaaacggaagaaacgtaccggatttccgaaattcaaatccgcgaaacgaagtcgcaggtcttacacaacaaataaccagagcggtactgtagctcttgtccagaatgggatccgtcttccaaagaccggtattgtaaaagcggtgatccacagatatccggaagaaggctggatcataaaatctgcaacagtctctcaggacagtacaggaaattactatgcttcagttctctttgagtttgaaaaagagatcattcctgtcccagtctcagacaatgtgatcggactggactatgcttcagacgggttatacaaagacaactatggtaataccggttcggaccataagtttttcagggaaagccagaagaaactgagaagagaacagagacgtctttcccgcatgaccgggtctaagaaggatgagccaaagtcaaataactatctgcaacagcagcttaaggtcaacaagatctgccgtcatgcagccaatcagagactcgaccatctacacaaattatctactgggatagccaaccggtatgacattatctgtgtggaagacctagacatgaaatccatatcgaataaaagtttcggaaacggaaaagcgactatggataatggttacggtctgtttctcaaaatgctggagtataaattgaacgacagaggaaaatatttcatcaaggttgacaagtggtatccaagcagccagatctgcagtcattgtggaaagcgtcacccggagatgaaaaacctgcgtaatcgtaccatgatctgtgactgtggtttcgaatatgaccgtgacgtaaatgcagcaatcaatatcatgaatgagggtttacggatcttaaaagaagctgtgtaaacgatgatttcttatcctcatccttattctaaaattgtaggctgggaaccagccgaatcaacgcttgtggacatcgcataagactttccagtacatatttctaccgtattgcaaagcggtgatggatgaagcaagaagctcggttacttgtagccgagtagttcacacgaatctcatatagaaatgactgaaaaagagttcgaaaaatatgtaaacgaacagatagattccgattattgctgcatcagtatctataaattatatcaggaacggatatttagggaacgaaaatgaggattaaatagattattcataaatctttttgttccctaattttacgtttcatgacgagttttcaaatttttgagccttatcataaatgtaaaacaagaaacaatatgtgaaaggatggcatgtaatatgacaatacagacaatttcgaaagaagatgaaaacgtaaccgtagagttaagtgcagatgatttggttatgatttgcaacgcattgtacttacattcgaaagagcaggatttgcagtcgaaagagcagaaaacgaatgataatttcttgcagctatacagcgacatgatgatagctcgggatctgtgtcagtacggtcatgtggataatttctgtctacgaaatgtcgtagcatgccgcaacgatatcggaaaagggatcggtgtcgtgttgtcagaagaggactaactactttcagtaaggcgtttgcagcagtctttgtttcaagtaattacagagtattgtagatcagataggagtataattatatgattttatttattttactagccattggattcgcattgtatactattttttcagatagtgggctaattgatagtatcaaaaatattgaagaaacaaataaagaagtttatggaagtgtgccaaaaattatttttcagtggttcttacttaatattttctttaatgtaattaatttcatatttgtttttataatatccgcgattgttgttctatgttgtcctaaagcagaatcttattatacattcaatattaactcattaaaagacaatctagttacaagcggagaaattcatggcggtgctttttgtgtcagagggactattgacggagatattagttatttcttttcaagaacaacagataaaggagaaaccattggacatataccagcggataaatcttatataaaatatgacgataataaaaagccttgtattgaagttcatcagaaaaattataagataccagaaattatagaaaagctattatttacaaaatggtttaacaacaagagtgtagattattatgtaattattgctcctgatggaacaatatcaacaactggaacatatgagatagatatggactgacaacatccggactgcctgaaaggaaacatttactggtcagacttgatatgatggttttgaagaagaagggttcgatccggcgaattaaaaataattcaaattggtacttgacttttcattctatctcggatatattctaaacacgaagaaggaagtgcctatcctttgtattctgtatatctgcatctcacccggatccaatatatggaatacattatgattgcacttcctctttttataaaaaaagaaacaaattatcaaaaatgtgacgagatttccaaaaagtgagccttatatatattgtaaacaacagaaaaccaaacatagggcactcgccaagcggtaaggcacgggattttgattcccgcattcgctggttcaaatccagtgtgccctgttaagggaacgatggattgtagcgtaagcgttatgtccagcgtgccctgtcaaaggatcttattataagcgttagatccagtatttcctgcaaaactctgcaactaacgattaatgttgcaaatatccgccgcaagagttataccatccttcgggacatagaacggtctgattatcaatgcagactgtaatggagcagcaaacatcataagaaaggcagtgccagatgcatggaaaggaacagaaagtttcgaattccttgcactaccagaagtgtcaggattccacgaactgaatcccaaaagtaattccgtaagaggaatagatgctgtgtgaacagcatgtgcaggtacggacatctgttttcggacagatcgaaagacgtaagtgtcacgaccacacgaaaaccacaacctggtacctatatcttaggaagataccacctccataagatatgtaaatgccgcatgggcgtggttattcattgtacttatggggaatttggagtggcggtattgaaaagaattcaaaaatgtattcctttgtaaattactcgcacatatttagttatgtagcaaggaaaacaaaaatatcgcgggatagagcagtggtagctcaccgggttcataacccggaggtcgggggttcgaatccctctcccgctactctgtaactgatgaggattgggaatgattctcgatcggcaaaaagaatctctgtaaatgcgcagagcattagttacaaacaaaataactggtgctaggcatgtgccttcccgcttaaatcctggtcagggcaccgggagccagttataaaataatatgcgtagtgacataataattgaaatcgtacgacatatctgcaaacggaatcctacttctgaatgcaaatatgttcgattatgggtatgtctgaagagttccggatggtaagtataagtatttgttctgataatatatgtgtgtggtaggaaacagacagaaaactgaacagagaaagtgctgagagtaaggatattagcttggttcgaatccgagcctacgcactcactgatctcaatcagtaaaaacaataattcagaaaggatgtaaaccattatgttaagatcatttagttttaaaaacgaaaacacatttaagacagaacaaacatatgcggatgggtatatgtttaaaaatgatgcttacaaatatggaaaacgttcagtatattcaaataatcgagccaaaaacaagataacacaaaagcattcagactaatgaatgtatcgcgaccggacttcaggagccagctgcttgtgtatcgaaattttggtgcacgagttgttaggctcctattttattggtcgcaaatatcagtgataacaatcataatatatgcatcattcgtatagaggtcattacgccggtcttccaaaccggatacgtcggttcaattccgacatggtgctctcatctgtggcggcacatacccacggtgaacaaaaacaaaatagaaacgaggattggaaataggcacttccttcctcgactgtacctgtagctcagttggtagagcaaccggcctttaaccggtaggtcgtgagttcgagtctcactaggtgcacttatgctttgttagcacaattggtagtgcgactgccttgtaagcagtaggttctgggttcgagtccctgacaaagctttcatgcctcgttagctcagatggtagagcatccggctgaagaccggtacgtcgcaagcccgaaacttgcatgaggcactttgggtacatagtcattactgtacctatttatgcttgtgtcgcctaaaggtatggcatccgcctcttaagcggaaacaattcttggttcgaatccaagtacaagcacttccggtaggtagcccagaggcgaaggcagctgacatgcaagttgtatcagccacatcagaaacatcgtaggttcgatccctaccctgccgactaatgatcgtgtacagcaatatataagatcattaaaaaaaaagttacaaaaactgacgaggtttccaaaaagtgagccttatagtgtatgtaaataatcaatgtgtctccgaggacaaacagcagagtcgccaccctgtcacggtggagatagcggggtcagcacccgtcggaggcgtttccattcatggggacatagctcagttgggagagcattcgccttgcaagcgaaaggtcgtgggttcaaatcccactggctccattcaagttacactgagtatggcggctagtttaatggtcaaaacgctatggtgacatagagatgtagttcgaatctgctgttgccaaaaaggtataacttacaaattcggggagatatcccgtagaggtagcggtgcagactgtaaatctgttggcttcggtctcggttggttcgactccatctctccccactttccggctccttcgtctaaaggttaggacacggtcctttcaagaccgaaatgctcggttcgagtccggcaggagtcatttgcggagtagagcagtggcagctcactgggttcataacccggaggtcacaggttcaaatcctgtctccgctactctgacatttacaaggaggagaaacatgaaaacaaaatcagaactcttatgactatcgtattctaatttatggctcattcgcctagttggttatggcacttgcctgtcacgcaagcataagacgggttcgattcccgtatgagtcgtttatatgattccaaaatgtgtagtactattgggtgctaatttggagtcatatttccgtacaggttgtgtgcagctttggaattgttctgtgttgcaggatatgaacaaagcgaatcgcacctcggaatacaacatattctcctatagctcagttggtagagcgtctggctgttaaccagaatgtcacaggttcgagtcctgttgggagagctcgcctgaaagcgaatctaaaaaaaagacataaaaattaagaccattagaaatcagtttttcatatgtcattttgaaaatgtaacaaaaaataagttacaattttaaaacaaatgattatatgaaaggctacttgaaaaacataatggtctttctttttgtattccgcatttttatttgcgcttataacgttttcattaaatttacgatgtcgttcgttgtgatcggagcttctcctaatcttttcgacatcataaaacgcgtaaacgaagacgagcaaacacaacaattgcctttgtgtctggataattcagccatacatgatcgtttgagaagatacgggttcgttcgataccgtttttgacactccataatgttaatcatgatcatccacctcgcattcgtaaacactttgtgacgttttccttgttatcttaaatatgtgttttatgttacacttttgtgacgagttttcgagattatgagccttatcatttgtgtgacgggaaaacatatacacaaaggagaattcaatatgaatcagtggcaggaaatatattgtaacg

SEQ ID NO: 3869 - DNA, 23528 bp, synthetic construct
  misc_feature 1..23528: note = Synthetic
  source 1..23528: mol_type = other DNA
aatctctaccttgatatagataacaggaataagatagacagctatgtgtatacgcgctcatcgcagaacataatggactattatctggacaatatagataacgataggaatcatgcgacaatgctcatcggaccttacggcaagggcaagtcacacatgcttctggttcttcttgataaggtgagaagtatggaacatccatacctcccgataataatatccggcacgggggatgacctcaatcaggtatttcttataggacttaccgacgcgcttaagagggcacggcttgaaaagcttgcacctgagagctattacagcgaagccgcaaggcgtatcgggcagtggaaatgtgattttcccgatgcgtatgatagattcaaggcagaacttcataagcttggcataggcagcgtcgatgattttaccagggagcttggcaggcagtcgaagaaagcacttggcatgtttgagcagatataccctgttataacaagcggcagtgaattcaagccgtttctgatggtcgagacggtgagaatatatgagcagataagggatgtgcttgcgagggagtatggatattcgggtctttatattatttttgatgagttcagcaagtacgtcgaggggcatgagaaggacacattcgctaaggatatgaaggtgctgcaagatatgtgtgagctggcgggaagaagtggtgacggaagaatatatctcacctgcgttgcacacaagagcatcaaggagtacgatgctaagctctccggcgagatgaagaacgcattcagaggtgtagaggcaaggcttgatgaggtgagatttgttgtttcctcacagaacaattacgagctcataggaaatgtaatcaggaaggacaataatgctttaaaaagaatccgtagaattgagcggtattaccaaaacgctataaagtcctatagcttttcatgtttttcgggactttttgatgaggacgatttcagaaagtatgttgttgagggatgttttcctcttatgcctctcacggcatacatgcttttacatataagtgagaaggttgcacagaatgagagaagcatattcacgtatctgtcgcacgacgagaagggaagtctgtgcaggatagtggaggagtgtacccttgatgaggcagattacggtgtcacggcggatacaatatatgattattttaaaagccttttcagggctgacggcacggatgcactcatacacaacgaatggctcaaggcagagtatgcacttgaacgtgcagaggatgaggatgaaaagaaagtaatcaaggttatagcacttataggcataatagacagacctgatgaggtatcggcggacatggagcatatcgcatgctccctcaatattacttcagaggaatgcagtgcgataatggacagacttgtggagcgcaaggcggttatttaccgcaggagaaagcatgcttactgcttctataacaatgtgggggttgacattcaggcggaaattgctggcagagcggcgaagcttccagcagatgcggatattctcggaacattgaagagcatatcagaacttgattatgttcttccgaagaaatacaatcaggatttttcgatgacaaggtactttgagtatgtgttcatgacacctgagcagataagcaggctccctaagccgtctgtgctttttgaacagcgtttctccgacggaaaaattgttgcggttgtgtctgaacagcctgtagagtacgatgagcagctttttgaaagacttaacgataagagaatagtggtgcttgtgccgcagatggtattcaatcagacggacaatataagaaaatatatagcggcaagggagcttatcaaggataaggcgtttatcgatgagaacgcagtgttagagcaggagcttgtcaattattgtgatgatgcagcttacgaggtgaacagatacttagaggaggcatttgacacagaaagcggaatgtgccgggtatatcatgccaatgagaaatatgccggaggtttcagacattcaatgacatttaacatgtttttgagcagcataatgatggattattatgacaatgcgcctattgtcaacaacgagcttataaacagacagaacatatctgcacagaacaaaaaggcaagaaataagatagtggatatgattttgtccaatgctgactgctcggaatttctgaagggaacatcgcctgaatcaaccatatatagggctgtccttgttaatacaggagtatgcggaggcggaaatattgagtccggctgtgagcgtgtcattatggaaatcgaccgcttcattgcacaatgtgatgacaacagatgctcattcaaggttctgtatgacagaattatgggtatgggatacggaacaagaaagggaataatcccaatatatatatcactatgtctttcaagactgcatgataagccggtgctgagctttaaggagaaggaagttgaacttgactcgggcacacttggcaatgtaaatgacgccccggggaactattatctgtatgtggagcacaaaagcatagagaagcagaattacattaatgaattaaaaaagctctttggtgcaggcaccgggcaggatgatgacagaggtgttcttaccggaatactcagatggttcagggctctgccgcaggcggcatccaatataggaagggatgcacgatgtgatgagaacatggcggctaagcttaagaagctgtgcagtatgctgagacgtcaggattacaaccctcatgatttcctttttaccgaacttcctgcaggggtaggggcagacaagggagattatgtatcggcgatagatgaactcgtcaggttaaaacagtttctcgaccactatctcgagaatgtttcatccgaggcggcttcaattataaagcgcagatgtggtgcggacgagcaggacagcttgagagcggttcttgacggttataatgcaagatatacaggacagcgtaaggacattattttaaatcgacgcacacagtcaatcgtaaggtacatttacggactgtctacattcgatgacgcagagattgtgtcgggattatctaagctcgtcacggatatatatatagatgactggcgcgacggaatgcttgagaactttaaaagaggctggaatgagttctgtgatgaaatcgagagtgaacattccgccggaagcggcaccgggatagaaaagctgctcctggaaggtcaggatcagaacctgcttgacggcagtgacacagacgacaacagcacaagctattttttaaagaatgcaataagggaagcaatagatgagttcggtgacagccttgataccaaggagaaggtcgccgtgcttgcgagagtgctcgccgagcttgtcgccggagaaaatacatagaatcggggagatacagatgagtgtaatttaccttgacaatgcagcgaccacctatccaaaaccggagggtgtctatgaacagatggataaagtcaaccgcagtctggcgtttaacgccggacgtggttcttatgctctggcgcagcagtcggcagttatcattgacaatctcagaagagaattattgcgcattgcgaatgcgatgaatgtagcagaggtcgtactgtcggcttctgctacatttgcattgaatcagataatcggcggactgggtatgagggcggagcagtatgtgtatatatcgccttatgagcacaatgccgttgttagaacactttacaatcaaaaaatatacagagatgaagagaactgcacgcatattattgtcatgcctcttctgccggacgggggaatcaatgaggaaaggcttctgtacgaattcagcatacacacaccatcgttcgtgttcatgagcaatgtgagcaatgtaaccggttacatccttcctgtggagaggattgcgtccgcagccaaggcatacggtgccaccgttgtcgtagacggctcacaggcattaggccttgttccttttgacatgtcggcatcagacgtggatttctatgtgtttgccggacacaagacaccttacggtccgttcggaatcggcggtttctatatgaaaaacggaaggaacctcgacacattcatagcaggcggcacaggaacagattctctcaatgtcggcatgccgctcgcgggtacggtacgttatgaaccggcaagcccgaatgtcatagcggcagcagggctgcttgccgctgtaaaagaactcacgacagatgagatagcacaccgcctggagcatgagaagaaacttactgaatatcttgtaaacggaatgcgcaagataccgggcatcaggctgtatcttgcgcctgcacagtcgcatgtcggaatagtcgctttcaatcttgcgggctacaaggcctccgacatcggaatgattctcgatgcggattacaatattgcggttcgcacaggctaccactgtgctccgcttatacatgaatatttggacgacagagaataccttggagttgtgagagcaagcataagcatgttcacgggttatgatgaagcggatgcgctggtcgaggcactgggggagatttaggaggatgagaagatggatttaaagtttgcagagataagaaatattaatcagttatgcaatttagaaagtaaaggaaataacaatgaaaatgtaccgctgaatgtaaatattccatattaccagagaccatacaaatgggataatacaagaattggtaatctaattacagacttttatgataatgaagaaaatgagaatgaagatgagggatattttgctggttcggttgttatggttaaaggagaaagcggaagatttgaggttattgacgggcagcagagaatcacgacactttttttaatgaattatctgagatttttgcttattagaggatatattgagctgataataaaaaccaaaaaaatgtctaaaatcaagacacaaattgatgagcttattgatacagcggttaatttgtttgataaggaaaaaattataaaattacgtaatgtaagcagtggaatagataattatatcagcgatattgaaaatgatggacatgatgctgaaaaaaaggacagcatatgggatgcattacttgaatattacgagaaagaattaggtttgccaaagagaaattttactaatattgaaagttataaaagggaatgttatctggaaaacaagaaatttctggcgaatgtaggactgacactaaggtacagtagaaacagttacaatgaaaagcttaaagaagctttatgcagagctgtaatactaatgcagagtgatgatatcaatccgtgttttacaatgtgttgttttgagaaaaattcagtgtttaagagtgtagtaacagaacaatatatgaatgctatgaaatatatatatgataatattgtcaccgcatatatagtcggtgaagaaaaaccggttgagtatattgtaaagctagaaaatgcaatgaaaaatatattggataatattaatttttgcgttgtggttacgggcagagaaaaggatgcatatacattatttgaggtattaaatgatagaaatttcccggttgaagatttggaattaattaagaatcttttttacaaatattactgtaaaaatagcgaaaacaatgataacacggattatttcattgaaaaggcggatacaaaatggggggaaatatttagtgacacaataggcaaggaacagtcaaaacttatttcatatcttgctgcacaatattttacagcggatggaagactcaagtacaatgataatgagagatatagggaggcaatagaaaaacaatacctgaacagaaaacagcgatatgatggagaagcattgttaagtgatatatgtgtttatgaaatgcttgaaattatattagatgaatttgattttaaatatcagaaaaaagctgaaaatgtcataaaagcagagagagaaaattcaaaatcaattacatacaaagcgttaaatttgttcaatgcacttaaattgtacggagtaatacctgcaattaccaatattatacttaagaagtttttggaaaaaaatcctattaacagatggactggtggggattatattactgcatttagaaagtatgtacaggaaataagggatgacagagaaaataacaatacagattttgcggagattcacagtgtagcttatgatttctggcgttttgcactgcttgcacaaaattcggacaaaccaagaaatatagcaaaagactatatctcgaaaaattatgtatcaaattctgactattctttaaaagtcacaagtcaggaagcagatgtgttgaatgaagagttcagaagatggattaacgcatggaaatatggaaatgaaatttcccagctgaaggttaaagtactttttattaatttatttaattcaactaaagagggaaatacacttatattcaacaaaaccggcacaaattttaaaacggataaaatacagcttgatcatttagagccggataaaaccaatgcagttgcaagtgaaaagtattttgaaccttcatctaagctgccaagagaaacatataccgatagtctcggtaatttcatgattatggatgcaggcagtaacaatgacaagaacacaattccgttgcaggatgctcttgaaatttatgataatatggctggtggtcattggctgataaaagaaattcatgacctgttttatgagaatgaatgtggtgtagataagaacattgatggaaaaaaatacagaattccgaatgaagaatttttcatcagaagaaaaaagagattgatatgttattttaaggctattttgactaaaaagcttggcgataataaggtggaatttgaacagtaattaaaaaaggaggcagtgtaatgcaaaaacccgacgaaagattattgaagaccgtcatgtttgaaatacttcatcttgaacggaaaaatctcagaagcagagcaatgacggatcagaaaatggtggaggagattgggaaggttatctcggagaatattaagctatgtaaataatggaggcggagagggtacgaatgaagtttaaaacactcagaatgaagaattttatgcgttataaaggaataaatgagattaatttcagttgtgacgaaacgcataatgttacggtgatattgggggataacactgtaggaaaaacaacgattgctcaggcgtttagatggtgtctgtatggtgcgattatggctgaacgcggaaagaaagaatcagattatcagcttctgaacaatgatgcgcttgcaaaactggatgccaataagaaagcttctgtttttgtggagataatagccgtggatagcgaaaggctgtataccatccatcgtgaagttgaatatatgagggtgtatcctaagttcattgcaaaagagtcatacaagacattgaaaatgtttatttcagatatagacagtcctgatatcaggcgtgaggtggagcccggacctaattacaataagataaatgagcttataaatgaactgtttcctaaaaatctttcacattattttctgtttgatggtgagagatggagtgatttttcgataaatggtgtcagggagaacattaaagaatcagtacatattttaaccggactttctgcctacaagtccgccatgtatcatctgaaggatatgggagacaattcagttataaaaaagttcagaaaaaatattcagggaaaaggcaatgtgtatgatgattatgagcgtgagcagaccagacttgaacgtgaagtggaaaaattacagaaacagatagaaagtatcgatgccaatatcagtctttgcaataaaaaatgcgatgagatagagttatatcttgaggaaaacaaggatacggaacaactgcagacggcatataaacagtctcagagaatgctgagggcacagggggagagatacttagccaactataaaacttttatttcggaatacaattcatgtgcatacagactgttcgccggaccgcttatcgaggcttcattaaaaatggtcaaatctgtggcaggtgagcgcagggatattccacacatgaggcaggcgagcattgattatataatcagaagcggaagatgcatctgcgggacaccgataacggaggggtcgtatgctctcgaatgcctgctcgaacagagaaattatcttccgcctgccgatatgggttctctgctcggagaatttgaaaagaccgctaaccgatggaaaagggttgatgacgaactgccagacgatgcggcaagggttgatgagagcgcaagggattatgaggagacaatcattcagcttcagaaaatggaaaataagatgaatgagaatatcgattttgcagagaagagagcacaacttaggagatataaggatgaagcaaacaaggctgcagtgaaaaaaggtgagataaagggactcatatcatcatatcagactcgaatacagagtatagaactccagatgaagaatcaggaaataaagaatgccgaaaatgaaaaatggagaaacaagctggggcttgcggaggctgtatacgataaattatcagcggatttttcggagcgggagaaaaagatattttacgaattgaatgaagaaattcaggcgaatttttcgcgtatgttcaatgcgaaagataaaagaatccggctctcggaaaactatgaaattcagatgtgctataagaccgacataggctatcaggaagaaaagaacctgtcggaaggagaaaaggtagcaagaaattttgcatttattgtgacaataatggattacagcacacgaaagaagaatgagtataataaagctgactcaatcgttgaggataaggatgatgattgcaatgatgcgcttcctattgtgcttgatggaccattctcaaaactcggcgaggaaaatatctctctggtggcaaatgtgcttccgaaggtatcggagcaggtcatagtatttatgctcagaaaagactgggcgtacacgggacttgatgagtatgtcggagcggagtactcgattgacaaaaatcctgaagaaagctttgcgtcgataagaaaggtggacagaggctgatggctgattttgaattttttaaaaagcagtttgaatttaaaggaaagcactcaagaatggtgtctgaactttgtgttgctaatgattttgagcatacattttttagaaggattattgacgtgtatgtatttgcagcaataataggtatccgtcttgacagaaaagcttcggaagattattcaccggtggagacaaaaagtatttttccggagcagatgataaatgccaaggaagacttggatttcataatgcagatgatgataatgttagattcgggtccgggaactactgctgaggacagagtaagggaagcctttagaggtgcacagactaaggaagagtatgacaggctgatgggaattttcaatgactatgtgagaggtggagttgaagaactttacgaaagacttgttgtcagaaagcctgattcggatggcggatactacgacgaaagaaccgctaatcttatggcgctttatgataggcttgttccgaggaatatttcaaaaatcacaaaataatgctttacttttttaaatatgtggggtataataaacatacgttatatcataccaagcgataaacggttacaacaataaggtcccgccgctggcggtgtacctcaaagctctaatcccacttaaagtgaatactttaagtgggattatctattttaaacagaattattattaaagcgaacagaataatgatatccaatcccttattggttttgactcaaaaggaaattctgctattttgcaggaaaatatatgagtcataatattgcttggtattaaatgatttaatgaattatttaatctgataaccgtttgacttgataaggttttggaggaagggattatattatggaggaaatgaagcagacaggcagaaaaaatgaagcacctaagctgacggatttgaattacagaattgggcttgatattggtattgcttctgtaggctgggcggtgcttgagaacaactctcatgacgagccgttcaggattattgatttgggtgtcagaatttttgataccgcagagcagcctaagacgggtgcatcactagcacttccaaggagggaagcacgttcagcaagaaggagaataagaaggcgcagggacaggatagaacgcatcaagaagctttttcaggctgaagggcttataaatatcgatgagtttgaggctcgttacaaaatagcaggactttctgatgtttacaagctgagatatgaggggcttgacaggaagcttacagatgatgaactggcacaggtattattacatattgcaaagcacagaggatttaagtcgacaagcaaggcagaagaagcggaaaacgaaaatgacgcagcaaagaaaaaagaagcaggggctttaaagaagggtataagcaataataaaaagcttatggaagaaaaaggatacaggacggttggagaaatgatgtatcttgatgaaaacttccgtacagattgtccatggaatgaaaatggctacatacttacacctcgcaataagtccggcgattataagcataccgttttaagagatatgcttgtagatgaagtaagagagatatttaagtctcagagaagtcttggaaatattcacgcttccgaagaacttgagaatgcatatcttgatattatgctcagccagcgttcatttgatatgggaccgggtgctccgagcaagtatgcgatggagggatttgaggacagagtaggattatgtacctttgaaggtaagaatggtgagaagcgtgcagcaaaggcagcatatacctcagaactttttgtggcattggagaagataaatcacaccaagattgtgagtgatgatggagccacaagatttttgacgacgtatgaacgcaagagcattattgaacttatgcataagcagcagactgtaaagtatgcggcagtgcgtaaggcgattggcttagcggaggaggacaaattctacaaccttaactacagtccgaaggctggaagcaaaaagtctcctgaagatacagattttgttaaacttgaaaactatcataagatacgcaaggctcttggagaagacatagtttcagaacatttacctgctgaaaagataaagctgtatgacagtattgcaactatacttacactgttcaagaatgatgacagccgaattaagagatttatcgaactggggattggtgaggaatgctttgacgggctcctttcattatcaccaagcaaatttcataacctttctctggttgcaatggggaagataattccgtttttgcttgatggcaacacctatgacaaggcatgcgaactcgcagggtatgattttaaggcagataataaaggcgagaagtctgttctgctgaaaggaaaaaatataacggatatggtgaatgatattaccaatccggttgtgagacgttctgtatctcagacaataaaggttataaatgcaattatacttgagtatggaagtccgcaggcggttaatattgagcttgcaagggaaatgtcaaagaactttgatgaaagacgaaagctcaagtctgatatggaatcacgcgaaaaagaaaacaataatgtcataaagcgtgtaaaagaatataagctgaatccaacaggtcaggatatagttaagttccgcctctgggaggagcaggacagaagatgcttatattcaggtgagaagattgatataaatgaccttttttcaagagatggcggttatgacgttgaccacattcttccgtacagcatcacatttgatgatacatatcgcaataaagtacttgtaaaagcatctgagaacaggcagaagggaaacagaacaccttatgagtattttatggctgagaaggatgatgatgaatggaatgtttacgagactttggttcgaaatacagtcaaagattataagaaggtgctcaagttactcaagaaacatataacagaggatgaaaagagcgaatttagggagcgaaatcttactgatacaaaatatattaccagaatcatctacaatatgatacgtcagaaccttgtgttaaaaccatatcttagtcttgaaaaagaacgcaagaaacaggtcatggctgtaaatggttccataacacactatctcagtaagagatggggacttgaaagcaaggatagacgtacagacacacatcacgcacaggatgcagttgtcatcgcctgtacaactgatggaatgataaataaaatatcgcgatattccaagggacgagagctactttattcaagaggctttaagtttgtagatgaagaaacaggggaaatactttcgcgcgataattttacccgtgaggagtgggacgagaagtacggggtgaaaatccctataccgtgggaacatttcagggatgagcttgatatccgtatgtcaaggtacaacggaacaggtgatgactcaatcgacaaaacaacgccgagggattttattttgtcacacagggatgcgcacaaatggataaattaccctgagtggatgtttgtcgaaggaagaccgggacgtagaggagtgctcgacggaatttttgtttccagaatgccgaagcataaagtgagtggtcaggcacatgaggagacggttcgctcggcgaagtattataatgatggtggcagtgtatttgagagtggtggatatgtagttaccaaaaaatcaattcaggacatcaagctaaaagacggggagataaaggagttcttcaatccggacagcgacagattactttataacgctttggttgacagacttaataaatttgaaaacgatccaaagaaggctttcgcggagccattctataagccaaaggcggatggcactcagggacctatcgtcaaaaaaatcaaggtgttcgagaagcagtcatcaggagtgtttgtcagagatggaaagggtatagcagcaaacggtgcaatggttagaattgatgtattctgtgaagaagataagggcaaaaagaagtactattttgtaccgatctatacagcggatgttgtaaagaaaaaactgcctgaccgtgctgcaacagccaacaagcttatatctgaatggcgtgtgatgaaggaagaaaattttatttttagtctgtattcaagggacttgatttatattgagagtgataagggagtacaggttaaagatatagatggtaaaatcagtaaaccagttaatttatttgcatattatttgggagcagatacatctacagcgagcatttcgggtaaattgcatgatagtagtgctaattttagaagcattggtattcaggggctgaggcgatttgataaatgtcaggtagatgtattgggaaatatttcatttgtgaataaggaaaaacgtatgccgtttaattaaattaaggagaagtgtatgggataccgcaacataaaaatagatagttctataggattacatataaaaaatgaacaattagttataggcgataagaatatcagttttcctttagaagatattaattgtgtcattatagaaaatcaatctgttacggtatccacatatatgcttcaagagtttgcaaaatatggaatcgcattatatgtatgcgatgagaaacatttacctaatgctgtgcttctgcctatggtaaagcatagcaggcattttagaatgcttaccaaacagattgaggtgggaaagcctcttattaagcggctgtggcagcaggttattgtttttaaaataagaaatcaggcattgtgtcttaaagagcttggacttgatgggcatgaaaaacttctttcaatgacaaaagaagtgcagtcgggtgacaagacacatgttgaggcgaaagctgcggcatattattttcgtgttttatatggtgaaaactttaccagatcagatgaaagtattgtaaattcggcgatgaattatgcttatgcgataatcagaggtctgattgcaaggtcaatcgtgtgctatggtctggagccttcattggggatgttccatcacagcgaattaaacagttataatctggcagatgatatgattgaagtattcagaccactggttgatttgtacgtggcaagtcattttgatatttcagaggttgatgcggatttaacccctcagataaaaagagatttgtttaatattattaactatgatatgtcggtgaaaggagagaaacgcattatcagcaactgtattgagatgcttgtgtacagctatagtggagccattcagggaaacagaacagatttggaacttcccgaattgataccgttgcaggtgcatagctatgaataaatttatgagattgttggtgttttttgatttacctgttgttaaggacagagatagaaaagttgctgctaaatttcgcagatttcttctgaaagatggatatgttatggttcagtggtcagtatattcgagactttgcaatggtacggattctatcgagactcataagcaaagattaaagcagaatttaccgcataaggggtctgtgcgttgccttgtattgacggaaaaacaatattcgtccatagatattcttttaggaacgtctacatttcatgatatggatgaatcatctgatttaataaatattttttgaaaaaagagtattatgcaatgtgaaaattaggattaacaattattttttacatgaaaaatccccgtgaacatatataaacacggggatttttcgttccctattatatcataccaagcgataaccgggaacaacaacatatgaggaattagaggaacagggcagactattatatcataccaagcgataaccgggaacaacacgacaagagacccttttgtgaaagattagtttacatttttgttgtaaatcttttttttttgtattagaataaaatagatgtaaaaatatagtaaagaagaatataagaaaacaagaaatgaggacgttttgttatggatgctgtatcagtaacgctgttgtgccttgggctgtttagcggaattgcacttttcctgtatggaatgagtgtgatgggtgacggtcttaagaaggttgcgggaaataagcttgagacgcttttgtacgggttgacaagcacaccgattaagggaattttgctgggtgcaggtgttacggctattattcagtcatcatcggctacttcggttatggtagtcggcttcgttaattcgggtatgatgaaggttatacagggaattggtattattatgggtgccaatatcggaacaagtataaccggatggattttgtgtctttcggatattcagggagcgggtggtatagcagctcttttgtcatcgtcgagtatagcggcaattgtagctataattggtctgcttgtgagaaatctttcaaagaaggagtctcataaggcagtcggtgatatcatgtttggatttacgatacttatgataggtatgtcaaccatgaaggaggcgatgtctccgcttcagaacaatcctttttttatgggaatgcttacgaagttttccaatccgtttcttggtattcttttaggtatagttatcacggcagtgcttcagagcgcatcggcatccataggtattctacagtcggttgcaatgtcgggatttctgcctttttcggcggcactgcctatagtcatgggtattggtgtcggggcggcatgtccggttctcatgagtggtatgagttctaacaagaacggtaagagaacagcacttgtgtatctttttaatgatttgttcggaatgattatatgcggaactcttttttacacaattcaggcgattgtgacaagaggaggtcagttcgcatttatggatgttgagatgaattctgtctcaatagcccttctcaatactgtatatcgagttgtcacaatcgtgatactcgcaccgttcatcaagcagattaataagcttatgttctggcttgtaaaggacaccgaggatgaggttgaggatcaggcagactttgacctgcttgaggagcgtttcttaagaaaccctgaacttgcacttactcaggtaggtgttgtaatgaacggaatggcaagaaaggcacaaaagaatgtcatgagggcatttgaccttatggatgattattctgttgagaagtacaatatcattcaggaaaaagagacaatcatcgataaatatgaggacaagcttgacacatatatgatgaagattacggctgtgggacttaacaagagccagacagtgcagaactccaagtatctccatacagtcagtgattttgaacgtattgctgatcacgcctgcggtatatcgagggcagccaaggaaatcgtggagaaaaagattaagttttccgatgatgcgcggcgggagcttgcaattctgtacagtgctgttaaggaagaactggatatgactgttaagtcatttactgaggatgatatagatatggcaagacaggtggagccgcttagaatcacagtgagaatgttatgtgcagagcttaagcgaaaccacattactcgtcttcagagcggtaactgtgatgcaatcaatggatttgtttttaatgatcttttgacgaatctggagagaattgttgcgcattgctccaacgtagccgttgccatgatggagtttgaatcggatgatttcaacacccaccagtatctgaaggagctcagagattcagaggattccggtattgtaaaggatgtcaactattattctgaaaagtattcggtggataagaaataaaatatatttgatggaggagtggaatgatgaagagagtaaaaataacgtataatgcaccggtgacacttacttttgtactattatgctttttggcgactttgctcaattacataactcagggcggaagtaacgtgcttttgtttatgacataccattcttcacttgccaacccgcttacctatctgcggttttttactcatgtgttaggacatagcggatggtcacattttataggaaacgcctcgtatctgttgctgcttggcccgatgcttgaggaaaagcatggcggaaaagagataatagaagtgatgttattgacggcattcgttacaggtgttatcaactatattttctttccttatgttgcactttgcggagcaagcggagtggtattctcgtttattctcatgacttcgttcacaggctttagagatggagagataccgataagttttattcttgtagcggttatatttatagggcagcagatttacggtggtatagtgtatgacaacaatatttcatacatggctcacattaccggtggtgtcgtaggttcggtaacaggttatatgcttaataaacaaaaataaaagttccccatctgcaggttgtgcctgtgagatgggggtcttttgtaatgttctattattcgtttcggttgcggttaagtcgtgtgaactcacgggcgattaacagaatggattcattgtattcgagcggaagagatgacatcatggatacaacgtctttttgcatgtcatttgagttgtcgtgaccgaacactatggtgtcgagtgagacatgcagacctcttgacagcttgatcagggtatccacagacattgatttgcgtccgttctcgatttctgataagaatgtgacagatatgccggtcttttcggcgagctcctgctgcgtcatgttaagggaacgcctgagctggtaaatcttgttacctatgatacggttggtatcatgggaagtacagttcatataattcctcctatgctatttatttgttaaaaccttgtttaactataagtacaaaataccaaaaaatggcaatttattaaattaacaatagtttataatttgttaaacaaagacgctttgacagttattttataaaatgttacaatgagcaaaactgaaatatatgaatattataggagtgtgagacagttgggcatagtgatggaggatattttaggcttcaatttttttcaatacggaagcccgtatacaggagaatgcggaggaatgcattttaggatggagagaagcccgctggaaaatgtggtgtttaatcatgatcctcacaagaatgatgaggctttgtttgcggttacggtgtggaggggaccgttcaattatgataccacccgtcagaaaaagattacggcacagtttccttttacggaggaggggagaattcaggctgtgcagtggttgaatgaacgatataatgagaaggttgattactgggcagaggggataccactgttcccgagatacaccaccgatgaagacgaagtcgatgaaaatatctcagatgggaacgcggatgagcagatggagggctagcctgcagtgatgccggataggaagtctgtgacagcatcggagagagggagagcttcgcttacacagtaacttacctctcttttttttatgtataaatcaggtggggttacttccataagagcacctgtttcaagttcgtttttgacaaattcgcgtataacacagcctattccaagccctgtcttggcaaactcaataagaaggtccatactgccgatttccattagagttatctgtgcgagaggaagttcgtttatgtaggtgtcgacataggttcttgtcacgttgtccttggtgagcagcatgagattggcaccttgaaaaagattgctcatgtccgtgtgctccctgagaagaagattctttatgtacgccggggaagcgacaaaggtatcctgaattgaaccggcgctatacagcttaagtcctttggtagagtcaggtgtggctataagtcctatgtctatatcgtggttgtcgataagggctttggtatgcagggatgactgacaatttattgatatgctcacatgagggttcttgcggacgtatttttgaagccttggaagaagaatatatttacacagggtgttgcttgcaccgaagcggatgcgtccgacaccaagcagctttcttgagcttaacagcatttcgcctgcgttaatctcgttgaaggcagcgagaatgtgattatagagaagatcaccttcttccgtgagctttacacctctcgaacttcgatagaacagtgttgtgtcgagttcgttttcaagctgacggatggctttactgacggccggctgactgatgaagagcttttttgatgcctctgagagattgcctgactgtgcaaccatgataaaaatattgtatagattgagtgaggcgtgatttatattgttcactatattatattctccatttcgattcatacaaacataataacttgtagttataatacatataaataatatgtattttaagaatagcaaaaaatgtgctatgatgcaagtaataacttgataatcttattgctctatatgattattaaagaaaaacagtgaaatgaggaattattatgggtatgactatgacacagaagattctggctgcacatgccggtcttccttatgttgaggcaggacagcttattgaggctgaccttgatttggttcttggaaacgatataacatcacctgttgccattcatgagatggataagatgaaggtcaatggcgtatttgataaggataagattgcgcttgttcctgatcattttgtaccgaataaggatattaagtcggcagagcattgcaagtgtgtgagagaatttgcaaagagaaatgacattaccaactatttcgaggttggacagatgggaattgagcatgcacttcttcctgagaaaggactcaccgttgcgggcgacgttgtaatcggtgccgattcacatacctgtacttacggagcacttggagcattctcaaccggtgtcggctctacggatatggcagcgggaatggctacaggcaaggcttggtttaaggtaccttcagcgattaagttcgtgcttacaggcaagccttctaagtgggtgagcggcaaggatgtaattcttcacattataggaatgattggtgttgacggtgcactttacaagtcaatggagttcgttggtgacggaataaagagtctttcaatggatgacagatttacaattgccaacatggctattgaagcaggtggaaagaatggaattttccctgtagatgatattgcagaggcatatattaaggaacattcgaacaaaaaatacacgatatatgaggctgatgaggatgccgtatatgatgagacatacactatagaccttagcacacttaagcctacagttgcatttcctcatcttcctgagaatacgcacacggttgatgaagcaggagatatcaaaattgatcaggttgtaatcggctcatgtactaacggaagacttgacgatcttcgtattgcagcagaggttcttgaagggagaaaggttgcaaagggactcagagtcatcgtaattccggcaacacaggcaatttatcttcaggcgatggaggaaggtcttttaaagacatttatcgaagcgggagctgttgtgagtacgcctacatgcgggccttgccttggaggatacatgggtattcttgctgagggcgagagatgtgtctcgacgactaaccgtaacttcgtaggacgtatgggacatgtaaagtcggagttatatcttgcaagcccggcagtggctgctgcaagtgccgtgacaggaaaaataagtgaacctgcagaacttggtctgtagatgaatggaggattaatatgaaagcatcaggaagagtgttcaaatttggagataatgtagatacggatgttatcattccggcaagatatctcaattcatccgaccctgcagagcttgcaacacactgcatggaggatatagacaaggattttgtaaagaaggtaaaaaagggagacataatcgttgccgacaagaacttcggctgtggctcatcaagagagcatgctccgattgccatcaaggctgccggtgtgagctgtgttatagcggagacatttgcgagaattttctaccgcaatgcaatcaatataggtctgccaatcatcgagtgtgctgaggctagcagggatattgaggatggtgatgaggttgagattgattttgacagcggtgtcataactaatgtgaccaagaataagcagtacaagggacaggcatttcctgagttcatgcagaagctcattgccgccggcggtcttatcaattacattaacaataagtagagacataatcacgaaagcgttttgacagctttactgaattgtagagcttggcgtattcgatggcagatatatcttcgagatagttttcagggtatgcttttgtgcagcccttgtcatgaagcattgcgacagccttgttgtaggctatcgcagcttcgttctcagagctgtatcttcctattatatagttgccattgatgtggatgcgggaacggtagcttacgcggccgttcttttttattgcctcgacaccgtggtagcggttgattattcttatattgtcatagcggtaatcgctgtcgtcaccgttaataaattcatagtcacggcctttgaccgcatggcttcttattccgtatctggataatatattgacctgcatgccgtaatccgccacaaacaggtatccctgccgctttattattgtgtggtttgaatagtaaaagaggtcatcgacattgaatttgagtgcctcattctcggaaagaaaatacataaaataattcttcatcatatatattggtgtctttatatagattcctttatcacgaaaattgagcagtatgacatatttatcgaagctcaggacacggcagtgtgagtggtagtcctctgacgtacactcacagttacatgagccggttatggcaagagcctcggtgtaggcgaggttagcttccgcctcggttggaaagctgccgagacttatatgcttgtttttgtatgtaaatgacgagcggtaatatatggtgccatcttttttctgagccttgaatgcgccgggtaatgccatggttttctccgtttcttcctagttaaagattccgatatcaattatagcctcagaagcctgctcttgcaatgtaaaagaacctgaaaatgtaagaaaatgtaagaatttacattttgcatgcagcatgctccattttgaacctgaattcgtggcaattatcccacttaaatacttaaaaaatccaaaaaataagctgttttcccccactttttgaaaataaattcggagaaaagacggtaataataaattcgccgttttaccataaaaaaatatcaataggcaaaagttacaaaaaatatgaataaaaacacaaaaattagggcataattccgaataaaattgttacaaaattgttacaaaagacgtttttcacaaaaaacggagttttgattgacaaaaatgaaatcgtaaatataattgcaacaagaacgaaaaaacatttatttgaatgagaggtttttaagatgaagaatattttttcgctctttaatggtgttttttgtttctttaaaaccattaccaagagtatgtacagaagatgtgccattattgcttcaggttctgcggtaattgcggttgtgtgtcttaactcgacatgctatggcggaggtggaaagaacaatgtcgtttcatcatatacgggaaccggacaggttgcggaggatgaagaaacggacgatgacactgatgaagagacaacagtattcacatcactgatcaattcagacatgacattggaaaacgaaaattatgccagaccgctgcttgacatgagtttagaggataatatttcgaaataccgttgtgtctatgttgatgtgaatgaaatgcggatggcagaagaagcacttgtgagtgcggattatatcaatccgattattacaatcacggacgaggaatacaataaccttgttcgaattgttgaggcggaggcaacgggacttgacattaaggcgaagattcttgttgcgaatgtagttatcaacagagtattttcaaatgattttcctaacaatgtaacagatgttatttttcaggagaacggagcacagtttcagccggttatggacggaagatactattcggtatcgcttacggacacttcttatgaagcggttgacagagcacttgtcggagaggattattctgagggagcacttttctttgcggctacggcatcagcaggtgacggaagctggtttgcaactcacctaagaagactctttgagtataatggacatgtattctttggatattattaaggaattaaggaaatactgaagaatttacttgtttaatgaaataaagtgtgataaaatgggcgataagtattaagcttatcgcctttttattgcgttttacgacgcagggtgttactgaaaataacaaaaatgatcttgtggaggatgctatggaatt

SEQ ID NO: 3870 - DNA, 23507 bp, synthetic construct
  misc_feature 1..23507: note = Synthetic
  source 1..23507: mol_type = other DNA
gagctgagcttcccggaaggatatataaccttagcagggtaagccttaattcttatctggataagctgtcagccgacggctatatcgctgttaacaggacagcgggactggatatggtgtatttacaggataagatatctccggataaggtaattgagaaatactatgaggataagtataagacgcagaggggatagagatgacaattgagcttaaagatttggttaaaatagataaaagattcgagaattcggttaatctctatcttgaccttgataacagagagaaaatagacaactatgtgtatacgcgctcatcgcagagaattattgattactatattgacaatgtaaataaggacagggagcatgccaccatgcttataggaccttacggcaagggtaaatcgcatacactgctggtgcttctggataagctgagacatagggaaagaccgtatcttccaattattatatcgggcactaattccgacctcaatcaggcatttcttgtcgggataaccgacgcattgaagcgggcagggcttgatagcattacaccggacagctattacagcgaggcagtcaagaagatagagcagtggaaggacagctttccggatgcgtacagtcattttgcgggagagcttcaaaaaaacggatgtaatgtgaaaacattgcagcttggtcttgagaagaaccaaaaagaggctcttgatttatttcgcaggatatatcctatagtaaccaacggaagtgaatttaatcctattattgtgcttgagactgtgagaatatacgagcagattaaggatacactggcacgcgattatgggtatgcaggaatatatgtcatattcgatgagttcagcaaatacatagagggtcacgaagcggatacattttccaaggacatgaaggtgcttcaggatatgtgtgagctgtcagagagaagctctgaggggcagatgtttataacctttgttgcacataagagcattaaggagtacggcgctaagctcccggtggacatgagaaatgcattccgcggtgtggagggcaggataaaagaggttctgtttgtcgtctcctcccagaataactatgagcttattggaaatgtgttaaaaaaggatgaagccgcattgcgtgagcttcctaagatagggagatactatgaaaatgctcttaattcttatcgattttcatgtttttcagggctgtttgatgaagctgattttaaaaaatatgtggttgagggctgctttcctctcatgccgtttactgcgtatatgctgcttcatataagcgagaaggtggctcagaacgagaggagcatattcacctatctttcgcatgacgaaaagggaagcgtgtgcagaataattgaggattatggcgaagatattgcagactgcggaataactgcggatacagtctacgattattttaaaaatcttttcagggaggaagcctcggatacggttattcacaatgaatggcttaaagctgagtatgcactttcacgtacagtggataagctggagaaaaagcttataaaggttatcgccctgataaatattatagatatcccggatgagctgacggcggatgtgccacagctatcatgtgcgcttaatatttcggaggatgagtgcaggacagtggtggagcgtctggtggaaaagagaattattatataccgttcgcgcagacattcgtacagcttttacaataatgtcggtgttgacatacagaaggagatttcactgaaggcagcgaaattgccggcagattcggatatactcggaaccttgaaggagatttcagagtacgattatgtgcttcctaagaaatataatcaggtatattcgatgaccagatattatgagtatgtatttatgtcaccggagcagatagaaaagcttccgtcaccggagattctgtttgaacagcacttttccgacggaaaaatagtggctgtggtgagcgataacagtacagattatagcaaagagctgtctgagcggcttaaggatgacagaatagttgtgcttgtgacaaaagtagcttttgataagggcggaagcataagaaaatacattgctgcgaagagtcttatgagtgacaggtcattcatagaggacaatattgtgctggagcaggagcttgtaaactactgcgatgacatttcatacgaggtgaataagtttcttaaggaagcgtacaaccccgaaagcggtgcctgtgcggtataccacaacggtgaagcattccggtcgggttttaggaacggcttctccttcaatatgtttttgagcagcataatgacggagtattataataatgcaccggttgtaaataacgagctgattaatagacagaacatatcggctcagaacaagaaggcgcgaaataagattgtagatatgctgctaagttctgaggattgttcgtcatttgagaagggaacctcacctgaggcaaccatatacagggcggttcttgtaaatacaggtattctcggcaatggcggtgaggacaggggctgtgcatatgtcctgtcggagattgagcggttcatagctatgtgcgattcaaataaatgctccttcaagctgctgtatgaccgtctgatgggcagcggatatggtgtgcgaaagggaattattcctatttatgtggcattatgcctgtccaggcttcaggataaaccgattgtaagcttcaaagaaaaagaggtaaatatagacgctgttattcttggaaatatcaacgattcgccatcggactattatctgtatgttgagcatgagagcatagaaaaacagaattacattgcggggcttatgaaattattcggagtttcagccagagctgcgggggttgcaggtgacagagaagttttagatggaatcctgagatggtacagggcgcttccgcaggtggcagcgaacataggtcgcgttgtcgatgtgagtgagaacatggcagcggcgttaaagcggctgtgtatggcgctgaggcatcaggagtataacccgcatgagttcctttttaaggagcttgtcgatatagcaggcagaattggcgacagtgaaaaatactccgcagatggagctgtggtaaagagttccttgacagaatctccggtgactaatacttcgccggaagcaggttcattagccggtgtactgcataatataacacttttaaaggcatatcttgatagttatcttctgaagctttcaggtaatgtcgcggcaattgtaaaaaaacgctgtaaggcagacgatggtgacagccttaagtcggtgcttgaggagcattattccgagcacggaaagagacttgaaaagctggtgactaagagccggacatcggcaatattgtcatatatatcggatatacctacctatgacgaaggagagattgtgtcgaagctgtcgaagcttgtcacggatatatacattgatgactggcgtgacggaatgctggagaagttcagagccggctgggatgaattctgtgatgaggctgagaacaccgtaaacagcgagagcgcacttaacagcattattctaaagggagaaggcggaagcctgcttgaaagaagctatgctgatgtggaggatgacagcacagggtattttcttaaaaatgcgataaaggatgcactggatgaattcggcgacagtctggagactaatgcgaaagtagcagtgcttgcgcaggttcttgctgagcttgtggcaggggagagcagataattgcagtaaggatatatgaaacagaactaagagaaaaataaaaatgaggattacttatgagcatgatttattttgacaatgcagctaccacatacccgaaaccggaatgtgtgtacgaacagatggataaggtcaatcgcagcctgtcattcaatgccgggcgtggttcctatgctctggcgcagcagtctgcccagataatcgataatctcagaaaagaattactccgcattgtgaatgcgtcagatgtagcagaggtcgtactgtcggcctctgctacatttgcattgaatcagataataggcggcttggaaataaaaaaagaagattacatatatatatcgccgtacgagcacaatgcagtggtgaggacactctataaccagatggtgtttagagatgataacaagatggctgacagtgaagcgggtagaattaaaaagcatattattgtgatgccgtttaaagatgacggcaacattgatatagatagacttaagtatgagttcagcgtccatgccccggcatttgtatttatgacacatgtgagcaatgtcacgggctgcatactgccggtagaacagattgctgcagcggctaaggaatatggcgcgatagtggttgtcgatggctcgcaggcgcttgggcttgtgccgtttgacatgtcgcagtctcctgttgatttctacgtctttgcgggacataagacaccgtatggtccattcggaataggcggattttttatcagaaacggtgtgaggcttgatacatttatcgcaggaggaaccggaagcgattcactcaatgtccacatgcctgaagccggcagcagccgatacgagccggcaagcccgaatatcattgcggcagcagggcttctggcagcaataaaggatgtcgatggtgaggagataaaaaggcggctagacaaggaaatgtcgctcacgcgctacatggttgataaattacgccggctatacaatgtgaagctatatctgcccccggcggacaggcatgtcggaatagtggcattgaatataaaaggttatcagtcatcagatgtcggaatgattcttgatgccgattatgacatcgctgtgcgcacaggctaccactgtgcaccgctcatacatgaatatcttgacgacaaggaataccttggagttgtcagggtgagtatgagcatgtttacaacaacggatgaggttgacgcgctttgcggggcgttgggggagatttaggaggaagaaatatgattgcaaaagaagcatcaataaaagatgtggtggagacagagccacatagattggaagttcctttttttcagagaagatatgtatgggaagaagaaaactgggaggaaatgctgcaggcgattgaaaattttgacgaggaaagaccgttctggggctcaataataataaaaaaagctggaaaggacaaaagcaggaaatttggaagagcatatattattgatggtcagcagagattgacaactatagctattctgacaaaggcaatatatgactcggcaaataagcaggagagggaaaaaaggtttagaagaattgtcgattgtgatttgctttttaatccatatgcgtccgcagcacctgatgaatacgagattataattgaacattcaagggctgacagaaaagattttgaatatatcatcaaaacgggtattttcaatgacgaggaactacatattgataccagccaggtaaatatggataagcatacaggaagcgcaattcttagatgctatctgtattacatggaaattatgaaatcgaaatcgcagaaggatttagagcttcttatgaacaatctgtacaatgatgagaaggtatttgttctgattactttagatgatgatgatattaacgaacagataatattcgactcgattaacagggcgggacagaagcttacgacatcggacatcattaaaaataatatatttaaaaagctgatgtcccatacggaaaataatcaaattgttgaaaaaaattgtgatatttattgggacaatattttttgggaagatgagttctggtacaccagccgtcagtttggaaataccgagaggtcacatatcgattttttattatattgtgtggcatgtaatttatggtcagatgatgttctgcttgaaaagggtatcaactgctcacttgaaaaggtatatgaggaaaatacaagtgagtatgggtatgatgagatatttaatgtcataagaaaaatagctgagtttgccattatatataaaaaatatatttataatttttctcagaatttggagaatgagacattcagtaaaaatgataatctgaaaagacttttattgattatggataaatttaaaattcaaatgttttatcctgtcgtactaaagctgctttcagaaaatgtggttcattgtgatttaaagaaaaaagaggtggaaagtgacttaaacagtggtaaatgtactacaggcgcacattgccttgagacctatatagtccgccataaaattacaggttcgagtacttcacagtattcaaaaaaatgtctggatgtaatcagaaacggtttttctgttctctattcagacgctaaatcaaataaagtgcagattattaacgatgaaaatgacaggataagggaggagcttgagcaccctaaaaccgatgtcgcaaagatgcttctattttgtctcgagcttgaaaaatgggatgaaaaggatgatataagttcattttcatacaattttgaattggaacatattatgccgaaacagtgggaacagtattgggctttgacgaggggaaattcatctcctgatgaaagaaatgcagcgattaacagcatagggaatatgcttttgctgagccaggggttgaacaagcacatcaaaaacagggaatttcgtataaaggtagaaggtgaaataaaaggaaagaagaaactggagggttataaggataagacacagttaaagactacaaaagaaataatagatgcgtacaataatggaaaaatagattggactgagacagatatacataacaggacgcatgaaatatatgaggctgtaattttacattggaatatagaataaagggagaggaggcagaaaaaatgggcaatgtcgatgaaaaactggtcaaatcagtcatgtttgaaatccttcatcttgagcggaagaacctgagaactaaggcactcactgaccagaagatgtcggaggagatagggaagattatcagcgaaaatctgaaactaagcaaatagcggggaggagaaggtacgaatgaagtttaagacacttaaaatgaagaattttatgcgttacaagggtgtgaatgagattgatttcagctgcgacgaggagcacaatgttacggtggtattgggggataacaccgtcggcaagacgacgatagcgcaggcattccgctggtgtctgtatggggcgattatgaccgagcgtggaaagaaggagagcgattatcagctgcttaataacgatgtcctcgcaaagctcgatgcgaacaggacagctacggtgttcgttgagataacggcgacggacaatgaacatctgtataccgttcacagggagattgagtacatgagagtgtacccgaaatttctcgcgaaggagtcctacaagattttgaaaatgtatatcgccgatgtggacagccctgacataaagcgcgaggttgagccaggtgtaaatcatgtcaaaatcgacgaatttataaacgagctttttcctaaaaatctgtcgcattattttctctttgacggtgagcgatggggcgattttgcactgaacggagttcgcgaaaatatcaaggagtcagtgcatattttaacgggtctgtccgcgtacaaatcggcaatgatgcaccttaaggatatgggagacaactctgtaattaaaaaattcaggaaaaatattcagggcaaaggaaacatatatgacggctatgagcgtgacaagacaagattggagcgggatattgagagatgtcagaagcagatagaaagcctggacgcgacaatcagcctttgtaataaaaagtgtgaggagattgagctgtatctggaggcgaacaaggacacggaacagcttcagcaggcatataggcagtgccagagcgtgattagggcgcagagtgaaagatatctcgcaaattacaggacgtttgtgctcgagtataacgcaaatgcgtacagaatgtttgcaaagccacttatcgaggcttcgttaaggttggtaaaatcgatagcgggcgagaggcgtgacataccgcatatgaggcaggcgagcattgatttcataataaggagcgggcggtgcatatgcggaaccccgataacgaaggactcctatgcactcgaatgtctgcttgaacagagaaattacctcccgcctgccgacatgggttctcttctaggggaatttgagaaaaccgccaaccgctggaacaggggcgaagatgatttgtccgaggacgcggcaaaggttgacgacagtgtcagggactatgaggaaaactgtatccagcttcagaagattgaacagaaaatgagccggaatattaatttttccgaaaagagggctgagctcaagcgctacaggaatgaggcgaacagcgctgcgctgaaaaaaggtgagctaaagagcgccatagcatcaaatcagagcagaattcagagcattgaaatccaaatgagaaatcaggaggctaaaaatgccgagaatgaaaagtggcggagaaagattgaacttgcggaagctgtgtacgacaaaatcagtgctgacttttccgagcgggagaagaaaatttttaatgactttaacaatgaaatacaagaaaatttttcaaagatgtttaacgcaaaggacaagaaaataaagcttaccgaaaattatgagatacagatgtgctacaagactgacataggaggctacagggaggagaaaaatctgtccgagggagagaaggttgccagaaattttgcattcattgtcacgataatggactacagccgccgtaagaagctggagtacaacagcggcaatgcagatatggacaatgacggaaaagacacgctccctatcgttcttgacggaccattctcaaagcttggcgaggagaatatttcactcgtggcgaatgtgcttccgcaggtttcggagcaggtgattgtgttcatgctgcgaaaggactgggcgtacacggggctggacaaatatgtcggggcagagtattcgattgacaagaagcccgatgagagcttcgcatcgataagaaaggtggacagggcatagtggcggattttgaattttttaaaaagcagtttgagtttgtaggtaaacatgctcgtatggttagtgaactttgcgtttccaatgattatgaacatacatatttcaagagatatatagatgtatatatttttgctgccataataggcataaggattgacagaaaggcttcgcgggattattcacctgttgagactaagagtattttgccggagcagatgataaatgccaaggaggacttggatttcataatgcagatgatggtgatgcttgacccggcttccggtgcgacggacgaggacagggtgcgcgaggcattcaggggggctcagacaaaggaagagtatgacagacttatgggaaccttcaacgactatgtgagaggaggcgtagaggaactctatgagaggcttgttgtacgcaagcccgactccgaggacagattctacgacgaaaagacggctaacctgatggcactctatgacaggtttgcgcctaaggaggagtgaaaatattatcatatacaaatatagttgatttctaataaaaaatagacaaatttacaaaagaagtctttacttttctaaatagatgagatataataaaagcacgttatatcataccaagcgataaacggttacaacaataaggtcgccgcctttggtggtgtacctcaaagctctaatcccatctaaagtgaatactttaggtgggattatctattttacgcggaaggtgaacaagaataattattaaagcgaatcaaataattatatccaatcccttattagaaacattatatatcatatgttatatatcgcttgggtaatagtatttttataacggcatatgagagaatatttgtttgataaataaggttttggaagaaaggaatatttatgggggaaatgatgcatttaaacagaaaagcagaggtacctaagccgacagatttgaattacagaatagggcttgatataggtatcgcgtcggttgggtgggctgtgcttgagaacaatacccatgacgagccgttcaggattattgatttgggagtgaggatttttgatacggcggagcagcctaagacgggggcgtcgcttgcactgccaaggcgtgaggcgcgttcagccagaaggagactcagaagacgcgggcacagattagagcgaatcaagaagctttttgaggtggaaggacttatcaacattgaggagtttgaggcacgctacaagaaaacagggctgccggacgtgtataagctaagatatgagggacttgacaagaggcttaccaatgatgagctggcacaggttttgctgcatattgctaagcatagaggatttaagtcgacgagcaaggcggcggacggagccgattcggatactggggaggttaaaaagagtataagtgctaacaaggcccttatgcaggagaagggataccgtacggtcggtgagatgatttatcttgatgaaaaattccgcactgattgtccttggaatgaaaacggatacatactcacaccacgcaataagtcgggtgattacaagcacacagttcttagagatatgcttgccgatgaggtgatgaagatatttaaggcgcagagagcgttgggaaatgatactgccacagaaaagcttgaaagggcatatcttgacattatgctcagtcagcgttcgtttgacttgggaccgggcgctccgagcaagtacgccatggagggctttgaggacagggtcgggttgtgtaccttcgagggtaagaatggagaaaagcgtgctccaaaagctgcttatacctctgagttttttgtggcgcttgagaagataaaccatacgaaaatagtgtctgccgatgggagtacaagattttttacgagcgatgagcgccatgccattatagctcttttgcacaggcagcagacggtaaaatacaccgctgtgcgtaagacgattggtttagaggaggaggataagttctataatcttaattacagtccgaaatcgggaagcaaaaaatctcctgaagatacagatttcgtgaaaatggagaactatcacaagatacgcaaggctcttagggaagaggttgcatcggaacatttgtcaccggataagataaagctgtatgatgacatagctaggatacttacattgtacaagaacgatgacagcagaataaggcgtttggctgaacatgatatcgcttcggaatgttatgatgcattgctggaaatgtcaccgagtaaatttcataatctatcactcaaggccatgggaaaaattatcccgttcctgcttcagggaaatacttacgataaggcttgtgaacttgcagggtatgatttcaggactgagaataacggcgaaaagtcgattttgttaaaaggtaaaaatatcaccaacattgtaaatgatatcacgaaccctgttgtcagacgctcggtatcgcagaccatcaaggtcataaatgcgattatactcgagtacggcagtccgcaggctgtgaacattgagcttgcgagggagatgtcaaaggatttcgatgagagaagaaaaatcaagtccgacatggaggcgagagagaaggaaaatgacaaggttttaagtcgtgtcagggaatacaagtcaaatccgaccgggcaggatatagtaaagttccgtctttgggaggagcagggaggaatgtgtctttattcgggagaaaagattgatataaatgaccttttctcatcgaatggagggtatgatgttgaccatatattgccgtacagcattacttttgatgattcatatcgcaacaaggtgcttgtgaaggccttggaaaacaggcagaagggcaacaggacaccttatgagtatttcatggttggaaaagacgagccggcgtggaacgaatatgaggccttggtcaaaaataccattaaggattataaaaaacagcttaagctcctaaaaaagcatatatctgacgaggagaaagcagagtttaaggagcgtaacctcacagacacaaaatacataacaagaattatttacaatatgatacgccagaaccttgtgttaaaaccttacctcaatctcgagagggagagaaaaaagcaggttatggctgtaaacggcgctataacgcattatctcagcaagagatggggactcgctggcaaggacagacgcaccgacactcatcacgcacaggacgctgttgtcatagcatgtacaaccgatggaatgattaacaggatatcccgctattcaaagggcagagagttagcttattcgagaggcttcgggttcgtggacgaggagacgggagaaatattaaaccgcgacaatttttcacgcgaggactgggatgagaagttcggcgtaaggcttccgatgccatgggagcatttcgtagacgagctggatattcgtatgtcaagatatagcacaatgggagaaggtgtttcctcgggaacgtcgccgagagaatttattctgtcgcacagagatgtgtttaactggataaattatcctgagtggatgtttgttgagggcagaccgggacgcaggggcgtacttgacggaatatttgtctcgcgaatgccaaatcacaaggtcagcggacaggcacacgaggagactatacggtcggcgaagtattatgaggacggaggaagcgtctttgaaaccggcggttatgtggtgacgaagaaatctattcaggatatcaagctgaaggatggcgaaataaaggagttttttaacccagacagtgacagactgctctacgaggcactggtcgaccgacttaatcagtacggaaatgaccctaaaaaggcttttgcagagccgttccataagccaaagtcggatggaactccgggacctgtggtcaagaaaattaaggtgtttgaaaagcagacatcaggagtgcttgtaagagagggaaatgggatagcagccaatggctccatggtcagaattgatgtgttctgcgaggaaaacaagggtaagaaaaaatactattttgtcccgatttacacggctgatgtggtgaagaaaaggttgcctaatagggcggcgacacaggcaaaaatgccttcagagtggcgtttgatgaatgacgagaattttattttcagcctttattcgagggatttgatttatattgagagtgataagggagtccagacgaaggatattgacaatgtgacgggcaaagtggaaaaaatgtatgcttattacactggagctgatacaagtactgcgagcattgcgggaaaattacatgatagtagtgccatgtttagggggcttggtattcagagtttgagaaagttacaaaaatgtcagatagatgtattaggaaatatctcatttgtaagtaaagaaaaaagaatgacattcaattagttttcgggaggtatatatgggatatcgtaacataaagattgacagttctgtaggtctgcatatcaaaaacgagcagttggtgataggtgaaaagggcgtcagttttccgctggaggatattaactgcgttctgatagaaaatcaggctgttgcgatatcagcatatatgctttcggagtttgcaaaacagggaattgcattgtatgtctgcgatgaaaaacatcttccaaatgcggttcttcttccgatggtgaagcacagcagacatttcaaactgctcatcaagcagattgaggttggaaagccgttgattaagcggttgtggcagcagattattgtgtgtaagataaaaaatcaggcattgtgtctcaaagagatggggcttgacggatacgaaaagcttctttcgatgacaaaagaagtgcagtcaggggacaaaacgcacgttgaggcaaaggcagcggcgtactattttcgtgttttgtatggcgatgaatttacaagagcagatgagtgtattgtaaattctgcgatgaactacgcatatgcgataataagggggctgattgcaaggtcagttgtgtgttatggtttagagccctcgctcggaatgttccatcacagcgaactgaatggttttaatctggcagatgaccttattgaagtgtttagaccattggttgatttgtatgtggcaagccattttgacatttcggaggttgatgccgatttgacgccgcagataaagagagggttatttaatataattaactatgatatgtcagtgaaaggagagaagcgcattgtcagcaactgtattgacatgcttgtctacagctatagtggggcgatacagggaaacagaacggacctggaactcccggaattgataccgttgcaggtgcatagctatgaataaatttatgagactgatggtattttttgatttgcctgtcgtaaaggacagggacaggaaagcggcagcaaaatttcgcagatttcttttaaaagacggatatattatggttcagtggtctgtatattcaagattatgtaatggcgcggattcaatcgagacgcacaagcagcgcttaaagcaaaatttgcctcaaaaaggagcggttcgctgtctgatattgtctgaaaagcagtattcatctatagacattcttttgggaacatcgaccttccacgatatggacgagtctacggatttgataaatattttttgaaaaaagaatggtttgaggattaaaaatcataaatgtgacttgtttttttgcatgaaaatccccgtgagtataagtaatcacggggatttttcgttccctattatatcataccaagcgataactgggaacaacaactgtatacgatggttgattacactttgcaagattatatcataccaagcgataactgggaacaacaacttctttttcaccgcccacgccacgttctgcattatatcataccaagcgataactgggaacaacaacgctcaacaacataatttcgcttgtattctattatatcataccaagcgataactgggaacaacaacccgttttgaatacattgtgaactacacttaattatatcataccaagcgataactgggaacaacaacattgtccgaggtcactatgaagttgcagacattatatcataccaagcgataactgggaacaacaactgatgagctgaacaaggttgacgaggtcaaattatatcataccaagcgataactgggaacaacaaccgagtttgccacagaaaacgaggattattgattatatcataccaagcgataactgggaacaacaacacgcaaatgcgtcattacaactataaatatattatatcataccaagcgataactgggaacaacaaccgttaccatagcggtagaccctacggttatattatatcataccaagcgataactgggaacaacaacacaccaaggaaaagcaacagcagcagaagattatatcataccaagcgataactgggaacaacaactaatgcacttatatacttgacattctaatattatatcataccaagcgataactgggaacaacaacaatcagctctttagtcttgtccggcaatttattatatcataccaagcgataactgggaacaacaacttttggtgaccatttcatccattttggtttattatatcataccaagcgataactgggaacaacaacggacgacgtaacgggctacgattggataaattatatcataccaagcgataactgggaacaacaacgctcatgagctgcggctacacccgtgccgattatatcataccaagcgataactgggaacaacaaccataatgtcggctttcgtccacttgctcagattatatcataccaagcgataactgggaacaacaacatttgcttgacaatattatgtcaagcttatattatatcataccaagcgataactgggaacaacaaccggacaaggactggctttgactgtattgcattatatcataccaagcgataactgggaacaacaacccgtgtcaatgcggttaaaactgcctatgcattatatcataccaagcgataactgggaacaacaactctgcgtgctgatttggcagatattttaaattatatcataccaagcgataactgggaacaacaacacacggcacccaaaatagaacccacggcagattatatcataccaagcgataactgggaacaacaacactgcttgagtatataaaaggcaaaacaccattatatcataccaagcgataactgggaacaacaacgataccgacacttacagagagcgccgtagaattatatcataccaagcgataactgggaacaacaacttgcaaatcgctaaagcgatactctgccagattatatcataccaagcgataactgggaacaacaacaataaatgctaaagaagaggagaatggtgaattatatcataccaagcgataactgggaacaacaacagcttttgataacaaagtttataatcaaaattatatcataccaagcgataactgggaacaacaactgtgggcttccgcatttggtcaacacacgtattatatcataccaagcgataactgggaacaacaacttatctggcaagcaatacactttttcgccaattatatcataccaagcgataactgggaacaacaactgtgaacctctcacatctaccagttcccaaattatatcataccaagcgataactgggaacaacaacattttctgctcgtctctccgtttcttcctattatatcataccaagcgataactgggaacaacaacaaagccatcagctataccactacctaaatattatatcataccaagcgataactgggaacaacaactttatatcttcgtgatcggctgcgtcatcaattatatcataccaagcgataactgggaacaacaaccactgcgccagcttgaagcgattgcagctgattatatcataccaagcgataactgggaacaacaacaaaagacatgcaaaaaagacattgaaaaacattatatcataccaagcgataactgggaacaacaactgttttacgtcgagagtaatgactgtttaaattatatcataccaagcgataactgggaacaacaacagaagatggtacaaaggaagtacttgacatattatatcataccaagcgataactgggaacaacaacttacattcgcaagtcatacaaaggtggttgattatatcataccaagcgataactgggaacaacaaccgaaaatctttctttatagcgtttactccaattatatcataccaagcgataactgggaacaacaacttatgatatgttgtttattatggcttcaaaattatatcataccaagcgataactgggaacaacaacacaaagctaaagaaatgggagccaccacagattatatcataccaagcgataactgggaacaacaacactcaatccactttatgagaaaacctatatattatatcataccaagcgataactgggaacaacaacaatgctttcatttcttccggtgtcagcgtgattatatcataccaagcgataactgggaacaacaacccagccatcatcccagcgataactccaggaattatatcataccaagcgataactgggaacaacaacttgcatgggaattgcagacgacgcagaaaaattatatcataccaagcgataactgggaacaacaaccgaaaattcattgatgctctcactcggataattatatcataccaagcgataactgggaacaacaactaacagtaatttatataatatacagaacacattatatcataccaagcgataactgggaacaacaacaactcgttctcttgcttgcggtaatccgaattatatcataccaagcgataactgggaacaacaacctgcatcgttggcgttgccccggcattgttattatatcataccaagcgataactgggaacaacaacatcagaaaaaatagcataaaaaatttaaaattatatcataccaagcgataactgggaacaacaactcaggcgagcattaaactctcagcggatgaattatatcataccaagcgataactgggaacaacaacttagtaaaggattttttcacagaatattttattatatcataccaagcgataactgggaacaacaacatacggaagtggcaatataggcgattacatattatatcataccaagcgataactgggaacaacaaccggcgagtacatcgacaaggcaatgactgaattatatcataccaagcgataactgggaacaacaacacctctgatacggctttatcaggttttgcattatatcataccaagcgataactgggaacaacaacaaccgcagcatcttaatataatgtagtcaattatatcataccaagcgataactgggaacaacaacaattgctttcctgtcatcccaacagacacaattatatcataccaagcgataactgggaacaacaaccttctttgcaccaaccgcttcctgaagcctattatatcataccaagcgataactgggaacaacaactgaaccctgatacggtacttgccgtttacaattatatcataccaagcgataactgggaacaacaacaacgctatgcggatgaagtccttaccaacaattatatcataccaagcgataactgggaacaacaacatatctgtcctgtctgtgctgccgtaaataattatatcataccaagcgataactgggaacaacaactgagaaaaacgagggcgagaaaatcgcctaattatatcataccaagcgataactgggaacaacaacttttccaccatgccgttttctttaaacataattatatcataccaagcgataactgggaacaacaacaacaagccacctgctgagggctgttatagtattatatcataccaagcgataactgggaacaacaacccgcattgatgatggcggttctatctgttgattatatcataccaagcgataactgggaacaacaactatcaagcttcttgcttattgcctgcaatattatatcataccaagcgataactgggaacaacaactaaaaagtacaacgaaattatgaacgatatattatatcataccaagcgataactgggaacaacaacagcgtgcgctaaatatcatatagacaacctattatatcataccaagcgataactgggaacaacaactgctcgggctaatgattgggaatggttttcattatatcataccaagcgataactgggaacaacaacaggaacgggcagtaaccgtccttctggcggattatatcataccaagcgataactgggaacaacaaccaaaaagtcaccatacgttacattctccatattatatcataccaagcgataactgggaacaacaacagacttgttttcaaaagctccaacctgtacattatatcataccaagcgataactgggaacaacaaccgttttctttttcgagccgtcagctcgataattatatcataccaagcgataactgggaacaacaactcgctatgcctatggcaaagggtatggatgattatatcataccaagcgataactgggaacaacaacagcagcaattataactattgcaagcgtattattatatcataccaagcgataactgggaacaacaactagcggtgtatatggtaaatcttatgtagtattatatcataccaagcgataactgggaacaacaacaaccctcgataaaatccaaaaagcctgtgcattatatcataccaagcgataactgggaacaacaactcatggtgttctgcaatgcgcaagtgttctattatatcataccaagcgataactgggaacaacaacgacattgagagcaagagactacaaaggtttattatatcataccaagcgataactgggaacaacaacaacaagtgtattgcgacgttaaagccttggattatatcataccaagcgataactgggaacaacaacgtgggtcggtggaatacttatagattttcaattatatcataccaagcgataactgggaacaacaacacatggaaggaagaacaggaatttttcttcattatatcataccaagcgataactgggaacaacaaccggaacgggcgtcacaactattccggagaattatatcataccaagcgataactgggaacaacaaccggcgtgttgctatataaaaactgggacaattatatcataccaagcgataactgggaacaacaactcttccctctgccatgcctgcacctcttaaattatatcataccaagcgataactgggaacaacaacccagcccgaaaagaatttcgaaacatcaaattatatcataccaagtgataactgggaacaacaacactattaaagtcaataatcgtttaatagtattatatcataccaagcgataactgggaacaacaactgcaagggcgaatgattgggaatggttttgattatatcataccaagcgataactgggaacaacaaccaccgccagaaatgacactttcacagtggattatatcataccaagcgataactgggaacaacaacacgtggcagaagaagaagtggaggaatttattatatcataccaagcgataactgggaacaacaacaataggcgatttccttaacacttttgtccgattatatcataccaagcgataactgggaacaacaactgctcgggcgaatgattgggaatggttttcattatatcataccaagcgataactgggaacaacaactgtgtcggtttccacaaagtcaatgtctgattatatcataccaagcgataactgggaacaacaaccctgcgcaagtggcttgtgttcattgtagattatatcataccaagcgataactgggaacaacaacgtgcggcaaggttatcgcacaatggaaggaattatatcataccaagcgataactgggaacaacaacttgcgtcaacgtcctcacacaggatacaatattatatcataccaagcgataactgggaacaacaaccttggcttatattcttgatacaataatgcgattatatcataccaagcgataactgggaacaacaaccaagaacctgttttgctgtcttttcatcgaattatatcataccaagcaattacctcctcccatgcttcggtggactcaagatgagcaatataccacagattgagaagaatactaccaggattggaacaatgtgaagcaccagaaatactgcggcggcaatcaaagcaataagaattaaaataataatcaagataatcatttgtcgggtctccttgaaagtgaaaacagtgattttatgattttttttgattatatatcattgcgctgtgattgtgaacaataattttgcaaaaatataacaattaagctgatattgaagttttggaaaattggaattattattcaaatagactatccaagaaaaatatacaagaaaactatttaataattgaatcctgccattgactaagcaaaaatatcttcctacaattaaatagagaaaattggaggaatgccagaggataaaaacaacataacatcataaggatagaagaaagacaagctgattagaaatattgatgtagctgctgtatattatgcgaaattggaagctaaccttaaaaaattctaggctgaagcatttattaaaataataggaacttataagaaaaagcctttaaataaaaagagctttaaagatagacgcaaatttttgaattttaaatagattacctatttgaagtaattaactatttaaaccaatataaaggaggcaaactttatgaaaaaaatccgcttgacctacaatgccccggttacactcacatttgtgctgctgtgtttttcggcaacgctgctaaattatatgacacaaggggcgagcaatgcgcttttgtttatgacgtatcattcgtcgctcaccaatccactgacgtatctgcggttcttcacgcatgtgcttggacatagcgggtgggtgcattttataggaaatgcctcatatctgctattgcttggacctatgcttgaggagaagcatggtggggacaatattttgaagatcattcttgtcacagcgcttgtgacgggacttataaattatatattttttccgcgggttgcactctgcggtgcgagtggagtggtgttcgcgtttatattgttgacatcgtttacgagctttagggagggggaaattcctatcagttttgtgcttgtagcaatgatttaccttggtcagcaggtgtatgatggtatatttctggatgacaatatatctaatatggcacatatcgccgggggaattgtaggttcaatcacaggatacaaatttaacaagagaagttaacaatagcgtttgcaattaaagacaaatgtctgcgaagcagagattagtgcttgcagttataacagatgtgcttataatgcttatagtctaagaacctgtgtttttactataaacgctaatgcctgcaaaaccagttatgttcctgcgtaacaatcgtcagtgaccacaatgcaattattacagttgcagcagcctcagtttaaaaacgtacacaacaagccggattggtattatttgtgtcaggacagccagaaggcggaattgtaaaatatttgtgaacaatgagcaatggcactgtaaatttcttgaaaaacgaaaaaaactgtattacaataatcacgtatgttatgaataggagaataaaagaataaaagaaacgaggacgtggttatggatgctgtatcggtaacgttattatttctgggactgtttagtggtatcgcacttttcctgtatggtatgagtgtgatgggagatggtcttaagaaggttgcgggaaataagcttgagacgcttttatatgggctgacaagtactccgcttaagggaattttgttgggagcgggggttacagctattatacagtcatcctcagcaacatctgttatggtagttggatttgtaaattccggtatgatgaaggttgtacagggaattggtatcataatgggtgctaatataggaacgagcatcacaggctggattctatgtctgtcggatattcaaggggcaggtggcgttgcggcacttctgtcatcatcaagtattgccgctattgttgcgatagtcggtctttttgtgagaaacctttcaaagaaggagactcacaaggctataggtgatattatgtttggatttaccattcttatgattggtatgtcaacgatgaaggaggctatggctccgcttcaggataatccgttttttatgggaatgctcacgaagttttccaacccttttcttggaatacttctgggtattatcattactgcggtgctgcagagtgcgtccgcgtctgtgggtattctgcag

SEQ ID NO: 3871 - DNA, 23501 bp, synthetic construct
  misc_feature 1..23501: note = Synthetic
  source 1..23501: mol_type = other DNA
tggtgagtggaaattattccggtcaggagctgcaagtagtaagtaatgttcgaaagcggcgaggagatagaagataaaatgcataagttcaaatatgacattgaaaaagagaccggcattccttggaagaaaaagaaaagttacagatatttatacacgctggcttgccaaaagggtgttatccttcgggcatttaagcggatgaaacgtggaaaaagtgacagaaaagatattcaaatggtggaggaagatttagatggatgggttgagaaaatacagaaaattatccagaatacgaagccagccggatggaaggtggaaaatccggaactggaatttaaaccaccaaagcataacccggttattataaaagaagctgggaaaacaagggtcatatatgtaccgacaatggttgaattgtggatacagcacgttattgtgctaattctggagccgattattcaagggagcagttaccatcacagctattcgtcttttcccaagcgtggatcacatcggggaatgaaagcgatgaaaagatggattcagtctgggaaaggtatccggaattttgcacagtgcgatatccgacatttttatgaccatgcaaagtataagtttatccgaccaaaactgttaaaacgtatcaaagatgctttatttatgtatctgatagatgtgtgcctgacatggtttccagataagctgccactgggcttttatttgtcacagtggctggcaaactttctcctgcaggggctggattttctgataaagtgcaagctgaaaatagcacactttatccggtatatggataatttcacgatggcagatgataataaaaagaagctgcacatggcgattatattcattaagcagtggcttggaaaaatcaggctgaaaatgaaaggtgactggcaggtgttccggtttgagtacattaaaaagaatggcaggagaaccggcagggaagtatcggcaatgggctggctgttctatcgaaatcgggtaatcataagaaagcatacgctgatacatattgcgaggatagcaaggaaactcaataaaaagaagatggaaaagaagaaatatccattaaggctctgcaagggttttatttccctgatgggctggataacacactctgacacctatgagtggtatctgatgtatattaagccacttataagcgtgagggcggtcaaacgcatcatatctaaaatggacaaggaggcaaataaaaatgcaaggatggaaaacagagaattgctcctcactgcctgaaacgttggaaatggtaaatgccaatacttacatccagagaagaaatatcaatcgtatcgaacgagacagtatggatggcagcgaagagaaagaagtgggctatacatgcgagtatcgtttcctgagtgaagaagagtattataatctgatccagcaggaagagaacactgaaaaagtaaacgagaacattctgatcagcatgggagcacaggcagaactctatgaaaaactgctcgcaacagaagaaaatcagctcattattatgaacgcagtagcggaactgtatgaagcaaagacgggaggtaattaagatgttggaactgtatattaaattagtaaaggctggaaaaagaacaatcgacagtattccggagaaattcagggacgatgtaagagcagcaatcgaagctgcagaagatgctgcggaataaacgatgaaatgccggaaagggtggctttatgaatctgttggcggtgatagacctgttgtgtgacatcactactcagcaatcggatctgctgagaaaactcgtgactgaattagaacacacaaagcaggtttcccaagaggtcaaatcgtattacagggaggcttttgaaaacatagaaaagcagttggatgtcagtgagtataactgtagaagaattgaatagttgataaacattcaggaaaatgttgacggggtttttcttgtaaatgaggagtctgaaacaaggctcctttttgaatgcagcaaaggtgtttaaaagggctttcaaagcccttttttaaatacaaaaaaatatggaaggagacgcagaaaatggcaagtttaagcaatgcagtaactattatcgtggtattcgcaatcctgatccagttccttgtggacagagtgaaggagcttgtgggtgacaaggtaatgaacatcgttaaggcaccggtatgggcggtagctttcggagcgctttttgctttgatgttcgacattgatttctttgctttgatgggctacagttcacagctgcctattattgcaaaggtgattaccggcttaattctttcctccggctctaccggagtacatgagctggtagccaagttaagggaaagcagagtggacagttaggaggtacacaatgggaaagaaacgtatttgtttagatccagggcattatggagaaaaatataatgccggggtcgtttctggatattatgaatcagcgacagtctggaaactgacacagtatgagaaggaatatctggagcagatgggaattgaggttctcgtaaccagaagtaatatcaatgagaatccggatctgacagccagaggaaaaatggctgccggatgcgatctgtttgtgagcaaccacacaaatgcctgtggtactgaggtagtaaacagagcagtggcgattcattttacagatcgtaatgaaaccttggttgatgatcagtccagagaatttgcagcacagattgcaaaggttatccagaacacaatgggcgtggacggatatcagatttattcgagattatccgacaatgacagagatggaaatggaaagaaagacgataactactatggagtgctgaatggcagcttcttagccggagttccgggcgttatcgcagaacattctttccatacaaatactgaagcttgtaaatggctgatggatgatagcaatcttcgtaagctggcgaaggcgtgtgcagaatgcatggcatcctttgtgggtgcatctgtgacagtggataccggtattcaggcggtagagtttgcgaatatggcagatactgatatcgtgaagcgagttggcgagttatgtactgctgatatgaagaacaccggcatccttgcctctgtgtcagcagcacagtttattctggaatcaggatatggaaaatcagtgctcgcacagatggcaaataactgctttggaatgaagtgctcgttatccggaaacacttggtctggaagctcatgggacggaacgagtgaatataccaaggagacgaaggaatatgtaaatggagagtatgtaacggttacagctgcattcagggcatatccgaatgtcgaagcatctattgctgatcattccgcatacctgctgggtgcaaagaaaggcgaagcacttagatacgctggtttgaaaggcgagaaggattacaagaaagcggttcagatcatcaaggacggtggctatgcaactgctccggattatgttaacaaggtgtgcagtatcattgaaaaatacaatctcaccgcttatgatcagcagaaacagacaacagcagaaagctggtatcgtgtcagaaagaactggagcgatgccaagagccagattggagcgtaccattcgcttgaatatgcaaagacttgtgtagacaagaatcctggttacagtgtgtttgatgaagcaggtgtaaatgtatatcctgaaaatgtgtttgctccttatatggtgcgtgtgaaaatcagcgatttgaagatgagacttggagcaaccattgacactgcttctgttggtcacatcccggtgggctcgtataccattgtggaggaaaagtatggaaaggtaagcaaatccggtgaggaaggcttgtggggacgtattaagtctgaacagccttacaacggaaaatatgttccggtctggatctgcctttcttataccgagaaagtgtaataggaatgagttttgtccgggggctgaaatgctcccggattacctgattgaatgccccaacattgaaaatcaggaggaagaagaatgaacagttttattgcatggattggtggaaagaggttgcttagaaaggcgattattgaaaggttcccagaggaaggctttgacagatacattgaggtgtttggtggagccggatgggtgctgtttggcaaggaagtgggaaaagaactggaagtatttaatgatgcagacagcaaccttatcaatttgtaccgctgcatcaaataccactgtgaggaactgcagaaggaacttaactggctggcaatttcaagggaacagttctttgacaataagagccagctgaatgccagagggcttacagatatccagagggcagcacgatactttcatattataaaggtgagtttcggagctgacagaaagaccttcggaacgaataagaaaaaccttacaaattcgattgaatatctggcagaggtgcaggagcgtttgaaaaatgtggtcattgagaacagggattttgaaagcctgatccgggtgtatgacagaccgggagcattgttttacttagatccgccatatcatggcaccgagaaatattatgaaggagggttttcacatgatgaccatattcgtttaaagaccgttttagatgggattaaaggaaagtttattctttcctataatgatgatgaatttatccgtgatttatataaggattatcacatcgagggaataagcaggaacagcaatctaacgaacaaactgaatgctgatacattcgatgaagtaatcatcaaaaacttttaaacattattttttttagggtataaataacgcaatacgttatattctaacaaaacaatatttaaaattatgcctcgtgataaactaaataaaggggcataaaatcatggttaaaattcatctatcaagactgcttggcgagaaaagatggactcagaaggatttggctgatgctactgggattcgtccgtcaactatcaacgaatggtatcatgagcttgttcctcgtttgaatgtagaccacatagataaaatctgcgaggctttagactgtacgataactgatctattggaatacataccaaatgaacggaagacgactggaaaatacttgattcttgaagaacatggaaatcgtaagcagaaaaaagaaaaagactaagccacgaaaggacgtttgaaaggttattaaatatctttcaagcgtccttttttaaattcctttttaaaagtggtttttgtattttatacgaaaaaattttgcgttttgtgcgcaaagcaacacagagctgtaatactaatgcagagtgatgatatcaatccgtgttttacaatgtgttgttttgagaaaaattcagtgtttaagagtgtagtaacagaacaatatatgaatgctatgaaatatatatatgataatattgtcaccgcatatatagtcggtgaagaaaaaccggttgagtatattgtaaagctagaaaatgcaatgaaaaatatattggataatattaatttttgcgttgtggttacgggcagagaaaaggatgcatatacattatttgaggtactaaatgatagaaatttcccggttgaagatttggaattaattaagaatcttttttacaaatattactgtaaaaatagcgaaaacaatgataacacggattatttcattgaaaaggcggatacaaaatggggggaaatatttagtgacacaataggcaaggaacagtcaaaacttatttcatatcttgctgcacaatattttacagcggatggaagactcaagtacaatgataatgagagatatagggaggcaatagaaaaacaatacctgaacagaaaacagcgatatgatggagaagcattgttaagtgatatatgtgtttatgaaatgcttgaaattatattagatgaatttgattttaaatatcagaaaaaagctgaaaatgtcataaaagcagagagagaaaattcaaaatcaattacatacaaagcgttaaatttgttcaatgcacttaaattgtacggagtaatacctgcaattaccaatattatacttaagaagtttttggaaaaaaatcctattaacagatggactggtggggattatattactgcatttagaaagtatgtacaggaaataagggatgacagagaaaataacaatacagattttgcggagattcacagtgtagcttatgatttctggcgttttgcactgcttgcacaaaattcggacaaaccaagaaatatagcaaaagactatatctcgaaaaattatgtatcaaattctgactattctttaaaagtcacaagtcaggaagcagatgtgttgaatgaagagttcagaagatggattaacgcatggaaatatggaaatgaaatttcccagctgaaggttaaagtactttttattaatttatttaattcaactaaagagggaaatacacttatattcaacaaaaccggcacaaattttaaaacggataaaatacagcttgatcatttagagccggataaaaccaatgcagttgcaagtgaaaagtattttgaaccttcatctaagctgccaagagaaacatataccgatagtctcggtaatttcatgattatggatgcaggcagtaacaatgacaagaacacaattccgttgcaggatgctcttgaaatttatgataatatggctggtggtcattggctgataaaagaaattcatgacctgttttatgagaatgaatgtggtgtagataagaacattgatggaaaaaaatacagaattccgaatgaagaatttttcatcagaagaaaaaagagattgatatgttattttaaggctattttgactaaaaagcttggcgataataaggtggaatttgaacagtaattaaaaaaggaggcagtgtaatgcaaaaacccgacgaaagattattgaagaccgtcatgtttgaaatacttcatcttgaacggaaaaatctcagaagcagagcaatgacggatcagaaaatggtggaggagattgggaaggttatctcggagaatattaagctatgtaaataatggaggcggagagggtacgaatgaagtttaaaacactcagaatgaagaattttatgcgttataaaggaataaatgagattaatttcagttgtgacgaaacgcataatgttacggtgatattgggggataacactgtaggaaaaacaacgattgctcaggcgtttagatggtgtctgtatggtgcgattatggctgaacgcggaaagaaagaatcagattatcagcttctgaataatgatgcgcttgcaaaactggatgccaataagaaagcttctgtttttgtggagataatagccgtggatagcgaaaggctgtataccatccatcgtgaagttgaatatatgagggtgtatcctaagttcattgcaaaagagtcatacaagacattgaaaatgtttatttcagatatagacagtcctgatatcaggcgtgaggtggagcccggacctaattacaataagataaatgagcttataaatgaactgtttcctaaaaatctttcacattattttctgtttgatggtgagagatggagtgatttttcgataaatggtgtcagggagaacattaaagaatcagtacatattttaaccggactttctgcctacaagtccgccatgtatcatctgaaggatatgggagacaattcagttataaaaaagttcagaaaaaatattcagggaaaaggcaatgtgtatgatgattatgagcgtgagcagaccagacttgaacgtgaagtggaaaaattacagaaacagatagaaagtatcgatgccaatatcagtctttgcaataaaaaatgcgatgagatagagttatatcttgaggaaaacaaggatacggaacagctgcagacggcatataaacagtctcagagaatgctgagggcacagggggagagatacttagccaactataaaacttttatttcggaatacaattcatgtgcatacagactgttcgccggaccgcttatcgaggcttcattaaaaatggtcaaatctgtggcaggtgagcgcagggatattccacacatgaggcaggcgagcattgattatataatcagaagcggaagatgcatctgcgggacaccgataacggaggggtcgtatgctctcgaatgcctgctcgaacagagaaattatcttccgcctgccgatatgggttctctgctcggagaatttgaaaagaccgctaaccgatggaaaagggttgatgacgaactgccagacgatgcggcaagggttgatgagagcgcaagggattatgaggagacaatcattcagcttcagaaaatggaaaataagatgaatgagaatatcgattttgcagagaagagagcacaacttaggagatataaggatgaagcaaacaaggctgcagtgaaaaaaggtgagataaagggactcatatcatcatatcagactcgaatacagagtatagaactccggatgaagaatcaggaaataaagaatgccgaaaatgaaaaatggagaaacaagctggggcttgcggaggctgtatacgataaattatcagcggatttttcggagcgggagaaaaagatattttacgaattgaatgaagaaattcaggcgaatttttcgcgtatgtttaatgcgaaagataaaagaatccagctatcggaaaactatgaaattcagatgtgttataagacagacataggctatcaggaagaaaagaacctgtcggaaggagaaaaggtagcaagaaattttgcatttattgtgacaataatggattacagcacacgaaagaagaatgagtataataaagctgactcaatcgttgaggataaggatgatgattgcaatgatgcgcttcctattgtgcttgatggaccattctcaaaactcggagaggaaaatatctctctggtggcaaatgtgcttccgaaggtatcggagcaggtcatagtatttatgctcagaaaagattgggcgtacacgggacttgatgagtatgtcggagcggagtactcgattgacaaaaatcctgaagaaagctttgcgtcgataagaaaggtggacagaggctgatggctgattttgaattttttaaaaagcagtttgaatttaaaggaaagcactcaagaatggtgtctgaactttgtgttgctaatgattttgagcatacattttttagaagggttattgacgtgtatgtatttgcagcaataataggtatccgtcttgacagaaaagcttcggaagattattcaccggtggagacaaaaagtatttttccagagcagatgataaatgccaaggaagacttggatttcataatgcagatgatgataatgttagattcgggttcgggaactactgctgaggacagagtaagggaagccttcagaggtgcacagactaaggaagagtatgacaggctgatggggattttcaatgactatgtgagaggtggagttgaagaactttacgaaagacttgttgtcagaaagcctgattcggatgacggatactacgacgaaagaaccgctaatcttatggcactttatgataggcttgttccgagaaatatttcaaaaatcatgaaataatgctttacttttttaaatatgtggggtataataaacatacgttatatcataccaagcgataaacggttacaacaataaggtcccgccgctggcggtgtacctcaaagctctaatcccacttaaagtgaatactttaagtgggattatctattttaaacagaattattattaaagcgaacagaataatgatatccaatcccttattggttttgactcaaaaggaaattctgctgttttgcaggaaaatatatgagtcatgatattgcttggtattaaatgatttaatgaattattcaatctgataaccgtttgacttgataaggttttggaggaagggattatattatggaggaaataagacagttaaacagaaaattagaagaaactaagccaattgatttaaattataggattggattagatattggaattacatcagttgggtgggctgttcttgaaaataagaatgatgaaccgtttagaattattgatttgggagttagaatttttaaagaggctgagcaatcgaatggtgatccgcttgcattacctagaagaaaagcacgctcagcaagaagaaggacaagaagacgcaggtttagattagaacgtattaagaagctttttcagacagagggacttattgatattaaagagtttgaggcacgttatgaaaaggcaggacttccagatgtatatagacttagatatgaggggcttgacaggaagcttacagatgatgaactggcacagatattattgcatatcgcaaagcacagaggatttaaatcaaacagtaaagcagaagagactgaaaatgaaaatgacgatacaaagaaaaaggaagcaggagcaataaaagatagtattagcaataataaaaagattatggaagaaaagggatacagaacagttggagaaatgctgtatcttgatgaaaaatttaaaatagatagtaattgcaatacaatggggtatgtattttgtccgagaaataaacaaggtgattataaggtaataatgcttagagatatgttagtagatgaggttcatgctatatttgaagcacaacgtaatttggataatacaagtgcttctgatgagcttgagaaaaaatatcttgatataatgcttagccaacgttcattcgatcaaggaccgggagcaccgagtcagtatgcaatagatggatttgattttggaacgtgtacacttgaaaaagctaatggtgagaaacgtgcaccaaaggctgcatacacttcggagctgtttattgctttgcaaaagataaataatacaagaattgtggacaaggatggaaatataagaaatttttctgacgaggaaaggtggaatattatacgattgattcataagcagcaagaagtaaaatattcttcgatacgtaatgcactttgtctgtctgatgatgaaaaattttataatcttacatatagcaagaagaaagacagcgaacagagcgtttttattaaaatggtaaattatcatagtataagaaaagcgttaaaagcggaatgctctggtgaattacttgatgataaacatgcagagttgtatgataatatagcatattatcttactaaatataaaaatgatgatagtagattaaaagaattaaaaaatcttggaataggagaagaaaaatgcaataatttaattaatctatcatgtacaaaaacacaaaatctatcatttgttgcaatgaaaaagataattccatttctgctagaaggaaaagtatatagtgaagcatgtaaaatgtctgggtataataactcaaatgaagatagttgtgcagataggttaacattattaaagggagaaaaaattaaagatgcgattaatgaaatatctaaccctgtagtaagacgagcagtttcacagactattaaagttttgaatgctattattcttgagtatggcagtccgcaggcaataaacattgaattatcaagggaaatggcaaaaaatagaattgaacgtgataagatagataaagatataaaaaatagaaataatgaaaatcaaaaaattcttgatgaaataagggaatttaagcctattccgtcaggtaaggatattgttaaatatcgtctttggaaagagcagaaggaaatatgtctgtatacaggtaaaaaaataccagcagaagaattgtttgcatctgatggaggatatgatattgaccatatacttccgtacagtaaaacatttgatgatagttaccgcaataaagttctggtaaggtctgaggcgaacaagaataaaggtaatagaactccttatgaatatttaatatcacaaggtggtgagaaagcttgggaagaatttactatcagaattgaacataatattaaggattataagaagaggcagaaattattaaaaaagcatgttactgatgaggagacaaatgagtttaaaagacgcaatttacaagacactcagtatgcaacaacatttatatataatttaatccgccaaaatctttatttaaaaccatatcagaatcttactggtaaaaagaaacaacaagtaatggctttgaatggagcagtcacacattatttaagtaaaagatggggattcgaaagcaaagacagacgtatagatacccaccatgcgcaggatgcggttgtcatagcttgtacaacgcagggaatgattaatacaatatcgaattattcaaagttcagagaactggagcttaataagattaataaatccagaagcataaaagtagatgagttatctgaaaatgaatttataaccagagagcaatatgataaaaattttggcgtggaatttccattgccatgggacaattttaaggaagaacttgatattcgtatgtcaagatatcatggtgcaggtgatgaaaaatttttagagacatcacctagggaatatattcaatcacatagtgatgtgagcaagcgtttggattaccctaaatggatgtttgttaaaggaagaccaggtcgcagaggcgtacttgatggaatttttgtttcgagaatgccaaatcataaggttacaggtcaggcacatgaggagactatccgttcagcaaagtattataaggatggtggatgtggagtcgataaagggtatattgtttataaaactgcacttacaaatttaaaattagataaaaataatgaaatagctaactattttaatcctgaaagtgataagttattatataatgcgttggtagagcagcttaaagagtatggtaatgattcgaaaaaagcatttgaaaaaaatttttataaaccaaaggcagatggatcgaaaggaccggttgtaaaaaaagtaaaagtatttgaaaaaaagactaccggagtctatttgaagaaagttaacggatttggatacaatgatagcatgattagagcagatatttattatattgatggtaaatattattttgttccagtttatgtttcagatactgtaaaaaatagtttaccaaatcaacgtgctgctaaagacaaaaattcatgcgattgggaagtagttagtgacgataattttctttttagcctatataaaaatgacctattatttatgaagaataataaacttccattaaaaagcatagatgaatataagtatctcgtgcctgatagcagcaaaggagtttttatgtacttttgtggtgcggatgttagtgggctggcttttaaatgtgaatcgaatgataaaacatttaactttagaagcagcataacaactattgaacaactatgcaaatgtcaagtagatgtattgggaaatatttcatttgttaataaggaaaaacgtatgccgtttaattaaattaaggagaagtgtatgggataccgtaatataaaaatagatagttctataggattacatataaaaaatgaacaattagttataggtgataaggatatcagttttcctttagaagatattaattgtgtcattatagaaaatcaatctgttacggtatccacatatatgcttcaagagtttgcaaaatatggaatcgcattatatgtatgcgatgaaaaacatttacctaatgctgtgcttctgcctatggtaaagcatagcaggcattttagaatgcttaccaaacagattgaggtgggaaagcctcttattaagcggctatggcagcaggttattgtttttaaaataagaaatcaggcattgtgccttaaggaacttgggctcgatgggtatgaaaaacttctttcaatgacaaaagaagtgcagtcgggtgacaagacacatgttgaggcgaaagcagcagcgtgttatttccgagttttgtatggtgatgattttactagggcggatgattgtattgtcaattctgcgatgaattatgcttatgcgataatcagaggtctgattgcaaggtcaatcgtgtgctatggtctggagccttcattggggatgtttcatcacagcgaattaaacagttataatctggcggatgatatgattgaagtattcagaccactggttgatttgtatgtggcaagtcattttgatatttcagaggttgacacagatttaacacctcagataaagagggatttgtttaacataattaattatgatatggcggtgaaaggagagaagcgcattatcagcaattgtattgataagcttgtgtatagctatagtggagctttacagggaaacagaactgatttggaacttcctgaattgataccattgcaggtgcatagctatgaataaatttatgagattgttggtgttttttgatttacctgttgttaaggacagagatagaaaagttgctgctaaatttcgcagatttcttctgaaagatggatatgttatggttcagtggtcagtatattcgagactttgcaatggtacggattctatcgagactcataagcaaagactgaagcagaatttaccgcataaggggtctgtgcgttgcctcgtattgacggaaaaacaatattcgtccatagatattcttttaggaacgtctacatttcatgatatggatgaatcatctgatttaataaatattttttgaaaaaagagtattatgtaatgtgaaaattagatttatcaattattttttacgtgtaaaatccccgtgaacatatataaacacggggatttttcgttccctattatatcataccaagcgataaccgggaacaacaactgtcataaggtgccagcccttgccttttctattatatcataccaagcgataaccgggaacaacaacttgctttctcgttttctttttgccggatctattatatcataccaagcgataaccgggaacaacaacatttccctttcgttgatattataatagcatattatatcataccaagcgataaccgggaacaacaacaatgttcggcttcaaacgtagcccacgcccattatatcataccaagcgataaccgggaacaacaagcattattattggtctttccatctgctaattatatcataccaagcgataaccgggaacaacaacccgggtcactggtcttcttccagttgataattatatcataccaagcgataaccgggaacaacaacccataacggtttaatggtgcatcctgtatcattatatcataccaagcgataaccgggaacaacaacttctgtggcgtaccctcctgtatcacttcgattatatcataccaagcgataaccgggaacaacaacttgggcttggtacaatatccattccatcaattatatcataccaagcgataaccgggaacaacaactgcttcctgcgctgttgctgtaccctgcatattatatcataccaagcgataaccgggaacaacaactgagcctgttccggctgtacctgactctttattatatcataccaagcgataaccgggaacaacaacgaatggttcagcgcatcagcctgtgattgaattatatcataccaagcgataaccgggaacaacaaccaacttgattgaagcaatcacaaaggctttattatatcataccaagcgataaccgggaacaacaactcattgtcctacctttcccaaggctttagattatatcataccaagcgataaccgggaacaacaacaatggttttcatttgattgtaggtgagcaattatatcataccaagcgataaccgggaacaacaacttatgaacacgtgactgcacaaagcccacaattatatcataccaagcgataaccgggaacaacaacttgattacctttaacttataaataaattatattatatcataccaagcgataaccgggaacaacaacaatagcatggaaagcgtctatacattccttattatatcataccaagcgataaccgggaacaacaactggttccgcctgtggctcactctctgtgttattatatcataccaagcgataaccgggaacaacaactatagtagtcatagattgttttcttgctttattatatcataccaagcgataaccgggaacaacaacagttaagatttacaagccataaaattcaagattatatcataccaagcgataaccgggaacaacaaccgtcctgtgatgacctgtagacgctgtaagattatatcataccaagcgataaccgggaacaacaactgtcgatactcgcgataaatcttatcatgattatatcataccaagcgataaccgggaacaacaacctcgtggtctttaatgtaacacatcatgttattatatcataccaagcgataaccgggagcaacaacggctgaaacacttgtaatagtaacaggtgcattatatcataccaagcgataaccgggaacaacaacgtgtgcttcatattctgccatgtgtaccaaattatatcataccaagcgataaccgggaacaacaaccgtcttgtagttctcagccacatccttggtattatatcataccaagcgataaccgggaacaacaaccgaaaggtgcaatgttatcaaaaccagcacattatatcataccaagcgataaccgggaacaacaactagcgatattgcatatcgttatttattgcattatatcataccaagcgataaccgggaacaacaaccatcttgaggattccaccctttttctttacattatatcataccaagcgataaccgggaacaacaactatcacaaggacgaccactgcaatggttgtattatatcataccaagcgataaccgggaacaacaacatctggtccatattctcaatacctccgtagattatatcataccaagcgataaccgggaacaacaacctcacgcattgcgacgtccatgtcatactcattatatcataccaagcgataaccgggaacaacaaccttggccgcatctgcagattcctttccgaattatatcataccaagcgataaccgggaacaacaacttataaacgccatgttgaatacagttatattatatcataccaagcgataaccgggaacaacaactgttccatcccgtcaggcatattaccgggtattatatcataccaagcgataaccgggaacaacaacttctccttcaagactcaacccaattgctatattatatcataccaagcgataaccgggaacaacacgacaagagacccttttgtgaaagattagtttacatttttgttgtaaatcttttttttttgtattagaatgaaatagatgtaaaaatatagtaaagaagaatataagaaaacaagaaatgaggacgttttgttatggatgctgtatcagtaacgctgttgtgccttgggctgtttagcggaattgcacttttcctgtatggaatgagtgtgatgggtgacggtcttaagaaggttgcgggaaataagcttgagacgcttttgtacgggttgacaagcacaccgattaagggaattttgctgggtgcaggtgttacggctattattcagtcatcatcggctacttcggttatggtagtcggcttcgttaattcgggtatgatgaaggttatacagggaattggtattattatgggtgccaatatcggaacgagtataaccggatggattttgtgtctttcggatattcagggagcgggtggtatagcagctcttttgtcatcgtcgagtatagcggcaattgtagctataattggtctgcttgtgagaaatctttcaaagaaggagtctcataaggcagtcggtgatatcatgtttggatttacgatacttatgataggtatgtcaaccatgaaggaggcgatgtctccgcttcagaacaatcctttttttatgggaatgcttacgaagttttccaatccgtttcttggtattattttaggtatagttatcacggcagtgcttcagagcgcatcggcatccataggtattctgcagtcggttgcaatgtcgggatttctgcctttttcggcggcactgcctatagtcatgggtattggtgtcggggcggcatgtccggttctcatgagtggtatgagttctaacaagaacggtaagagaacagcacttgtgtatctttttaatgatttgttcggaatgattatatgcggaactcttttttacacaattcaggcgattgtgacaagaggaggtcagttcgcatttatggatgttgagatgaattctgtctcaatagcccttatcaatactgtatatcgagttgtcacaatcgtgatactcgcaccgttcatcaagcagattaataagcttatgttctggcttgtaaaggactccgaggatgaggttgaggatcaggcagactttgacctgcttgaggagcgtttcttaagaaaccctgaacttgcacttactcaggtaggtgttgtaatgaacggaatggcaagaaaggcacaaaagaatgtcatgagggcatttgaccttatggatgattattctgttgagaagtacaatatcattcaggaaaaagagacaatcatcgataaatatgaggacaagcttgacacatatatgatgaagattacggctgtgggacttaacaagagccagacagtgcagaactccaagtatctccatacagtcagtgattttgaacgtattgctgatcacgcctgtggtatatcgagggcagccaaggaaatcgtggagaaaaagattaagttttccgatgatgcgcggcgtgagcttgcaattctgtacagtgctgttaaggaagaacttgatatgactgttaagtcatttaccgaggatgatatagatatggcaagacaggtggagccgcttagaatcacggtgagaatgttatgtgcagagcttaagcgaaaccacattactcgtcttcagagcggtaactgtgatgcaatcaatggatttgtttttaatgatcttttgacgaatcttgagagaattgttgcgcattgctccaacgtagccgttgccatgatggagtttgaatcggatgatttcaatacccaccagtatctgaaggaactcagggattcagaggattccggtattgtaaaggatgtcaactattattcagaaaagtattcggtggataagaaataaaatatatctgatggaggagtggagtaatgaagagaataaaaataacgtataatgcaccggtgacacttacttttgtactattatgctttgtggcgactttgctcaattacataacccagggcggaagtaacgtgcttttgtttatgacataccattcttcacttgtcaacccgcttacctatctgcggttttttactcatgtgttaggacatagcggatggtcacattttataggaaacgcctcgtatctgttgctgcttggcccgatgcttgaggaaaagcatggcggaaaagagataatagaagtgatgttattgacggcattcgttacaggtgttatcaactatattttctttccttatgttgcactttgcggagcaagcggagtagtattctcgtttattctcatgacttcgttcacaggctttagatatggcgagataccgataagttttattcttgtagcggttatatttatagggcagcagatttacggtggtatagtgtatgacaacaatatttcatacatggctcacattaccggtggtgtcgtaggttcggtaacaggttatatgcttaataaacaaaaataaaagttccccatctgcaggttgtgcctgtgagatgggggtcttttgtaatgttctattattcgtttcggttgcggttaagtcgtgtgaactcacgggcgattaacagaatggattcattgtattcgagcggaagagatgacatcatggatacaacgtctttttgcatgtcatttgagttgtcgtgaccgaacactatggtgtcgagtgagacatgcagacctcttgacagcttgatcagggtatccacagacattgatttgcgtccgttctcgatttctgataagaatgtgacagatatgccggtcttttcggcgagctcctgctgcgtcatgttaagggaacgcctgagctggtaaatcttgttacctatgatacggttggtatcatgggaagtacagttcatataattcctcctatgctatttatttgttaaaaccttgtttaactataagtacaaaataccaaaaaatggcaatttattaaattaacaatagtttataatttgttaaacaaagacgctttgacagttattttataaaatgttacaatgagcaaaactgaaatatatgaatattataggagtgtgagacagttgggcatagtgatagaggatattttaggcttcaatttttttcaatacggaagcccgtatacaggagaatgcggaggaatgcattttaggatggagagaagcccgctggaaaatgtggtgtttaatcatgatcctcacaagaatgatgaggctttgtttgcggttacggtgtggaggggaccgttcaattatgataccacccgtcagaaaaagattacggcacagtttccttttacggaggaggggagaattcaggctgtgcagtggttgaatgaacgatacaatgagaaggttgattactgggcagaggggataccactgttcccgagatacaccaccgatgaagacgaagtcgatgaaaatatctcagatgggaacgcggatgagcagatggagggctagcctgccgtgatgccggataggaagtctgtgacagcatcggagagagggagagcttcgcttacacagtaacttacctctcttttttttatgtataaatcaggtggggttacttccataagagcacctgtttcaagttcgtttttgacaaattcgcgtataacacagcctattccaagccctgtcttggcaaactcaataagaaggtccatactgccgatttccattagagttatctgtgcgagaggaagttcgtttatgtaggtgtcgacataggttcttgtcacgttgtccttggtgagcagcatgagattggcaccttgaaaaagattgctcatgtccgtgtgctccctgagaagaagattctttatgtacgccggggaagcgacaaaggtatcctgaattgaaccggcgctatacagcttaagtcctttggtagagtcaggtgtggctataagtcctatgtctatatcgtggttgtcgataagggctttggtatgcagggatgactgacaatttattgatatgctcacatgagggttcttgcggacgtatttttgaagccttggaagaagaatatatttacacagggtgttgcttgcaccgaagcggatgcgtccgacaccaagcagctttcttgagcttaacagcatttcgcctgcgttaatctcgttgaaggcagcgagaatgtgattatagagaagatcaccttcttccgtgagctttacacctctcgaacttcgatagaacagtgttgtgtcgagttcgttttcaagctgacggatggctttactgacggccggctgactgatgaagagcttttttgatgcctctgagagattgcctgactgtgcaaccatgataaaaatattgtatagattgagtgaggcgtgatttatattgttcattatattatattctccatttcgattcatacaaacataataacttgtagttataataaatataaataatatgtattttaagaatagcaaaaaatgtgctatgatgcaagtaataacttgataatcttattgctctatatgattattaaagaaaaacagtgaaatgaggaattattatgggtatgactatgacacagaagattctggctgcacatgccggtcttccttatgttgaggcaggacagcttattgaggctgaccttgatttggttcttggaaacgatataacatcacctgttgccattcatgagatggataagatgaaggtcaatggcgtatttgataaggataagattgcgcttgttcctgatcattttgtaccgaataaggatattaagtcggcagagcattgcaagtgtgtgagagaatttgcaaagagaaatgacattaccaactatttcgaggttggacagatgggaattgagcatgcacttcttcctgagaaaggactcaccgttgcgggcgacgttgtaatcggtgccgattcacatacctgtacttacggagcacttggagcattctcaaccggtgtcggctctacggatatggcagcgggaatggctacaggcaaggcttggtttaaggtaccttcagcgattaagttcgtgcttacaggcaagccttctaagtgggtgagtggcaaggatgtaattcttcacattataggaatgattggtgttgacggtgcactttacaagtcaatggagttcgttggtgacggaataaagagtctttcaatggatgacagatttacaattgccaacatggctattgaagcaggtggaaagaatggaattttccctgtagatgatattgcagaggcatatattaaggaacattcgaacaaaaaatacacgatatatgaggctgatgaggatgccgtatatgatgagacatacactatagaccttagcacacttaagcctacagttgcatttcctcatcttcctgagaatacgcacacggttgatgaagcaggagatatcaaaattgatcaggttgtaatcggctcatgtactaacggaagacttgacgatcttcgtattgcagcagaggttcttgaagggagaaaggttgcaaagggactcagagtcatcgtaattccggcaacacaggcaatttatcttcaggcgatggaggaaggtcttttaaagacatttatcgaagcgggagctgttgtgagtacgcctacatgcgggccttgccttggaggatacatgggtattcttgctgagggcgagagatgtgtctcgacgactaaccgtaacttcgtaggacgtatgggacatgtaaagtcggaggtatatcttgcaagcccggcagtggctgctgcaagtgccgtgacaggaaaaataagtgaacctgcagaacttggtctgtagatgaatggaggattaatatgaaagcatcaggaagagtgttcaaatttggagataatgtagatacggatgttatcattccggcaagatatctcaattcatccgaccctgcagagcttgcaacacactgcatggaggacatagacaaggattttgtaaagaaggtaaaaaagggagacataatcgttgccgacaagaacttcggctgtggctcatcaagagagcatgctccgattgccatcaaggctgccggtgtgagctgtgttatagcggagacatttgcgagaattttctaccgcaatgcaatcaatataggtctgccaatcatcgagtgtgctgaggccagcagggata

SEQ ID NO: 3872 - DNA, 23501 bp, synthetic construct
  misc_feature 1..23501: note = Synthetic
  source 1..23501: mol_type = other DNA
ataaggacagggagcatgccaccatgcttataggaccttacggcaagggtaaatcgcatacacttctggtgcttctggataagctgagacatagggaaagaccgtatcttcccgttattatatcgggcactaattccgacctcaatcaggcatttcttgtcgggataaccgatgcattgaagtgggcagggcttgatagcattacaccggacagctattacagcgaggcagtcaggaagatagagcagtggaaggacagctttccggatgcgtacagtcattttgcaggagagcttcaaaaaaacggatgtaatgggaaaacattgcagcttggtcttgagaagaaccaaaaagaggctcttgatttatttcgcaggatatatcctatagtaaccaacggaagtgaatttaatcctattattgtgcttgagactgtgagaatatacgagcagattaaggatacactggcacgcgattatgggtatgcaggaatatatgtcatattcgatgagttcagcaaatacatagagggtcacgaagcggatacattttccaaggacatgaaggtgcttcaggatatgtgtgagctgtccgagagaagctctgaggggcagatgtttataacctttgttgcacataagagcattaaggagtacggcgctaagcttccggtggatatgagaaatgcattccgcggtgtggagggcaggataaaagaggttctgtttgtcgtctcctcccagaataactatgagcttattggaaatgtgttaaaaaaggatgaagccgcattgcgtgagcttcctaagatagggagatactatgaaaatgctcttaattcttatcgattttcatgtttttcagggctgtttgatgaagctgattttaaaaaatatgtggttgagggctgctttcctctcatgccgtttactgcgtatatgctgcttcatataagcgagaaggtggctcagaacgagaggagcatattcacctatctttcgcatgacgaaaagggaagcgtgtgcagaataattgaggattatggcgaagatatcgcagactgcggaataactgcggatacagtttacgattattttaagaatcttttcagggaggaagcctctgatacagttattcacaatgaatggcttaaagctgagtatgcactttcacgtacagtggataagctggagaaaaagcttataaaggttatcgccctgataaatattatagatatcccggatgagctgacggcggatgtgccacagctatcaagtgcgcttaatatttcggaggatgagtgcaggacagtggtggagcgtctggtggaaaagagaattattatataccgttcgcgcagacattcgtacagcttttacaataatgtcggtgttgacatacagaaggagatttcactgaaggcagcgaaattgccggcagattcggatatactcggaaccttgaaggagatttcagagtacgattatgtgcttcctaagaaatataatcagatatattcgatgaccagatattatgagtatgtatttatgtcaccggagcagatagaaaagcttccgtcaccggagattctgtttgaacagcacttttccgacggaaaaatagtggctgtggtgagcgataacaggacagattatagcaaagagctgtctgagcggcttaaggatgacagaatagttgtgcttgtgacaaaagcagcttttgataagggcggaagcataagaaaatacattgctgcgaagagtcttatgagtgacaggtcattcatagaggacaatattgtattggagcaggagcttgtaaactactgcgatgacatttcatacgaggtgaataagtttcttaaggaagcgtacaaccccgaaagcggtgcctgtgcggtataccacaacggtgaagcattccggtcgggttttaggaacggcttctccttcaatatgtttttgagcagcataatgacggagtattacaataatgcaccggttgtaaataacgagctgattaatagacagaacatatcggctcagaacaagaaggctcgaaataagattgtagatatgctgttaagttctgaggattgttcgtcatttgagaagggaacctcacctgaggcaaccatatacagggcggttcttgtaaatacaggtattctcggcaatggcggtgaggacaggggctgtgcatatgtcctgtcggagattgagcggttcatagctatgtgcgattcaaataaatgctccttcaagctgctgtatgaccgtctgatgggcagtggatatggtgtgcgaaagggaattattcctatttatgtggcattatgcctgtctaggcttcaggataaacccattgtaagcttcaaagaaaaagaggtaaatatagacgctgttattcttggaaatatcaacgattcgccatcggactattatctgtatgttgagcatgagagcatagaaaaacagaattacattgcggggcttatgaaattattcggagtttcagcaagagctgcgggggctgcaggtgacagagaagttttagatggaatcctgagatggtacagggcgcttccgcaggcggcagcgaacataggtcgcgttgtcgatgtgagtgagaacatggcagcggcgttaaagcggctgtgtatggcgctgaggcatcaggagtataacccgcatgagttcctttttaaggagcttgtcgatatagcaggcagaattggcgacagtgaaaaatactccgcagatggagctgtggtaaagagttccttgacagaatctccggtgactaatacttcgccggaagcaggttcattagccggtgtactgcataatataacacttttaaaggcatatcttgatagttatcttctgaagctttcaggtaatgtcgcggcaattataaaaaaacgctgtaaggcagacgatggtgacagccttaagtcggtgcttgaggagcattattacgagcacggaaagagacttgaaaagctggtgactaagagccggacatcggcaatattgtcatatatatcggatatacctacctatgacgaaggagagattgtgtcgaagctgtcgaagcttgtcacggatatatacattgatgactggcgtgacggaatgctggagaagttcagagccggctgggatgaattctgtgatgaggctgagaacaccgtaaacagcgagagcgcacttaacagcattattctaaagggagaaggtggaagcctgcttgaaaggagctatgccgatgtggaggatgacagcacagggtattttcttaaaaatgcgataaaggatgcactggatgaattcggcgacagtctggagactaatgcgaaagtagcagtgcttgcgcaggttcttgctgagcttgtggcaggggagagcagataattgcagtaaggatatatgaaacagaactaagagaaaaataaaaatgaggattacttatgagcatgatttattttgacaatgcagctaccacatacccgaaaccggaatgtgtgtacgaacagatggataaggtcaatcgcagcctgtcattcaatgccgggcgtggttcctatgctctggcgcagcagtctgcccagataatcgataatctcagaaaagaattactccgcattgtgaatgcgtcagatgtagcagaggtcgtactgtcggcctctgctacatttgcattgaatcagataataggcggcctggaaataaaaaaagaagattacatatatatatcgccgtacgagcacaatgcagtggtgaggacactctataaccagatggtgtttagagatgataacaagatggctgacagtgaagcgggtagaattaaaaagcatattattgtgatgccgtttaaagatgacggcaacattgatatagatagacttaagtatgagttcagcgtccatgccccggcatttgtatttatgacacatgtgagcaatgtcacgggctgcatactgccggtagaacagattgctgcagcggctaaggaatatggcgcgatagtggttgtcgatggctcgcaggcgcttgggcttgtgccgtttgacatgtcgcagtcgcttgttgatttctacgtctttgcgggacataagacaccgtacggtccatttggaataggcggattttttatcagaaacggtgtgaggcttgatacatttatcgcaggaggaaccggaagcgattcactcaatgtccacatgcctgaagccggcagcagccgatacgagccggcaagcccgaatatcattgcggcagcagggcttctggcagcaataaaggatgtcgatggtgaggagataaaaaggcggctagacaaggaaatgtcgctcacgcgctacatggttgataaattacgccggctatacaatgtgaagctatatctgcccccggcggacaggcatgtcggaatagtggcattgaatataaaaggttatcagtcatcagatgtcggaatgattcttaatgccgattatgacatcgctgtgcgcacaggctaccactgcgcaccgctcatacatgaatatcttgacgacaaggaataccttggagttgtcagggcgagcataagcatgtttacaacaacggatgagattgacgcgctttgcggggcgttgggggagatttaggaggaaaaaatatgcagccgattaatgagccatttgatagtttgttagaaaagatacgaaatcagcaaattttattgccggattttcaaagaagatttgtgtgggataaggaagaaaagcaggcgtcgttgatagcgtcagtattagccaagatgccgattggaagcgttcttatgttgacggtgaaggcagatgaatacgcatatagaaaaattgggtgtaaaaccagaaaacgtgcagatgagttaggaattagcggtgaagtaaatgcattattggatgggcagcagaggttaactgtgcttgcaaatgccttttctaatatcgttttcgatatggcggtgcaggcaagtgagctaattcagcaaaattctttaaagagaaggtttttttcttagattacctaaatatcgtgatgctaatggaaaaagaaaagatgaagattattttaaagttggaaagttaatgccatttgagcacccgacgacaatggagccggattttttgtctgatgaaatagtagatatgataaaaattattccatttaaagccggggatgagacaagctataatccatttcaacataattctccaataagtgccttagtagatttttgtactagtggtgaagaatatttaataccattgtatttaatagctggaagtcctaaaaatcagagccatttaatgagtatagttgaaagaatttcagatagtgtacagcttgatattttgcaggaatttgatgcacttgatgaagaagaaaagatattgtttgctgaagatattctgacagagtatgcattgacatcctgtgaaaatattagagacagagagtcatttaaagaagctttggcaaagcagggaagggagtgggaaaacaacataattgcatatttacgttcatgccttgatgatatccagttacatcagcttattgtgaataatcgtagaagggatagagcaattaatatttacgaaaatctgaataagggaggtatatcgttaggaacattcgagttaattatggctaagtatgctggggtgagtaaggaaaattattatgatgttgtattgaataatatgaaacaggttagagattatagtgagaatgtttttagtgacaaaatccgtagagatgatgctatatgtggaattataaaatcaggtgaatatattgctactgtagagctggggtgcataaatatgaacgaagatacaatagtgccggcatatatagatgcgtacttaaatattatgtcgttatatgcacatgttcatgattttgatacttcaaaaattagacttgatttgataaagaaaaataaaattatggacgtttcagcaagagatttgcatgtttacagcaatgatgttgtagaagcgatggatctggcattattttttctacagatgcgttgtggagtaaggaacattaaggatatcaattataaattaatgcttgtcgttatttcgtacatattgcttaatcagtcatataggaacaatagcaggacttatgattatttagaagcgtggtattggagcagtattttttcgggttattttaatgttgaccagaatattaatgcaatcaatagcattgtaaatttgatagatagctttgaaagtaattatagtgcagattggataaaaaatactctggcaaaaaatatgtttaaagcaaataatttttcaaataaagattttttgttatataaaacggagggactgacctgtccaaaagaatttttgagggatgttatttgccagttctttcttgcacaaacctataatggagtaatagatgaaaagataaagatgacaccatttattaaggaaaaattggaaaaacatcatgttattcctttagggtcgattgtagcaccaagggcaaaattaaggaaaggggaggagagcaagcgaagagataatgcatatttcctgaatagtcctattaattttatttacataacagaagatgaaaactgggcaatatcggatagtttgctttcagattatgtggggagcattaatagctcagctgttaaaaattttcttgggttaaattgcgatttagatacttcaacagaagaatcgtgcagaaatgttctcgaaagcaggtatgaacatttggttggatcaatagaaagacatatagatctattagtaccacagattaactgaataattataaacacatttatttgcacatcagtattaggagaggaggcagcaaaaatgggcaatgtcgatgaaaaactggtcaaatcagtcatgtttgaaatccttcatcttgagcgaaagaacctgagaactaaggcactcactgaccagaagatgtcggaggagatagggaagattatcagcgaaaatctgaaactaagcaaatagcggggaggagaaggtacgaatgaagtttaagacacttaaaatgaagaattttatgcgttacaagggtgtgaatgagattgattttagctgcgacgaggagcacaatgttacggtggtattgggggataacaccgtcggcaagacgacgatagcgcaggcattccgctggtgtctgtatggggcgattatgaccgagcgtggaaagaaggagggcgattatcagctgcttaataacgatgtcctcgcaaagctcgatgcgaacaggacagctacggtgttcgttgagataacggcgacggacaatgaacatctgtataccgttcacagggagattgagtacatgagagtgtacccgaaatttcttgcgaaggagtcctacaagactttgaaaatgtatatcgccgatgtggacagccctgacataaagcgcgaggttgagccgggtgtaaatcatgtcaaaatcgacgaatttataaacgagctttttcctaaaaatctgtcgcattattttctctttgatggtgagcgatggggcgattttgcactgaacggagttcgcgaaaatatcaaggagtcagtgcatattttaacgggtctgtccgcgtacaaatcggcaatgatgcaccttaaggatatgggagacaactctgtaattaaaaaattcaggaaaaatattcagggcaaaggaaacatatatgacgactatgagcgtgacaagacaagattggagcgggatattgagagatgtcagaagcagatagaaagcctggacacgacaatcagcctttgtaataaaaagtgtgaggagattgagctgtatctggaggcgaacaaggacacggaacagcttcagcaggcatataggcagtgccagagcgtgattagggcgcagagtgaaagatatctcgcaaattacaggacgtttgtgctcgagtataacgcaaatgcgtacagaatgtttgcaaagccacttatcgaggcttcgttaaggttggtaaaatcgatagcgggcgagaggcgtgacataccgcatatgaggcaggcgagcattgatttcataataaggagcgggcggtgcatatgcggaaccccgataacgaaggactcctatgcactcgaatgtctgcttgaacagagaaattacctcccgcctgccgacatgggttctcttctaggggaatttgagaaaaccgccaaccgctggaacaggggcgaagatgatttgtccgaggacgcggcaaaggttgacgacagtgtcagggactatgaggaaaactgtatccagcttcagaagattgaacagaaaatgagccggaatattaatttttccgaaaagagggctgagctcaagcgctacaggaatgaggcgaacagcgctgcgctgaaaaaaggtgagctaaagagcgccatagcatcaaatcagagcagaattcagagcattgaaatccaaatgagaaatcaggaggctaaaaatgccgagaatgaaaagtggcggagaaagattgaacttgcggaagctgtgtacgacaaaatcagtgctgacttttccgagcgggagaagaaaatttttaatgactttaacaatgaaatacaagaaaatttttcaaagatgtttaacgcaaaggacaagaaaataaagcttaccgaaaattatgagatacagatgtgctacaagactgacataggaggctacagggaggagaaaaatctgtccgagggagagaaggttgccagaaattttgcattcattgtcacgataatggactacagccgccgtaagaagctggagtacaacagcggcaatgcagatatggacaatgacggaaaagacacgctccctatcgttcttgacggaccattctcaaagcttggcgaggagaatatttcactcgtggcgaatgtgcttccgcaggtttcggagcaggtgattgtgttcatgctgcgaaaggactgggcgtacacggggctggacaaatatgtcggggcagagtattcgattgacaagaagcccgatgagagcttcgcatcgataagaaaggtggacagggcatagtggcggattttgaattttttaaaaagcagtttgagtttgtaggtaaacatgctcgtatggttagtgaactttgcgtttccaatgattatgaacatacatatttcaagagatatatagatgtatatatttttgctgccataataggcataaggattgacagaaaggcttcgcgggattattcacctgttgagactaagagtattttgccggagcagatgataaatgccaaggaggacttggatttcataatgcagatgatggtgatgcttgacccggcttccggtgcgacggacgaggacagggtgcgcgaggcattcaggggggctcagacaaaggaagagtacgacagacttatgggaaccttcaacgactatgtgagaggaggcgtagaggaactctatgagaggcttgttgtacgcaagcccgactccgaggagagattctacgacgaaaagacagctaacctgatggcactctatgacaggtttgctcctaaggaggagtgaaaatattatcatatacaaatatagttgatttctaataaaaaatagacaaatttacaaaataagtctttacttttctaaatagatgagatataataaaaaaatgttatatcataccaagcgataaacggttacaacaataaggtcgccgcctttggtggtgtacctcaaagctctaatcccatctaaagtgaatactttaggtgggattatctattttacgcggaaagagaacaagaataattattaaagcgaatcaaataattatatccaatcccttattagaaacattatatatcatatgttatatatcgcttgggtaatagtatttttataacggcatatgagagaatatttatttgataaataaggttttggaagaaaggaatatttatggaggaaatgaagtatttaaacagaaaagcagaggtacctaagccgacagatttgaattacagaatagggcttgatataggtatcgcgtcggttgggtgggctgtgcttgagaacaatacccatgacgagccgttcaggattattgatttgggagtgaggatttttgatacggcggagcagcctaagacgggggcgtcgcttgcactgccaaggcgtgaggcgcgttcagccagaaggagactcagaagacgcgggcacagattagagcgcatcaagaagctttttgaggcggaaggacttatcaacattgaggagtttgaggcacgctacaagagaacagggctgcctgacgtgtataagctaagatatgaaggtcttgacagaaggcttactaatgatgagctggcacagattttgctgcatattgctaagcatagaggatttaagtctacgagcaaggcggcagacggagccgattcggatactggagaggttaaaaagggtataagtgctaacaagacacttatgcaggagaagagataccgcacggtcggtgagatgatttatcttgatgaaaaattccgcactgattgtccttggaatgaaaacggatacatactcacaccacgcaataagtcgggtgattacaagcacacagttcttagagatatgcttgccgatgaggtgatgaagatatttaaggcgcagagagcgttgggaaatgatactgccacagaaaagcttgaaagggcatatcttgacattatgctcagtcagcgttcatttgacatgggacctggcgctccgagcaggtacgccatggagggctttgaggacagagtcgggttgtgtaccttcgagggtaagaacggagaaaagcgtgctccaaaagctgcttatacctctgagttttttgtggcgcttgagaagataaaccatacgaaaatagtgtctgccgatgggagtacaagattttttacgagcgatgagcgccatgccattatagctcttttgcacaggcagcagacggtaaaatacaccgctgtgcgtaagacgattggtttagcggaggaggataagttctataatcttaattacagtccgaaatcgggaagcaaaaaatctcctgaagatacggatttcgtgaaaatggagaactatcacaagatacgcaaggctcttagggaagaggttgtatcggaacatttgtcaccggataagataaagctgtatgacgacatagctaggatacttacattgtacaagaacgatgacagcagaataaggcgtttggctgaacatgatatcgcttcggaatgttatgatgcattgctggaaatgtcaccgagtaaatttcataatctatcactcaaggctatggggaaaattattccgttcctgcttgagggaaatacttacgataaggcttgtgagcttgcagggtatgatttcagggctgagaataacggcgaaaagtcggttttgttaaaaggtaaaaatatcaccaacattgtaaatgatatcacgaaccctgttgtcagacgctctgtatcgcagaccatcaaggtaatcaacgcgattatactcgagtacggcagtccgcaggctgtgaacattgagcttgcgagggagatgtcaaaggatttcgatgagagaagaaaaatcaagtccgacatggaggcgagagagaaggaaaatgacaaggttttaagtcgtgtcagggaatacaagtcaaatccgaccgggcaggatatagtaaagttccgtctttgggaggagcagggaggaatgtgtctttattcgggagaaaagattgatataaatgaccttttctcatcgaatggagggtatgatgttgaccatatattgccgtacagcattacttttgatgattcatatcgcaacaaggtgcttgtgaaggccttggaaaacaggcagaagggcaacaggacaccttatgagtatttcatggttggaaaagacgagccggcgtggaacgaatatgaggccttggtcaaaaataccattaaggattataaaaaacagcttaagctcctaaaaaagcatatatctgacgaggagaaagcagagtttaaggagcgtaacctcacagacacaaaatacataacaagaattgtttacaatatgatacgccagaaccttgtgttaaaaccttacctcaatctcgagagggatcgaaagaagcaggttatggctgtaaacggcgctataacacattatctcagcaagagatggggactcgcgggcaaggacagacgcaccgacacccatcacgcacaggacgctgttgtcatagcatgtacaaccgatggaatgattaacaggatatcccgctattcaaagggcagagagttagcttattcgagaggctttgagttcgtggacgaggagacgggagaaatattaaacagcgacaatttttcgcgcaaggactgggatgaaaagttcggcgtaaggcttccgatgccatgggagcatttcgcagacgagctggatattcgtatgtcaagatatagcacgatgggagaaggtgtttcctcgggaacgtcgccgagagaatttattctgtcgcacagagatgtgtttaactggataaattatcctgagtggatgtttgttgagggcagaccgggacgcaggggcgtacttgacggaatatttgtctcgcgaatgccaaatcacaaggtcagcggacaggcacacgaggagactatacgatcggcgaagtattatgaggacggaggttgtggcgttgaaaaggattatgttgtgtacaagactgctattacaaatctgaaattagataaaaatggggaaatatctaattattttaatcctgaaagtgatagtttattgtataatgctttggtaaagcgattgaaagactatgaaaatgaccctaagaaagctttcgagaaggcattttataaacctaaatcagatggaacaaatggacctattgtaaaaaaagtaaaagtgtttgaaaaaaagactataggggtactgttagaaaaggtaaaaggatttgctaataatgatagcatgattagggttgacatttattgcgttaatggaaaatattattttgttccggtatatgcttctgatgttgtaagagatagattaccaaataaatgtgctgctaaaaataaaaattcatcagattgggaaattgttgatgataaatattttctttttagcttatataaaaatgatttattatatataaaaaaagacaagcttcctttaaagagtatagatgaatgcaaatatcctataccaaatagtagtaaaggggtatatatgtattttggtggggcagatgttagtggtttagcattttcatgtgaagcacacgataaatctttttcgttcagaagtagtgtagtgacggtagataaattatgtaaatgtcaggtcgatgtacttggaaatgtttcatttgtaaagaatgagaaacgcatgacatttaattagtttttgggaggtatatatgggatatcgtaacataaagattgacagttctatgggtctgtatatcaaaaacgagcagctggttataggcgaaaagggcgtcagttttccgctggaggatattaactgcgttctgatagaaaatcgggctgttacgatatcagcatatatgctttcggagtttgcaaaacagggaattgcattgtacgcttgcgatgaaaaacatcttccaaatgcggttcttcttccgatggcgaagcacagcagacatttcaagcttcttaccaagcagattgaggttggaaagccgttggtcaagcggttgtggcagcagattattgtgtgtaagataaaaaatcaggcattgtgtctcaaagagatgggtcttgatggatatgaaaagcttctttcgatgacaaaagaagtgcagtcaggggacaaaacgcacgttgaggcaaaggcagcggcgtactattttcgtgttttgtatggcgatgaatttacaagagcagatgagtgtattgtaaattctgcgatgaactacgcatatgcgataataagggggctgattgcaaggtcaattgtgtgttatggtttagagccctcgctcggaatgttccatcacagcgaactgaatggttttaatctggcagatgaccttattgaagtgtttagaccattggttgatttgtatgtggcaagccattttgacatttcggaggttgatgccgatttgacgccgcagataaagagagggttatttaatataattaactatgatatgtcagtgaaaggagagaagcgcattgtcagcaactgtattgacatgcttgtctacagctatagtggggcgatacagggaaacagaacggacctggaactcccggaattgataccgttgcaggtgcatagctatgaataaatttatgagactgatggtattttttgatttgcctgtcgtaaaggacagggacaggaaagcggcagcaaaatttcgcagatttcttttaaaagacggatatattatggttcagtggtctgtatattcaagattatgtaatggcgcggattcaatcgagacgcacaagcagcgcttaaagcaaaatttgcctcaaaaaggagcggttcgctgtctgatattgtctgaaaagcagtattcatctatagacattcttttgggaacatcgaccttccacgatatggacgagtctacggatttgataaatattttttgaaaaaagaatggtttgagagttaaaaatcatacatgtgacttgctttttttgcatgaaaaaaccccgtgaatataagtaatcacggggatttttcgttccctattatatcataccaagcgataactgggaacaacaacttctagttctgttgtgatattggcaatcagattatatcataccaagcgataactgggaacaacaacaatagtgtcctgaggaacatataatttaatattatatcataccaagcgataactgggaacaacaactgctgttctatcaagtagctgtcttgctctattatatcataccaagcgataactgggaacaacaacgcaaactgttctctttcttctgcgcttataattatatcataccaagcgataactgggaacaacaacctgtatctccgatttctcggcttggttcttattatatcataccaagcgataactgggaacaacaacgtgtgtgtcttgccatagaacgtgataggattatatcataccaagcgataactgggaacaacaacctgggtgatgttctctgcaatccaaactgaattatatcataccaagcgataactgggaacaacaacgcgtcgtcctgttcttcttgcggtctaacaattatatcataccaagcgataactgggaacaacaactcttccttctgctttttcaggcgttccattattatatcataccaagcgataactgggaacaacaactctgaaaatatgtgttgcagatacggttgtattatatcataccaagcgataactgggaacaacaactcattctgtaattcctgtaaatcaacctttattatatcataccaagcgataactgggaacaacaactccgctttgctccactgcaacttgtgtccgattatatcataccaagcgataactgggaacaacaactctgccgcccgtaataatgtaatagtttgtattatatcataccaagcgataactgggaacaacaacctgccctgcgctcggtgcgcaaggctcttaattatatcataccaagcgataactgggaacaacaacgcaaactgttctttttcatctgcactaatattatatcataccaagcgataactgggaacaacaacctttgggcgctctgtgtaccatttgcataaattatatcataccaagcgataactgggaacaacaactatcaagcgtaccaaagccgtcaatcattaattatatcataccaagcgataactgggaacaacaacctgtaaacttatcatacgtgaagcgtgtcaattatatcataccaagcgataactgggaacaacaacaatccatttcatacacgccgccgctaaagcattatatcataccaagcgataactgggaacaacaacgcacaaaaatattttcctaaggcactcgttattatatcataccaagcgataactgggaacaacaacaggagaagctgtcctattatgacctgatgattatatcataccaagcgataactgggaacaacaacttgtaaaggctctccatgccctccttaaaattatatcataccaagcgataactgggaacaacaactggaaatgtaccagacgattcattggaaatattatatcataccaagcgataactgggaacaacaacgaatagccctgctgctttgcaatctctttattatatcataccaagcgataactgggaacaacaaccttccagaacggaagaatctcatgtgcaggattatatcataccaagcgataactgggaacaacaaccaccacgctcaaaataccaacgcatatttgattatatcataccaagcgataactgggaacaacaacgctgttactttagcgcaactataggtttatattatatcataccaagcgataactgggaacaacaacctaaacgggtcatactgtgcaagcatttctattatatcataccaagcgataactgggaacaacaacagaacggagtacctactaaaatcatatctgattatatcataccaagcgataactgggaacaacaacgtatgtatctgccgctgtataaacaactcaattatatcataccaagcgataactgggaacaacaacgtcaggtgatgacaaggtttcctctgctgcattatatcataccaagcgataactgggaacaacaaccagcgaacctcattcctgcttgacggtttcattatatcataccaagcgataactgggaacaacaaccaagaacctgtttcgctgtcttttcatcgaattatatcataccaagcaattacctcctaccatgcttcggcggacttaagatgagcaatataccacagattgagaagaatactaccaggattggaacaatgtgaagcaccagaaatactgcggcggcaatcaaagcaataagaattaaaataataatcaagataataatttgtcgggtctccttgaaagtgaaaacagtgattttatgattctttttgattatatatcattgcactatgattgtgaacaataattttgcaaaaatataacaattaagctgctattgaagttttggcaagattggaattattattcaaataaactatccaagaaaactatttaataattgaatcttgtcattgactaagcaaaaacattttactacaataaatagagaaaatcagaggaatgccagaggataaaaactacataacatcagaagaatagaagaaagacaagctaattataaatattgctgtagctgctgtatattatgcgaaattggaagctaactttaaaaaattctaggctgaagcatttaaaataataggaacttataagaaaaagcctttaaataaaaagagctttaaagatagacacaaatttttgaattttaaatagattacctatttgaactaattaactatttaaaccaatataaaggaggcaaactttatgaaaaaaatccgcttgacctacaatgccccggttacactcacatttgtgctgctgtgtttttcggcaacgctgctaaattatatgacacaggggtcgagcaatgcgcttttgtttatgacgtatcattcgtcgctcaccaatccgctgacatatctgcggttcttcacgcatgtgcttggacatagcgggtggatgcattttataggaaatgcctcatatctgctgttgcttggacctatgcttgaggagaagcatggaggggacaatattttgaagatcattcttgtcacagcacttgtgacaggacttataaattatatattttttccgcgggttgcactctgcggtgcgagtggagttgtgttcgcatttatattgttgacatcgtttacgagctttagggagggagaaattcctatcagctttgtgcttgtagcaatgatttaccttggtcagcaggtgtatgatggtatatttctggatgacaatatatctaatatggcacatatcgcaggaggaattgtcggttcaatcacaggatacaaatttaacaagagaagttaacaatagtatttacaatcgaagataaatgtctgcaatactagttgcactcctgcgtcttatttgccggtgaccacagtgcaattattgcagctgcagcagccctcagttaaaaaacgcacacaatagccggattggtattatttgtgtcaggacagcctgaaggcagaattgtaaaatatttgtgaataatgagcaatggcactgtaaatttcttgaaaaacgaaaaaaactgtattacaataatcacgtatgttatgaataggagaataaaagaataaaagaaacgaggacgtggttatggatgctgtatcggtaacattattatttctgggactgtttagcggtatcgcacttttcctgtatggtatgagtgtgatgggagatggtcttaagaaggttgcgggaaataagcttgagacgcttttatatgggctgacaagtactccgcttaagggaattttgttgggagcgggggttacagctattatacagtcatcctcagcaacatctgttatggtagtcggatttgtaaattccggtatgatgaaggttgtacagggaattggtatcataatgggtgctaatataggaacgagcatcacaggctggattctatgtctgtcggatattcaaggggcaggtggtgttgcggcacttctgtcatcatcaagtattgccgctattgttgcgatagtcggtctttttgtgagaaacctttcaaagaaggagactcacaaggctataggtgatattatgtttggatttaccattcttatgattggtatgtcaacgatgaaggatgctatggctccgcttcaggataatccgttttttatgggaatgctcacgaagttttccaacccttttcttggaatacttctgggtattattattactgctgtgctgcagagtgcgtccgcgtctgtgggtattctgcagtctgttgccatgtcgggatatcttccgttttcagcggcgctgcctatagttatgggtattggtgtcggtgcagcatgtcctgttcttatgagtggaatgagctctaataaaaacggaaagagaacagcgcttgtatatctttttaatgatctggcaggtatggttatctgcggaacacttttttacgcaatacaggctgtggtgactcgtggtggacagtttgcatttatggatttagagatgaaatctgtatcaattgcacttctcaacaccatataccgaacagttactatcattattctggcaccgtttattaagcagattaacaagcttatgttctggataatcaaggattcaccggatgatgttgaagatcaggcggattttgatttgcttgaggagcgttttcttaggaaccctgagcttgctcttacgcaggtcggcacagtcatgaatggaatggcgagaaaagcacagaagaatgttatgagagcatttgacctgatggaaaattattctgttgaacagtacaatcttattcaggagaaagaaactgtaattgataagtacgaggataagcttgatacatacatgatgaagataactgctataggtcttaacaaaaatcagaccagacagaactctaagtatcttcacacagtgagtgattttgagcgaattgccgaccatgcctgcggaatatcgcgtgcggcgaaggagatagtggagaaaaagattaagttctcggatgatgccaacagggaactggctattttatataatgctgttaaggaagagcttgatatgaccgtgaagtcatttaccgaggataatatagatatggctcgacaggtagaacccttaaggataacagtgcgcatgctctgtgcggagcttaagagaaatcatatcgtgagacttcagagcggtaattgtgatgctatcaatggctttgtttttaatgaccttttgacaaatcttgagcgtattgtggcacactgttctaacatagctgttgcgatgatggaatttgagtccgatgatttcaatacgcaccagtatcttaaggatatgagaaattccgaggtatccgatatggcgaaggacgttaattactattcggagaaatattcaattgaaatgactgcacagaaagctgtgcagggcagatagtcgtgcagggcagatagtaccacggcaaaggacaagctattagcgtatatttataaagccccatctgacaggtaaagctgtgagatggggctttattattattttttactgcgattaaggcgtgtgaactcacgggcgattaccagaatggattcattgtattcgagaggaagtgttgacatcatggaaacaacatctttttgcatgtcatcttcggcatcttttccaaaaactattgtgtccagtgaaacctgaagaccttttgaaagcttgattagggtgtccacggacatggattttcgtccgttctcgatttctgataagaatgttacagatattccgactttttctgcgagctcctgttgcgtcatattaatggaacgcctaagctggtaaatcttattacctatgatacgattagtatcatgggaagtacaattcatataaaacctcctgtacattatttattgttaaagtaaaatttaacgataaatacaaaataccaaaaaacaaggactattgaaattaactagcaagtaatattggttaaactactgttgaaagtattgacataaataattatgtatgatgcttgtgtcaaaacatgcttatttaatgtacgagtgtataatacgctatacattctaagcttatagaacatgtttttatcactacatatctttaccactacattttattacaaaatatgaattccggaaataattaagtcggtataatcctggctgtaataggataacaatattcgattgtgtaacatttgccagcgcaacatttttcattattgaaatgtataaaatgaaacattataatatgatgttatagaataggaaaaacagagcatgaatatggggtaagaaaatgggaatagaattggatgatatattaagttttaatttttttcagtacggcagtccgtatatcggagaatgtggcggcatgcatttcaggctggcgcgcaatccgctggagaatgttgtgttcaaccatgacccacataaaaatgatgaggcattgttcgatgtgacgatatggagaggaccatataactatgataagacgaggcagaaaaagaccacagcacagtttccctttacggaggatgggcggcttgctgcggtacagtggcttaatgagaggtatgatgagcgtgtagattattgggcagatgggattcctctttttcctaaatataagactgacccggacgaaacggatacggttgaggtagatgagaatttgtctgatgatactaattaacaaaatatcaggagaaagggaatgtgctgttttatagtctgtaattatcgaggaaatccatagccgcacttgagaggggaatgttagagttgacgcaatagcttacctctcttttttttatgttcagattcgggggtgtcacttccatgagtgcaccggattcaagctcgctttttacaaattcgcgtatgacacagcctattccaagccctgttttggcaaattcgataagtagatccatgcttcctatctccatgagggttgtctgcgacagcattatatcattgaggtaggaatccacataggttcttgtaacattatcccttgtaaggagcatgaggttggctccgtggaaaagattgcccatatcagtgttttccctaagaagaaggttctttatatacccgggggatgccacaaaggtgtcatggatggagcctgcactatataatttaagccctctctgcgaatcgggtgttgcaataagtcctatatcaatatcgcggttgtcgattagcgtgcgcgtatgaagagaggactggcagttgatggagatgcttatatgtgggttcctgcgtacatatttttgaagtcttggcagaagaatatatttacagagggtgttgctggctccgaaacgtattctgccgatgccaagctcttttctggaattgagaagctgttcacctgtggctatctcattgaaagcgttaaaaatatgggaatataacagttcaccatcctcggtcagctgtacgccccttgaattgcggaagaacagtgtggtacccagttcattttccagctgttttaccgccttgcttatagcgggctggctgataaataaccttttggaggctgcagagaggttcattgtctgtgcgacggtgaggaatatattgtagaggttaagtgtggcatgatttatattggtgttattgttattcatatggtctccttgtgatataatggcggatagctgacccgaaaatgtaaatcagtgtatgagcagttgtataattgccggtacactgcaggctgctttgaaaaatggcttccttttaaggactgatttcttcgatatgctaattttaatgatattgtctcgaaggcagtggtggtggacataattgcaggcagcgtggaatatagttattataactgtagattataataactataaataatatgtattttaagaataacagaaaatgtgttattattcaagtaacaacaaatcagaccgatgggattattcggactgatgaacaggaaagaggaattattatgggtatgacgatgacacagaagattcttgcagcgcatgcaggtcttccttatgtagaagcaggacagcttattgaagcagatcttgatcttgttcttggcaatgatataacatctccggtagctatccatgagatggataagatgaagaaaacaggtgtgtttgataaggataagatagcgcttgtgccggatcattttgtcccgaataaggatatcaagtctgcggagcattgtaagtgcgtgagagagtttgcaaaaaagaatgagataaccaattattttgaggtaggacagatgggaatagagcatgcccttcttcctgaaaaaggtcttacagttgcaggcgatgtggttataggagccgattcgcatacttgtacttatggtgcgttaggtgcattctcaaccggagtaggttcaaccgatatggcggcgggcatggctacaggaaaggcatggttcaaggtgccttcggcaatcaggttcgtgcttacaggcaagccttctaagtgggtgagcggaaaggatgtcattcttcatattataggaatgataggtgttgacggagcact

SEQ ID NO: 3873 - DNA, 23486 bp, synthetic construct
  source 1..23486: mol_type = other DNA
  misc_feature 1..23486: note = Synthetic
ttactttagatacaggggatatggcattggtaaaccgttatataccgacacgttcctccgtatctatattaaaacagtatctgacaaatatcgtgcggggacaaggagaacatgcaacgatattgatcggtccttatggaaaaggaaaatcacatcttttactggtgttgctggcattactgtgtaaaagcaaagacgagacagcagaaatacagaaaaaaatcatagaagccgacaattcaacaaagttgctttttatggagcttgccgaagtgggaagaccgtttttgccggtgatcgtctcttcttttcagggagatttaaacgaatcatttatttttgcattacaggaggcattaaaaaagaccggtatcagagatctgccgcttccgagtgagtacagtgaagccgtccgtacgatggagagttggaaggaattctatcccgacacctatcagcggtttgaaaaaatgttagaagagagaggatgtaccgcctctttatttaaggaacgtttaaaaaaacaaaaagaagctacactcttagaattcaaagaattttacccggtactgacatccggaagtgttttcaatccaatggtgcaaaaagaagcacttcgggtctatgaagaggtcaaccgtgtgctttgtgcaaagtacggatatgccggcatttatatcatctttgatgaattcagtaagtatatagaaggacatgaagcaaagaattttgcaaaggatatgaagattttgcaggatatgtgcgaattggcagacagccggaaagaagagcagatgtatctgacctttgtggcgcataagagtatccatgagtatgtcaaaagtattgattcggaaatgatccaggcattccgtggggtagaagggcggctgaaagagatccggtttgtagtttcttcccagaataattatgaactgatcgagcatgcactgcataagaaagagggattttatacctcggaaatacaggaaagggcagaagcgtcttatcagcttgcctgtttttcacatctttttgaaaaagaggattttaatcagatcgtagcaaaaggctgctatccgctgactccggtatgtgcatatgcactgctgaatatcagtgaaaaaatcggacagaacgaaagaacggtttttacatttttagcgggaaacgaaccgggcagcctgaaccgcattatggagggcaggaacagagaaaatctgatcggtgtagaatatgtctatgattatttcaaaaatctgtttcgggagactgtggatgagacctatatccataacgaatggttaaaagcagagtatgctttaacgaaagcggatacggagattgaaaaaaggatcattaaggcaatggcgatcatccgtatgatacgccgcccggaagagttagcggtactgaataagccgatctgtctggcgttgaatatcgaaaaagaagagtgtgacaaggcaatgcgtgagctgatgaaaaaagaagtgatctttttccgctcaagtcttggtacctatgcatttaagaacaatatcggtattaatatcgaggaggcgattgaaaaagaaatccggcggctgcgtcatagcatcaatacctgtaaagtgttaaacgagatttccgaactgacctatgccgttccaaaacagtacaatcaggaccgtgcaatgacaagatatttccgatatgaattcattgaatatgaagacttcctttccattggcagtgcaaaggtctttttcgagcaccgtttttccgatggatatatcttagcgatcgtgacagcagacaaggtagaaaaggaaaaagtgctgcgtcatctgcgggaattaggggatgaacgtattatcgtgttactgcctaaagaagaatttttatcggaatgggcgcttttgcgtcttgcggcagtcagaagccttgcaaaggatgagcattttattgaagagaataaagcgctccgtcaggaattagacctctatgaagaggacatccgctatgaggtaaatgagagattaaagagagattttatgccggaaaacggcggctgttatgtacttcatacaagcagaaaagagccgcatatccggaccggaatggaatttaaccggtatttaagccagatctgtgaagactactattcgttagcaccgaggatcaaccatgagcttttgaatatccagaatgtgcagggacagtacttaaaggcaagaaatgatgtggtaagagccattttagatggaaaagatctagaggaatatgagcggggcagcagtcctcaggcaatggtgtatcgtgcggcatttcttcggacaggacttgccggagaagatttcccgttagacggcggctgtcgaaagatcatggaggagatcgaagacttttttgtgaaagcaagtggaaagcgggtatcttttcagatgctctatgaacgcttgcagggcaaagattatggggtgcgaaaaggtgtgcttccgctgtttcttgcgtggaaattttatctgctagaaggcatgccggtgctgtaccttggaaataaggaactgctgatcacggtagaagtgctgaacaatatcaaccagtttccggaaagctatgatctttatatagaaaagaaagatatggaaaaagagctttatttacaggaaatggaggatatcttttgtgatgcgcagacggaaaagatcatacgttccaaccgactttccgtcattatggaaaatatgcagaaatggtaccgttccctgccgcagtatacgcgggtcagtgaacgctatccgcaggaaatgctctatgcggtcagaaatttccgaaggttattaaagcagacggagttaaatccgagagaatttttgtttgagcagcttccgaatgccatggattcttctaaaaatcatatgacagggctcttagtcagggaaatgaagcggagcatggatacgcattttgaaaatgcgatagaagatacggcaaaggagatcaaaaaaatatttggtgcaaaagaaagcgacagtctcaaggcatgtctgcaggactggtatggcagacagcaaaaccgttccaaacgctatgtattgaacaaaaagatcaagagttttatggaatatgtgggagaactgaataccaacgacgagcaggagattgttgccgtattatccaaacgtctggaagatatctatattgaggactggaatgacagattacaggaaaaatttctgcgtgacattacaaagatacgccaaaagacagaggcggcaaaggaagatgccggtttagagaacggacaaaaagagattttcctaaagacggcggatggagcggagatccacaaatattatgatgcggatgtaaaagacagcaccagtgaatttttgaaaaatatgatcgaagaggcactggataactttggagacagcttagagacaaatcagaaagtggctgttttagcggaggcattagaaaaactattacagtagaggaaacatcatggaagaatacatttatctggacaatgccgcaaccacttttccaaaaccggaggcggtttatcgggcattggaccgggcaaaccgaaatgcagcagtcaatgccggacgcggcagttatgcattggcagaacaggcaaaacagttgatcgaagatagcagagggttacttctgacactcacaaaagcaaaaccggcagcagaggtagtgtttacaccttctgctacctttgcatgcaatcagatttttggagggcttccatggaaaagagaagatattgtctatgtttcaccctatgagcataacgcggttatgcgtaccctgcattttttacagcaacgctatggttttgcaatagaggaattgtcggtagatgcagggaccttagagcttgatttagaaaaaatccgttatcagtttatccaaaaccctccaacggttcttgccatgacacatatcagcaatgtcacagggtatattcttccggttgaagaagtggcagctttgacagatacggaaaagacgacggtgatcgtggatggttcgcaggcattgggattgatccctgtccgtctggaacaaagcggcattgattactatatatttgcgggtcataagacactttacggaccgtttggagtcggcggttatatcgcacaatctacaggaaatgcagaaaaattaggacttgtgatcgcaggaggaaccggaagcaattcactgaatttagagatgccgcagcttcttcccgaccgttatgaaccgggaagtccgaacgtaccggcgatcgcgggattgaaagcggcgatagaaacatttggaagtaattatgaaaaaatgtgtcagaccatagaggagcattatcaaaaagaacgggaactgacggaactgttagagacagagcttcaaaaaatacagggaatccatacttattttccacaggataaggaaaaaaggagcggcatctgttcctttacgatcgaaggatattcttcggatgatgtaggaatgttgctcgatgaagattatcatatcgcagtccggtgcggctatcactgtgcaccgctgatccataaatacttaaaggataaaccatacgggggaacggtgcgtgtgggcatcggacagtttaatacaaaagaagacatcaggcaactcatacacgcagtggaagaaatcgcaagggggtaacaaaagtgaacgacgatttaaaacgggtaaatttaagagacattgtagacaggatttcggagaatacgatcgtactgccggatttccaaagaggctttacatggaaggaaaacaatcggcagaaagcgctgttagcatctgtcctgactaagctgcccataggaacggtcttatttttaaatgtaaaaacagaggactatggatacaagaaaataggaaagaatgaaagaaacattgacaatttagagggaaagcaggaagtaaaggcgctgttagacggtcagcagaggatcacggtcttaacggcattcctttccacgaaacttcaaagagaaaatattgacgatctcgtatcaccgacactggagcggcggtatttcttgaatcttccaagttttcaaagtgtgatagatagcaaaaaagaagatctttttggtggaacgatcttaagttttccgaattcttttcggggaaattatccggaaatttccagtgaggagatgaaggaacggatcacttttgtgcatgatcgaaagaaagcatttttatatgaaaaagcagaaacgaaggatacccgcgaaattcgtgaatattgcagaaatatcgacaacagtgaagatggtgatgcttatctgctgccgttgttctatctgctggatgcctgtgaaccggggtcatcgggtgcggttattcttgaggatgtagtcaaagaaatcggggcagagtatgagaaatccattagatcatggcttcaggcagaggaatatccaatagaagagaaggaacagtatttagaaaaattcggacttgaagatgcacaaagagaggctgttttagaagagatcaagacaggaacactttttttaccaaaagaagaaagagaagataatttttctgaccgtttaaaggaacggaaaatgcagtggggaatgcacctttgtgaatatctgagaaaatgtattgaggatatccggctttatgagattgcaatttccgtcaatgataaaaagcgcgccattgatatctatgaaaacctgaacctgggaggaaaatccctaagtgtctttgatctgatcttagcaaaggcatccagacatacgcaggagaagggaaatctctttacacagatcgtagatgacatagagcgtgaccacagggaggaatatacctcatttgtagaaaaatgctcaacgggtcagaagaacagttataaaaatcacattgcagacagcgacaaaccatattcggcagtgggacggatcggctgctgggataaatctcaaaaagagctttctgctacctacataaaggcattgatgaaccttttgggtatcattgactatttttcagaaggagatccgggatttagtctgcgtgatgctgagaagatccaaaacctgaacgtgaaagtcacaaaaagagaatatctgctgcagattccatcagaaaaaatatacggttatgtggaggtggcatgtcagggcttagaccgcgcagccttatttttacagatgcggtgtggaatccgaaagcttggtgaaatacattacaatctgatgtgggttatcttaggtacggtatttttagatgaagcatggtttgaggacagtgaagtcttagattatatggaagtctggtattggagtgcgattttatcgggagagttcaagatagagcagaaccgggcatttatccggaatcttcagaatgttttatctgagatccaaaacatcaaagaatctgataagaaattcacaaaagccctttgcaataacgtactgacagataaaaaatttgcagaccgtgacattgttttaatgaaaaatccatccgtatatccggaggaggtaattgggaataccatctgtcaattttatttatcagagacatattcggatattttaaaaccgcttccggagaaaaacgactatcagccacaaacactgagtgcattgaacaattccgtgaagctgcaaaaacatcacattatgccgatcggaagtcttagcgtaaagtataaggatgccaataaaacgacagaaagccggagaaaagacaacagcagtccgtataattcaccgttgaatttcctgctgatatcggaaaaagcgaatgggctgatccaaaatagtacactgaaggaatactttgaattttgcgatcagaccgcattaaataatgtagacatcaaagaccatacatttaccgatatgtcagatcgggaaatcggataccggatcggtgacgaagcattgcagctttttctcgaaaaaagatatgacgattttaagagccgtattacgtcgaagtgtcggaatttattgaattgtccagacatttgctgcggagagggaggaaactgatatggaaaagaatcgggacagcatgatgcagacattgaagtttgaagttttgcatatggaaaagaagaatctgcgaagcaaggcaaagacagatcagcgcatgtcagaggaattgcagaaaatcatcaaggaatatgcaagagggataacggaatagggggacaggtatatgaaatttgaaagtattaccatggaaaatttcatgcggtataagggcaggaatcatatagaattcagctgtgatgatgtaaaaaatgtaacagtagtattaggagacaatacggttggaaaaacgacgatagcgcaggcattccgctggggactgtatggtgcgttaatggcaaacgggacaaaaagtgccggagattttcagcttttaaatacggatatcttagaaatgatggatgccaacagtcgtgctaaggtaaaagtagagattgcagcagttgacgaggaaaaacgttatatcatcacaagagagacaacctataccagagcatttccaaagttagagagccgggagtttcagaagaaatgtgcgatgcggattaccgagttagaggacatggaaagttatgtcgaggtagacagcaacgagatagagacattgatcaatgaactgtttccaaagaacttgtcccactattttttgtttgatggagaacggtggaatgatgtcagtgtaggaggtgtccgggaaaatatcaaagaatcggtacatattttaacgggattatctgcatatcgcgaggcgaagaaccatttaaaagatatgggaagcaattccgttatcaaaaaattccgttcagagatcaagggatcgggtgcagtctatgataatttagaagcagaacgaaaaaaattagagcgtgatatcgaaaagctccgggatgagattgaggtactggaagtcaatatccggaattatgagaaaaagaatgaagatatcgaacgtttcttagcagaaaaccacaatacggaagaattgcaaaggaaaaagaaacatttagagctattgtgtgagtcccagagaaagcaaagtctttattcttacaagacattggtaaatgccattagcgataaagcctatatggtatttgcccggtcaatgctccgtgcaagtatggaactattaaaaagtgcgaaaatggaacgacgtgatatcccatatatgcgtcaggcaacgatagattacatcattaagaacaaacggtgtatctgcggtcatgagattaaaaaagacagcagagagtattttgcactgatggagcagcgaaattatctgccgccggcagatgtcggttccataataggggactttgagagaactgcaaaccgctggtaccgcaaaggtgatgagctgttagaagagattgatgattatgcaaaagaagtagacgagaatgtccgggaatatcatgattcctgtaaccgttatgaaaaactgcaaaagcagttagatgaacatattgattttgcagagaaaaggaagacacagcgtttctataaatcggagattcagcgtttttctaaggaaaagggagaaaaagaaggacggatcgaagcctgtaaaaagagaatagaaaccacggaaaaagagatgcaaagcctagaagcaagaaatgagcggaatcggatctggcggcaacgcttagagatagcagaggaattgtaccggcagctggataaagaattttctgagcaggaaaataagatttttttggagttaaaccggcagatacaggagaatttcagcaaaatgtttaacgcaaaggataaaaagattgaactgacaccgaagtatgagattcagatgctttaccgtacgcagcagggataccgggaagagaaaaatctgtccgaaggcgagaaaatagcaaggaactttgcgtttattgtaacgatcatggatttcagcagaagaaagaaacaggaaaagaccgggcatgagacagcagacagtgacacccttccgatcgtattggacggaccgttttctaagctgggagatgaaaatatcgaattgatcgcaaaggtgctgccacaggtttcggaacaggtcattatctttatgttgaaaaaagactgggagtatacaaagttagatccttacgttggaagcagatattacattgataaaaaaccggaagaatcatttgcaacgatcaaaccggcagggaggagacagtttaatggaaaattataaattttttaacgacccttataaattttcaggtaagcatgcccgtatggtaagcgaactatggtcattaaatgactatgaacatagttattttaagcgattgatagacatctatatcgtagctgcgattctgggattcagaattgacagaaaagccaaaagagattatgcaccggtagaacagagaaccgtatttggggagcagatgagacaagcatcagaagatttggagttcatcctgcagatgatgctgttattagagccggcagggcagggaatccatgaagagtgtatccggcgggcgtttaaaggagttgaaacagaagaagagttcaaacgctataatgaactgtttgaatcttatatgcttggtggagtggaagaactgtatgaaagattggtacttcagaaagaagaaatagatacagattacagtgatgataagacagcaaatctgatgatgttatttgaacgatttgctccgaagaaaacctcctaaaatttttataaaatctcagaattgttaaaaaatcagtttacaaaatatgggaaaaacggtataataaaaaacgaattatactataccaagaaataatctgttattgcagtatggtaagcaaaaccgaaaagctctaatcccattcttcggaatgggattatcttttatatggattttataggaatagtaaaaaagacaaatttttagtacacaaaatgttccgcacaggcggttctgggaggagaaaaatttatgggagaaatgagtaagacaaacatggacaggcacaggagttaccggatcggactggatatcggtattgcatctgtaggatgggcagtacttgaaaataacagtcaggatgaaccaatccgtattctggatctgggagttcgtatttttgaggcagcagaggttccaaaaacaggagctgcattagcggcagaacgaagagatgccagaactgccagaagaaggatccgcagaagacgtcatcgtttagaaaggattaagtggctgtttgaaagagaaggactgatccaaatagattcttttatggagcggtatcattcaccaaatctgccggatgtctatgaacttcgttatgaaggtttagaacggaagctgagcaatgaggaatttgcacaggtactgttacatattgcaaaacatcgtggtttccgctcgacaagaaaggcggagttaaaagaaggggacaatggaaaagtcttaaaagcaacagaagagaaccgcaaacgtatggaagagcatggctaccgtaccgttggcgaaatgatatataaagatgcctattttcatactgagtgtgcgtgggcagacaatggatatctgttaacacctagaaataaagcagatgattattcccacacaatgctccgggcgctgttagaagaggaggttcacatcctttttgaatgtcagagaaagtttggaaatgaaaaggcgactgaaaaattagagcaggaatatttagaaattatgttgtcacagcgttcttttgatatgggaccgggacagcaggcagacggaacgccgagcccttatgcaatggagggatttggaaataaggtcggatattgtacattagaaagagaatccggcgaacgtcgtgcggcaaaagcaacctatacggcagagttatttgttgcactgcagaagatcacacatatgaaattggtacatatggatggcacatccagattttttacggaagaggagcggaacattttattagaaatgctttcgtccaaaaaagagattaaatatgcagcagtccgtaaaaagctgaatctgccgttagaagaaaagttcaatacattgaattataatatgaagcgtaaaggaaaagacaataaagaggaagaagtggatgaagctgccataattgctgcaacggaaaaggcaacttttatcagtatgtccaattgttatgaataccgcaaaagaatcggagaatatttagagaccctgccggaagaagaacaacaggatctgttagatgaaattggaacgattctgacctgttataagaacgatgacagccgtatgaaccgtttgacggaggcaggtctgtcgaaggaactggcggattctttgctagagctgacacctgcgaagttccagcacctttctataaaagcaatgaaaaaaatcatgccttatatgaaagaaggtatggtatatgataaagcatgtgaagcagcgggctatgattttaaaaatgataatcatggaaagaaaatgaagctgctaaaaggcgaaaatattacagaaaccattaatgagattacgaacccggttgtaaagcgttccgtttcgcaaacggtaaaagtcatcaatgcgatcattttaaaatacggaagtccacaggcggtaagtattgagcttgcccgcgaaatgtctaagaatttcgaagagcgaagaaaagcagagaaacagatggaagaaaaccgtaaaaagaatgaaatggcaaaaaaggaaattcaggaactgggcaaactttcgccgaacggtcaggatattttgaaataccgtttatggcatgatcaacagggaatatgcctttataccggtaaaaagataccgttagaagaactgtttcagccgggatatgatattgaccacattcttccttacagtatcacttttgatgacagttaccggaacaaggtgcttgttacttcacaggcaaaccgtgagaaaggaaaccgcaccccatatgagtattttggtcaggatgaggtccgttggagtgcctatgaagcaagagttaatcattttatcaaggactataagaagcgtcgcaatttgttaaaacagggatttacaaaagaagaccgcagggaattcaaagagcgtaatttaaatgatacaaagtatattacacgcgtgatctataatatgatccgtcagaatttagagatggagcctttgaatcgggaagacaggaagaaacaggtctttgctgtcaatggttccataacagcttatttaagaaaaagatggggactgatgcaaaaagaccgttctaccgacactcatcatgcaatggatgctgtagtagtagcctgctgtacagatggtatgattcaaaaaatttccagaagtacacagtatcgtgaggtcttatacaaaggacagagtcacccggattatgagattgtggatgtggagaccggcgaaatcatttctttagaagacctttcaagagaagagtgggacgagcgttacggagcacaggtaccgccgccatgggagcattttaaagaagagttagaagtccgtatgggaagtgatccgaagaatgatctggacacacatccggatatgtaccagttgttccgttatccggaagatgtgtataacaatatccggccaatctttgtgtcaaggatgccaaatcacaaggtgaccggtgcagcacatgcagatacaatacgaagtccgagacattacaaagacggtggagagatatttgcggatggtggctatgtattatcacgaaccaatattgaagatttaaaactggataaggatggagagattaaagattactacaataaggacagtgacagattactatatgaagcattaagggcacgactggcagaatatgatggtgatggaaaaaaggcatttgccgaagagttttataagccaaaagcagatggtacacagggtcctattgtaaaaaaagtgaaaacctataaaaaaatgtctcttggtgtggaaatcaataaggatgaagctggagttggacgcggaattgccgaaaatgcaaatggcggtatgattcgtgtggacgttttccgggaaaatggaaagtattattttgttccaatctacattgcggatgcattgaagaagagattgcccaataaagcagctatgcagaataagccatatagtgaatggaaagaaatgaaggacgagaactttttgtttagtctgtattcgagggatttgataggatttaaaaatccaaaaggtaagaaagtgcattgtacggatggtacagaaattgtattaacaaatgaaattgtatactatataggtgctaatatacgtacagcaagtatttcctgtaaggcacatgataatcaatatgagtttggaagttttggaattcagtctttacaagaattaaaaaaataccaggtggatgttcttggaaatgtaacagaagttcgtcaggaaaagagaagagggtttcagtaaatgggataccggaatataaaaattgaaacatcccagcagctaaatattaaaaatagtcagcttttgataggttcatccggtgaagtgcagattcctttagaggatatcaacagtattctcatagaaagtcaggcggtgacgctgtccagttatcttttgcagaaaatggcagaaatggggattgcagtgtatgtttgcgatgagaagcatttgccaaatgcagtgcttctccctatggtacgccatagccgtcattttaaactgttaaaatgccagatgaatcttggaaagccaaaacaaaaaaggctttggcagcagattgtgatcaggaaaattgaaaatcaatcagcctgtcttagattcttaaatttagagggtgccgaagagcttttaaaaatgtcaaaacaggtacaatccggtgataaaacaaatgttgaagcaaaggcagcagctttttattttcgcaggttatatggtttgggattttccagaggtgatgatcatatcattaactcagcgttaaattacggatatgcaattgtgcgtggaatgattgcgcgttctatcatttgttatggattagagccttctttgggattatttcatagtagcgaattaaatagttataacttagcagatgattttattgaggtatttcgtccggttgtagatttgcatgtttccggtcgttttgacatatcagaggttaatcgggcattaacgcctgaaataaaaagagaattatatggaatagtaaattatgacatgttggtaagaggagagaagcatatactgagtaattgcattgacaaagcagttgcaagttatagcagtgcattgcagggaaaccgtgaagaattggaacttccggttttaatggagttacaggtacatcgttatgagtaaatttatgagaatgattgtgttttttgatttgccggttggaacggcaagagaacgaaaagcggcaacaaagtttcgcaattttttaattaaagatggataccatatggtgcaatattcggtatactccagaatctgcaatggaaatgatgcagttgaaatgcatgaaacacggctaaaacagcatctaccgtcaagaggctctatacgattattaactattacagaaaagcaatacgaatctattcatattttgttgggagaagctgtctttgacgatacaagcgaagcgacagagctgattaatattttttaaaagatagaaattttctaaaaaagtagtaaaaataggaatttttttaaaagagaaaccccgcataatccctatggttatgcggggttgttgctgtcctattataccataccaagaaataatagggaactacagctgggcttcattaaagaatgagagcccgtcaattataccataccaagaaataatagggaactacagcctgtgggatgagtgggaaggcatctataccattataccataccaagaaataatagggaactacagctagggaagcaattcccgaaaaagttcatttattataccataccaagaaataatagggaactacagctgctcctgaagtgatgtcacatctctcataattataccataccaagaaataatagggaactacagcatcagatatcgcaaaccctcttttttttgtattataccataccaagaaataatagggaactacagctttacgccaaagaatctcttaagcgggtctattataccataccaagaaataatagggaactacagcaaacggttgagcacacatcttcacaagttctattataccataccaagaaataatagggaactacagcaagcgccgcctttacgtcagccttcttgatattataccataccaagaaataatagggaactacagcgtgttcaggatcgaagcactaccggcgacaattataccataccaagaaataatagggaactacagcgcgactgccgtctgggctactgtggcagctattataccataccaagaaataatagggaactacagcccctctcggagaaatgcacgcttttgatgtattataccataccaagaaataatagggaactacagcagttccggctgaaaggctgaaagaaattaattataccataccaagaaataatagggaactacagcactataggcgtactctacgccgtttacttattataccataccaagaaataatagggaactacagcagctttttcaatattttttaacttttttatattataccataccaagaaataatagggaactacagcatcgacatttacccacaatttctttgcaccattataccataccaagaaataatagggaactacagcgggtcacggttgggttgcggaatttaatatattataccataccaagaaataatagggaactacagcaagacatccttataaaagattgttccagctattataccataccaagaaataatagggaactatagcctgctcgtctatttgtacttcctctgttgtattataccataccaagaaataatagggaactacagctgtcaagggtggtatgggatattggaatcattatccataccccaaaataaaaaaataccgttgcttagaattatataaattgtataatacactattttatccaactatacctgcggtataaataactaaaattgcaaaaattcacaagcatttacttgaaaatcatttcacagctcgctttcagaaaagtcccacaccaccctttacaaaaactttccctagattttacaagcatctgatagcaacaaaaaacatgaatttgctacattagaaataagaataaaagacagatgtgaaatggagagcagaatgaagggaaaaaagacactggtatgggcacaccggggagccggtaaatatgcaccggaaaatacactgccggcattccaaaaggcaatagaaatgggagcagatggaatcgagctggatgttcagatgacaaaagacaaccaatgtgtagtcattcatgatgaaacgataaaacgtgtcagcaatggaaatgctcaggtcaaagacagtaccttagaagaattgcgggaatttgattttggcaaaggatttacggaatacggaaaagtgcagataccgacactggaagaggtactgcagctggtagtaccatccggtctgaccatcaatatagaattaaaaacaggaaagatctgttataaaaatatagtggatgaagtgctgcggctggtctatcagtatggatatcaggaaaaagtgatcttatcctctttcaaccactataccttgcaggaaatccgaaaaaaagataagcacattcagacaggacttctctatcgggacgggattgtcaatgtatgtgaatatgcttatcgggaaatagggacaaatgcgctgcacccggcgctgtataataccagatataaggaattttatcagcaggcggaaaagttttgtcagaaaatacatgtgtggacggtagataaagaagcggacatccgggaaatgtgccgtaatcaggtagatgcgatcataaccaatgatccaaagtccgccaaaaaaatcgtagatgaatatgagaatggcagtctgataccggaactggtaaaaaagatgaaaaagttataaaaaagaaaaatataagcctcgtggtttttggaaaaagcagaaaccacgaggctgttttaaaatatgcaagaaatatgactgaaaattataaaaaaagaattaaaacaattgaaaagatagaacaaaatgatataattaaaacaatagtcagaactatagggggaaagctataatgtttctgaaaggaagggagaaggcatatggtacagtacttaaagaaaatttttagaacagaaaagatcagaaagaaaattatgacatcgtttattgttgtcatcgtattgatgtcaataggaacaacattgggggcaattacgttgttctatacgacaaggcagtataatgcagcattggaaaactatggattttcacagggggatattggaaaggcaatgatttcctttgcggatatgcgaagtgcgaccagagctggcatcggagaagatgatacagaactgatagaagcgagcgtgaaagagcatgatgctcaggcggaagaatgttctaaaaacatgaaactcatcaaagagtgtttaagttcaaaagaagaaaaagcaatttatgaaaaaatagaaacgaccatgagagaatattacacaatagaagcagaagtacttgagcttggaacgacgaaagatctgagcaagagtgtgcaggcacagaaaatggcagcagagaaattagaccctgcttatgatcaagtgtatgacaatatgaaagatttattagaccttaaggaaaaagaaggtaatgacttaaagagtttattgttaaaagcaatcaatatcgcagtgatcatattaattgttgtattaatcatcagtatcagcatttctaatgttttagcaagaaccgtatcaaacgcgatcgcaacaccattgcaggagcttgcagagcggctgaaagcatttgcaaaaggagatttaagcagcgagttcccggttattgatacacaggatgaggttgcggatattgaaaacgttgctcgtgagatggcgcagaatctggacgtgatcatcgaagacatcaaatattgtatgggtgaaatgggaaatggtaactataccgtaagaaccagtgcagaagaaaagtatacaggagattttgaggcacttttattatctattcgtcagatgcatagaaatatgaacgataccttacaccagatagatgattcttccattcaggtacttgcaggttccgagaatttagcacaggcggcacagagtcttgcagaaggtgcaacagaacaggcgggagcagtagaagaattgttagcaacctttagtgatattacatccggcgtggaaaagacggtgcagcatgtaggcgaagcaggaagcatgtcacgccagtatgcggaagatgcgaaaaagagcagtgaagaaatgaaagacatgatggcggtcatggcacatatgagtgagacatcacaaaaaattggcagcatcatagatgagatagaagagatcgcatcccagacaaacctgctttcactgaatgcaagtattgaggcagcaagagcaggcgaagcaggaaaaggctttgcggttgtagcgagccagatcggaaaacttgcagacgagagcgctcagtcagcagtcaacaccagaaatatgatcatgaccgtcattaatgaggtagagagcggaacaaatacggcacaaagaacagcagagacactggaagaagtagtacagggagtcggacagattgcagatgtaacagaagaggcagaagagctggcaaagactcaggcagaagcaatgcggcaggcagaagcggcattgaatcagatatccgaagtcgtacagtcgaactcagcgacagcagaagaatcctcagcaacaagcgaagagctttccgcacagtccgaaggactgaaagatttagttggtaagttccagctggatgcagtataaaaacagaaaaataaaataatagaaaaaaggagagttttttaaaaaagccccttaagaaaatccaaatacatccgataacttatataagaaaccagtaaaaaaggtttttgcacctgattttcaaggaagaaaggagatgccgttatgcgtatagatgcatataatcagatagcacaactgtataagaccggaaaaagcatcagaacgaacaaagtaaatagtacagcttctgttcgcgatgaggtacagatttcccagacagctcgtgattatcagatcgcaaaacaggcagttgcaggggcttcagatgttagggaagataaggtggcacagctaaaagcaagtatgagttctggtaattacagcgtagaaacggatagcttcgcaaataagttattagagaaatacaaggctgcaatgatgtaagtgaggacagaaattggctagtttgatgaacgaacttttggaagttctggaaaatgaagaagcgggttaccgcgaattggtagaggcatccaccagaaaaaaggaagtcattattaaagcggatatcagagctttggaagaaattactgcagaggaacaggagattgccggaaagatcaagaacattgagaataagcgaatttccattatggaagatattgccaatgttttaaatcgcaagccggaggacttgacggtagatgccctgttagaaatattagcgaatcagccaaaggagcaggaacaattagccaagatccgcttacagttaaaagataccctgacagaaatgaagaatatcaatgaacagaatcagacattagtgaaccaggcaatggaactggtggagtttgatatggcattgttaaagagcatgagacaggctcctgaaactgccaactataacagacaggcatacaataccggagagcttttaggaagcggcggttttgatgcgaaacagtaagatggcaggaggaacatgtaatggcaaacggaatgggtacgctatacatagcatcatctggactgcgtaacagccagaatgcgttgaatacgactgcgaataatcttgctaacgtagatacggaagggtatgtacgtcagcaagttttattttcagacaaagaatataatacatttggtacggctgcagtcagtaagcagcaggcaggtcttggccttgacattggcgacgtggttcatgccagagattattttttagataaggcatatcgtgcagagtccggaagacaggcattttatgaatcctgttttaccgcagtagacgagatacagacctattttcaggaaatggaaggaaagaccttccagtcggcattggaagatttcaaaaaagcatttcaggaacttgcaaaagatccgtcagattccgtaagacagaatctggttgttcagaaagcaggtttattcctgtcgcgctcccaaagtgtatatgaaggtttgaaatcctatcagtccaatatcaatacaaaggtatcccaggatatagacaaaataaataaacttggtcacaagatacatgaattgaaccaacagatcagtaagatagaagccggcggtatagaaacggcaatggatctgcgtgatgaaagagatttagcgcttgatcagttaggagcgcttgcgaagatttcatataaagaagattacaagggcgttgtaacggtaaagttagaggatgaatactttgtcgatgaacttcacacatatgaaatcggtaaaaagacagataaactgacaggctttatcacaccatattggccacagctttcagataccgacagagatatctatgtaaatgtgtttgacttcaatgtagacatcagtacagcattaaacagtgatgttggagagttaaaagcactgatcatgtcgagaggtgaccattgggcagactattcagatattgaaggaaaaggcgagcaggagtatctggatacaacgaacctttccgtgattattgatatgcaggcaaagttagaccagatggttcacaacatgatcacggcgatcaacgatcagctttgcccgaatgtgacaggtccggtcggcgttacctatcaggatgccaacggcaataccgtaaacctcagtgatgcaaaagtacttgatacagagaactgtgcaaggggaagtgatggagaacttccaccgcgtgaactgtttgtcagagcagggatcgagcgctatacagaagtgaccggaagtgatggtaaaacctattatgtatataatgaggaagataccagtgatacttcctatatgtatagtttaacgagctgcggagtaaatgaagatctgaaaaaaatcgaaacgttattccctcatttgaaacagaacggagaagtagaccagcagcttggagaaaggttagaggcactttggaataaggacttagtcggacttgatccgacagatccggatgaatgtaacatagaagaatactatcagaaaatgataggaggtcttgcaacggtaggaaatgtttaccagaagaaagcagaaaaccttgcaggaagtgttctgacaatagaaaataaccgtcagcaggtcatcggagtgtcttccgatgaggagcttcagaacatgataaaattccagaatgcatacaatgcatccagtcgttttatgacagtgatcagtgacatgatagaacatatcgttaccagattaggaaatggttaaggagggataagaaatgccatctacattttatggattgaccattgcgggttcgggattaaattcctttcagactgcagtgaatacaaccgcaaataatatcgcaaatgtgcagacggaaggatatacccgtcaggtagcaaatcgtaaacaggcagaatctctccgtgtatatgcacgatatggaacaaccggaagtggtgttaccacaacttccataacacagatcagagatgcttattacgatgtgaaatattgggaaaataattccagccttggtctgtatgagaaaaagttatattatatgaaccaggtagaggaatattttaaagatgatgacagctcgaaaggttttacaacgattttaaacagtatgtttaataatttagagtctcttgcaggtgcaccgggagatttagacagaagaaaaacctttatcagcagttgccaggattttgcaacctacttcaacagtgtatccatcggattgaatcagattcagaccgatgcaaacttagaagttaagagcacagtggataatatcaatgcgatcgcacaaaaaatcgcactcctgaacaatcagatcaatgtgatcgagatgcagggtggtcatgcaaatgagctgcgcgatgaacgtgcattgttgatcgatgagttgtccaatattgttcctacggaaacacaggaaacagaagtaatgaacaccaatgacgagtattatacaggttgtaccgaattcagagtaaagatcaacggacagcttttagtagacaccagagaataccgtacactggaatgtaaaacaagagatacaaaagtaaatcagtcagatgtggatgggctttatgatattgtctggtcagataccggcaatacctttaacgcaacatcaaagtacatgtcaggaaccttgaaagcactgttagatacgcgtgacggaaataacgaggagaactttaagggaaccgtggactacctctatggaacgaagctggtgattacgaacacgacacagaacagcatggaaaaaatgaccatggcagaagaaggagtcatcacgatcgataataagaaatttgaatacagcagctttaccgtagactatgatgcggcaggcaatgcaacctatacctttgcattgaaggagccggcgggagacggagcggatctgcttgcaggacatcaggcacagatcggaaccggcattgatgcgatgggagttccgtattatcaggcacagatgaatgagtttttaagagcattctgtatgaagtttaacgatatagagatgcagggacaggatttgaatggagatcctatgaaagcattctttgtggcaagagatctggttacaggagagcaggaagatttaaataaatccgatacctatacacagatcacatctgcaatgtccagttattataagctgacggcgggaagttttgaagtggcaaaagcaagtgtgaaagatccaaacatcttcagtaccacagcagatattgtcaatggaccggataaggcagaaatattagaactgttaaagccattaaaggaacaggaaaaattatatcgtggaagtggtgcaaacggatttttgcagtgtatgttatcagatatcagtgtagataccaatgaagcaaaactgttttatgagaaccacaaaaatatctcacacacgatcacgaaccagagattgtccatttcaggcgtagatgaagatgatgaagcgcttgatctggtaaaattccag

SEQ ID NO: 3874 - DNA, 23471 bp, synthetic construct
  misc_feature 1..23471: note = Synthetic
  source 1..23471: mol_type = other DNA
tgaatgaatatctggataaactggataactatggctatatctggctgaaccgtacggcggggctggatatggtatacaaaaacgaagagaaaaattgggagccgcagaaagttgcggaattatattatgaaaaataaagggaacgatgaagatgaagagactgaaagatttcgttgagatagataaaagatttcaaaattccataaatttacaactggatttgcaggatgataccaagctggaaagttatattccaaccaaatcatctttattaattctgcaaaaatatctgaaatccgtaatgggacaggaacaggaaaaagcaacgattctgattggaccttatggaaaaggaaaatcacatttactgctggtattgttgcagattctttctgcaccggaaaatgaaaaggtaaatgacctggttcaaagaatcagcaaattagatgcagaaacagcagaattggtggaacagtaccggagtaaggagaaaaaattccttccggttattgtatccagttcgaatatgaatctttcggatgccttcgtcttaggactgacagaagcattgcagtatgcaggacttagcgacattgttccggacagctattataaggaagcagaaaaggcagcggataactggatggaaaattatcccaagacttatcagaagtttgcagaactgatgcattcagagcatggtcgctccattgaacagtggagaaaacagatggataaaatgcaggaagatgccttagaagcattccgggaaatttatccgaaagtgacttccggcagccagttccagccgattgtaaatattgaaaccatgaaggtctatgagggcatcaatcgtattttatgtgaaaaatacggttatgcaggcattttccttgtatttgatgagttcagcaagtatgtggaaggacatgaagaggcaacctttgcaagagatatgaaggtattgcaggacatgtgtgagctggcaaattccggcaaagaggaaattcatatcgtatgtgttgcccacaagagtattaaggaatatggacatcagttatcaaaaaatataaaggatgcttttgatggagtagaaggaagattaaaagaagtccggttcgtagtatctgcgaagaataattttgaactggtgatggacgccattcataaggatatagaggaatgcagacgtgtggcagcaaaaaatgcagagtggaaaaaggtgttagaagatacctatcaactgccttgcatttctgcactttttgaacaggaagagtatgacacagtagtaaaggaaggctgttttcctttgctgccgcttaccgtttatctgttattaggagtcagcgaaaaagtggcacagaatgaacgcagcgtgtttacgtttcttgcaaataatgagccgggttcactggtacgcctgattgaagaagatgaaaaggaagcccatggaatcggtgcggcagtcgtttatgattatttttccagattattccgggaaaatacagaccttatccatattcatgcggaatggctgaaagcagagtatgcccttggaaaggcagagtatgaggaagaaaaaaacattatcaaagtaatggcattgcttaagatgatgggaaatgaagaagaacttccggtaaatgatgaaagcatctatctggcaagcggactggaatatggaattgtaaaagaaaaattagaacagttaaaagaagcacaattaatacagtggagaaaccgcaccgcttcctatgattttaaaaataatgtcggtgtagatatcgaaaaaaagattcaggaagaaatacaaaaacagaaaaaagtaaatatcgaaaaagtgttaggtgaaattgcagaattagattatgtcctgccaaagcagtataatcaggaattcaccatgaccagatattttcattatgaatataaaaagttagagcagtttcttacattaaagaaggcggaatatctttttgaagagaaacccgcagacggaaagattatcgcattgacggatgcagataagacaacagatatggaaaaagtccggcagcatctgaaggagttaaaggacgagcgaatcgtagtcctcattccgcgagaaccgttaatggaagaagaaaatatccggcgtctgatagcagtccggcagttaaaagaagataagacatttttagaagaaaatgcagtattgcagcaggaattgcagctatatgaagacgatttgatttatgaaatcaatgcggcattagaaaagcgttatcttccggaaaatggaaactgcacagtattatgtggaattgtatcccggaacaagagtaaatcagtaggtgaatttaaccgtacgctcagtagaatctgtgaggaatattataatctgactccgaaaattaataatgaaatgattaaccgcagaaaggtgtcgtcccagacaaaacgtgccagaagaaccattgtagatgctgttttaaatggaaaagaaatggcacagtgggagaacggttcggcggcagaagcaaccatttaccgggcaaccttacgggcactggatgaaggaagagcagaagagggaaaccagcaggtattacaggaaatcatggaatatatcaaccgctgtgccgggaaaaaacacagtttttccgaactttatgaaagcctttccggaaaaggctatggagtaagagaaggtatcattccaatttatatcgcaaggcagattgcggaacttgaggatacaccggtcattcttttacaggagcgtgaagtggagattacgccggaaatatttgacaacatagaagaacatccggagaattacagcctctatgtggaaaaagaaacggtaaataaagagaagtatattaagcggttagaagaaattttttgcggacaggatacctatcagagtattggaaaacgaaaccggctttatgaactggtgcgagcaatgcaaagatggtacagaagtctgccgcagattgctgtttccttccagacatgtccggaaggcatggaagaggaaacttatgcatttatcaaagggcttcgtaagattcttaaaaatatggagccgaacccaagagaaatgctgttcgaacagcttccgggactggtagagaaaaagaatttaaaggaaacgtcacagcaaatcaaaaaaggaaaagaatatttagataccttcctttttaagaaaaatgagcaggcaatagaagtcacaaagaaaatctatggcgcagcaaaagaagacagtctttccagcgttttaaaggcatggtatgaggagcaggggaaggcggcaaagagttttctggccagcaatcaggtgacggcattgatgggctatttatccagaatgcagacccacaatgaacaggaaattgtagaacatctttccaaggcagtccttgatatttatatggaagactggcgggatgagtccttgaagcagtatgaagaagaacttgcccggttaaaggcagagattgaacacatcggaatggaacagagtgagtccggcagcaggcagatgatagaatttaccggaagtgatggaaaaaaggtaaagaaattctatgaagcagaggatgacagcaccagttatttcctgaaaaatgccatggaagaagctatggaggaattcggagacagtctggaagtgaaccagaaggtagcagtactggttcagatgatagagaaactgacgaagtagcaaggagttgtagttatgaatacagaagaaattatttatcttgacaatgcggcaacaacatatccaaaaccggaagtagtatatacggaaatggaccgggtcaaccgcagccttgcatttaatgcagggaggggttcctatgcccttgcaaaagaggcagatgaaattatcgcggaaacaagagaagcactgcttgatttagtgcatgcaaaagaggaagcagaggtggttttatccgcctctgctactgttgctttcaatcagatcattggcggaatggactggaaggaatcggatgtggtttatgtcagcccttatgagcataatgcagtggttcgcccgctggatttatggaaagagcggattggatttaccataatagagcttccactggaaaaagaatccttaaaaattgatttggaaaaaatggaatatctttttacggagcagccgccaactcacatctttctgtcacaggtcagcaatgtgacaggttatatactccccatcgaagaaatatgcaaaattgcaaagaaatatgatgcaatcacagtaatcgatgcatcccagtcccttggactgacagagcttgatatgcgaaaagttccggcagatattgtagcatttgctggtcataaaaatctttatggcccattcggaacaggaggatttttcttaagacatggcataaagctgaaggtttttctggcaggcggaaccggtagtgattccttgaatccgaagatgccattggaaagccctgcccgttatgaggcagccagtccgaatattgtagcaatagcaggacttcgtgcagctctcatggagataaaggcagccggaacagcaaactggctggcgcatgaacaacagttgactgataaattaattgcgcagctaaaacggattcccggcgtgaaattatatggagatttcgggcaggacaaagtcggaattgttccttttcatatccggggttatcaggcagccgaggtgggcatgcttttggacacagactatggaattgccgtaagaactggatatcactgtgcaccactgatacataagcatttaaaggatgaagcttccggcggtgtcgtccgggtcggaatcggaagatataccacggagaaagagatagatacactggttgccgctgtcggggaactggcggagtaggaggaagaagatggagaacacaacagaaacaaatttaaaaactttagttgaattagttcagaagaatgaactattattacctgatttccaaagaggatttgtatgggatattgaaacacagaaaaggcttgtggcttctgttttggcaaagatgccattgggaagcattttggtgttagaggcaaacaagaatgattatggttatcgccttatcggtcgaaaagatagtcctaaattatttggtaatagtgagacatatgctttattagacggacagcagagattgactgttttagcaaatgtattttcaaatcttttgtatctagattatgagaatccgggaaaaatgattgatgattataaaaaactatcttcaatagaattgaaatatagatttttcttgcgtataccaagtattgatattttggaagaagaaaatgactggtttggcttgaaaaaattatgctttccaataacaaacgtagaaaataaagaggaaagattagatttccttacaagagatattttaggagacataattgctattccgtttgatgaaaaaacggaggaatgttatgtgccaaatacgaagaaatcaaaagatatatggaaatatgcaatacagacagaccaatacctgatcccactatatcttttgattagcgataaaaatcagttatggagtggggaacgtctggataaagttttacaggaaatagtggatgaggtaatcgattatcggttagaaaaagaatactctgttttaaacagtgaagaagaaagattggactatgtggaaaagattcttccaccggattttttagaggatgttatttcagatggtaaagtaaatatagacacattaaaacaacaatggaaattaatggcaaaagtatgttggtcagacagaatgaaagcttatttaaattcctgtattacagcattggatttacatcagattgttgtaaaaaaatcagacagggatcgtgcaattgatatttatgaaaatttaaatattggtggaataagtctcagtacattcgaattggtgatggcaagagcggcaaaggaaaagttaccacagaataagaatctgtttgaaacgattgtagattatattcagacagaacgggaatatgagacctgtgtcattcctgaatgcatggagaagtatgcaataagtaaaaattactcggcttcaaatgaaatggaatgctataacgaaaagaaaaatgaattgaataagaagtatacagaaggatttttggacgtgttatcacttttaagttatgcaccggattatacttcaggaagtgtagaaacaagtcaaataaaacaaaagaaaatattgaatttagatgaaaagcagatattacataactggaagaaagcatgtgagggtattgatagagcttgctatttcttgaaagtgcaatgtggagtaagaaaaattcaggaagtaagctataatctgatgcttgttcttttgggctatatctatgcaaatgattcgttttacaaagataaaaaggtgacaaaattgctggtagcatggtattggtcagcaatttttgcaggaaggtatgataaagaccaaacgcctcatgtagtagaagatatcaataacattttgaaaacaattgcagatggagatgatacctggctgctggaaatgaaaaataatatttttgatatgaaaggtttttctgatgaacctactttattgcttcaaacaagtgttacaccaaagggagcattacggaaatcaatatgtcaattttatcttgcaggaacatataaagatttaatgacggatacaatattacattcatttttagatgaaacaaagaaattagaagaacatcatctggttccgctgggtacattctcaagagactataagacaatggagaaagatgagagaagcaataaaagaagtatttttaattcgccacttaattttgcatatataacaaaagattcaaataaagcaattgggaatacttcaatagatcagtatgtaaaaattgttgaccaggattctgttttggaacttcatttggattcacttcaaagtggacagcaattgttaaataaagagaatctggaaaaggcattagcaaatcgtcttatacatataaaaaaggatataaataaaagaattcaaaataatatgtgagggggaatcttaatatggcagtcttatcaaatgaaaaattaatggaacttacgatggaaatattaatgatggaacggaaaaaccttagaagcagggcaaagacagaccacaatatgtcacaggaaatccagaaagtaataaaggaatatgcagcactgaaatgttaacagaatgagtttatgatgggagaagaaaaatgaagtttaagacactaaaaatgaagaattttatgaggtacaaaggggagaatacaattgaattcagttgtgatgaggaaaagaatgtaacaattgtattgggagataatacggttggaaagacaacaatcgcacaggcattccgctggggactttatggtcagatttttgcggaaagaggaaagagacaggaggatttccagttccttaattatgatattcttgaaatgatggatgcaaacagcagagcaacggtatcagttgaaattactgtagtggatgatgaaaaacagtattatatacgacgtatggtagagtatacaagactgtatccgaaaatggaaacaagggaagcagcaaaaaagctgcagttattgattgcggataaaaatcatgtggatgatatggttgaagtgcagccggaaaaggcacaggagctgattaatgaattgtttccggtaaatctttcacattatttcctgtttgatggggagcggtggaatgatgtgacggtaaatggggtaagagaaaatattaaggattccgtacatattcttacaggactgtctgcatatcaggcagcaatgaaccatttgaaagatatgggaagcaattctgttataaagacatttcgtgggaaaatcagtggctctggaaatatgtatgatgacctggagaaagaacgtaatcaacaggaacgtaatatagaaaattataaagaaaaaatccgtatactggaaataaatattcaaaattatatggataaggtttcggaaatagaagaatatttattgaataatcaaagtacggaaaatatgcaaaaggactttagacgtttgcaggtattgcggaaaacacaggaacaggcatgtataacgaattataagacctttgtcaatgaatttagtgataagggatatatgttactggcaaaacctatggtggatgcagcaatgaagatggtaaaatcagttgccggagaaagaagggatattccttatatgcggcaggcaagtattgaccatattataaaatcaggcacatgcatttgtggtacaaaaatcagaccgggaacaaaagaatttgatgctttgatggaacagagaaattttctgccaccggcagatataggttctttattgggtgaatttgaaagaaacggaaatcgttgggagaatcgtagcagcagtttaaagcaggatttgcatgaaatggcagaaaaagttgatatgagtatagaagaatatcaggagactttgaacataattgccaagattgaaacgaaaatggacgagcagattgattttgctgagaaacgaaataaattaagatactacaagcaggaaattcagaaaatgagttcagaaagaggctcttatctgggaagaattgatgagagtcaggctagcattgagcggctggagaatcaaatgaagagccaggaagcacagagccaggaaaatgaaaaatggcgtaaacgtgtagagattgcagagcagctttatgagaaactgaaaaaggactttacagaaaaagagaaaaagacattcgtagaattaaatacaaaaatccaagacaatttccaacgtatgttcaatgccaaagataagaaaattgaattgacaccacaatatgttattgagatgttatataagacggaaattggttatcgggaggaaaagaatctttcagaaggagagaaaattgcaagaaattttgcgtttgttgtaaccattatggaatatagccgggagaagaaagcagaaaagtccggtcaggaaagtgatacgttaccattggttttagatggaccgttctcaaagcttggagatgaaaatatccgactgattgctcaggtattgccaaaagcagcagagcaggtaattatttttatgttagataaagactggaaatataccggattggatgcttatgttggatcatcctattacattgagaaaaatgcggctcagacctatgcaacaattaagagaagggagttgtaaaaatggcaagttatgaattctttaaaaaggaatttgaatttaagggaaagcatgcaagaatggtgtcagaactgtggcaggcgaatgattatgagcatacttattttagaagactaattgacatttatatgattgcaccaattattggatttcgggtagggaaaaatgctccggaggataatgcaccttttgattccaaaagcattttcccggagcagatgataaaagcaaaggaagatttggattatattatgcagatgatattgattctggataataaagatggcatgtcgaatgaagagtgtgttaagctggcatttcgtggagccgagacagaggaacaatatcagaagtatcagagacttttcaatggatatgtacgtggtggagtagaagaattatatgataggctgattgttcgaaaatctgagccggatgatgaatttcatgataataagacagctaatttatatgaactgttgagcagatttactaattaaagaatagagtaaatatctaaataaatgtcgaaatatgtcgataaaaagggatttacaaatgatggtatttcttgtaaaataaagaagaattatatcataccaagtaataacaggttattacgataaggtagtatacctgaaagctctaatcccattcttcggaatgggattatcttttatcagcatttatttaagcacaaataataaagcactttgtcccgggtatgcggttcagagagaagaagggagaatttatggaaacaaagtacaattacagaatcggattagacattggtattgcctcagttggctgggcagtattggaaaacaatagcaaagatgagccggttcatatcatggatctgggagtaaggatttttgatccagcagaagatcaacagacaggtgattcactagcggcaccacgacggaatgccagatctatgagaagaagattacgaagaagacgtcatcgtctggaaagaattaagcagcttctggaaagagagggcttaattcagatagaacaatttatgaaacggtatgaatcaaaagatttaccggacgtatatcaattgcgttatgaggcattaaatagaagattaacagatgatgaattagcacaggtactgattcatattgctaaacacagaggctttaaatcgaaccggaaggcagaattaaaagaagatgcagaagcaggaaaggtccttaatgcaacaaaagagaaccgtgagcgtatgcaagctggtaattaccgtacaataggtgagatgatttattgcgatgaagcttttcgaacaagttgtgactgggtggaaaagggatatattcttacaccaagaaacaaagcagatagttataagcatacagtagaaagagctttattagtcgaagaagtaaaaaaaatatttgaagcccagagaacatttggtaacccaaaagccacagaagagttagaaaagtcttatctttctattatggaaagccagcgttcttttgatatgggaccgggacttcaggcagatggaacagaaagcccatatgctttgaatggatttgaagataaagtaggttattgcacactggaaggaaagccggaaaaacgtggtgcaaaggcgacttatacagcagaattatttgttgtttcacagaaacttagtcatttaaagctgataaaacgtggtggtgagggacgattcctgaccaaagaagaaaaggcaattgttctggaattattacatactcaaaaagaagtaaaatatagtgcaattcgaaagaaacttgctataccggtagaatatcattttaatgcattaacatatacctcaaaaaaagcggatatatcccaagaagagcgtgaaaaagaggtcgaaaaggtggtatttggtaaactggaaaattaccataagatgatgagctgtctgaatgaagaaacaaagcagaaaccagtagacgaattgcaggaacttttagatagcattgcgacaatattaactttatataaaagtgatgataaaagaagagagtgcttaaatgctcttccactttcaacagaagaaattgaaaatttattggaactcacttttgcaaaattcatgaatttatcagtaaaagccatgagaaaactgcttccatatcttcaggggggagagggaatgacttatgataaggcatgtacggcagcaggctatgattttaaggcagaaggagaagaacacaaatcaaagttacttaaaggcgagcaggtaacagagattatcaatgaaattcccaatccggttgtgaaacgttctgtttcgcagacggtaaaagttattaatgcaattatacagaaatatggcagtcctcaggcagtttatattgaacttgcaagagagatgtcaaggaattttaaagacagaaaagatattgaaaaaaagaataaagctcgtgaggcggataatgaaaaagcaaagaaacagattcaggaatatggtattttatcacctaccggacaggatattataaaattccgtttatggcaggagcaggatggaatttgtatgtattctggcaagagaatgtctattgaaaatttatttggcaaaaacagcagttgtgatatagaccatattctgccatacagccagacctttgatgacagttatcggaataaggtactggttctgtccagtgagaatcggcagaagggtaacaggacgccgtatgagtatatgggacaggatgaggaacgctggagtgaattcgtggcgagagtatcttctatggtcaaagatggaaagaagagagaccggttctttaaagagcatattacagacgaagataaaaaacagtttaaagagcgtaatttgaatgatacaaaatatatcacaactattgtttataatctgattcgtcagaatttagagtttgcaccatataatgtgcctgctttaaaagaaggaaaaaagaaacatgtaaaagctgtgaatggtgcaattacagcgtatcttagaaagcgttggggattaccacataaggaccgttctacagatacgcaccatgcgatggatgcggttaccattgcctgctgtacagaaggtatgattcagaaaatttccagaagtatgcagatattggaactgcgttatatgcataatggacgaatgtttgatgaagagaccggtgaaatttacgaccgtgaaaattataccttacaggagtggaaggataaatttggagtacatattccaagaccttgggaagagtttaagaatgagttggatgtaagaatgggagaggatccgttgaatttccttgatatacatccggatgttgctaaggcattggattatccggaatattattatccagattcggctagcaattggaaaggctttatccacccaatttttgtatcccgtatgccaaatcataaggtgacaggtcaggcaaataaggatacagtaagaagtccgagattatttaaagagggatatgttatttctaaggttccacttacttctttgaagttaaaggatgacgaaatcgtaaattactataacaaagaaagtgatatgcttctttataatgcattaaaacgtcagttacagttatatagtaatgatgcagaaaaagcatttgcacagccattccataagccaaaagcggatggaactcagggaccggttgtaaagaaagtgaaagtgatagacaagcagtcttcaggtgtatatgtgcatgaaggaaaaggtattacagcaaatggtgatatgattcggattgatatcttccgggaaaatggaaaatattattttgtcccaatttatgcggcagatgttgtaaagaaagtgttgccgaataagtctccatcaagaggaaaatctggatggattgaaatgaaggacgagaattttgtatttagtttgtatccgaaggatttgattcatgttaagacgaagaaggaggatggattaaaattaaatctggttaatggaggacagattaaagcacaggaagcggttgtatattatactggggcagatgtatcaaaaggaagtatagattgctctgctagtgacaagaagtttaaacttagaggacttggtattcagagccttattatatttgaaaaatgccaggtggatgttctgggaaatatatctgttgtaaaacatgaaaagagaatggatttttctgcaaagaagcgttaaagaaatgaggtggatattctgggttttcgtaatataaagattgacagtaaagtgcagttacatattaagaatcagcagctattgattggtaatggagaactgattcatattccattagaggatattaattgtatactgatagaaaatcaatcagtaactgtatcaagctatatgctgcagacatttgcaaattatggaattgcctgttatgtatgtgatgaaaagcatttgccgaatgctgtattactgccattggtgagacatagtcggcactataaaatattgaaagcccagatgaaccttggaaagccacttcagaaaaggttgtggcagcaggtaatagtacaaaagataacaaatcaggcattgtgcttaaaattgcttgatatagaaggtagtgcagaattgttgaaaatggtcaaagaggttcaatctggagaccggacgcatgtagaagcaaaagcagcggcattttattttaagaatttatatggaattggcttctccaggggagatgataatatcataaatgcggcattgaattatggctatgctattataagagggattattgcacgttccattgtctgttatggattagaaccttccattggaatttttcatagcagcgaattgaatagttataatctggctgatgatatgatagaagcttttcgaccattggtagatttgtatgtagccagccattttgatgttgcagaagttgattttgctttgacaccagagataaagcgtggattatttgggattacaaactatgatatgtcagtgaaaggtgaaaaacgaattgtaagtaattgtgtagatatgctggtagcaagttatagtggtgcaattcagggaaaaagaacagaattggatttaccagaattgatgcagttacaggtacatagttatgaataagtttatgagaatattagtattttttgatttgccggttataacaaaaagagaaaaaggaacagcagcaaagttccggcagttcttattaaaagatggttataatatgatacaatggtcagtttattccagagtctgcaatggaatggattctgttgctatgcataaagcacgtttacagcagaatcttccaagtaaaggctcagtcagaatgttgacattaacagaaaagcagtatgaatcaattgacgttttgctagggacaaaaacatttgatgatgcatctgaatcggttgaattaattaatattttttgaaaaaagagaaaaaaggcatatcatatcagtttaaattgattgaaatgaaaatggtaaaagcccgcatacctttagaagatatgcgggctttggtgttccctattataccataccaagtaataaccgggaactacgacattcctcgaattgatgatgcggagtattgtattataccataccaagtaataaccgggaactacgacggtgacagacaagatattcttgtttgatgaattataccataccaagtaataaccgggaactacgactaatgtttctcctgctttttatgttctgttattataccataccaagtaataaccgggaactacgacttgtattcaacgataccgatagatggcgtgattataccataccaagtaataaccgggaactacgacattcctcgtattgaagatagagaatattgattataccataccaagtaataaccgggaactacgacatccgtatcaattacaacatcaccaacctattataccataccaagtaataaccgggaactacgacgatactttttgtggagcaggatggtgttgaattataccataccaagtaataaccgggaactacgacttcgaggtattaaaagcgaagccagtagctattataccataccaagtaataaccgggaactacgacatttgcaatcggtggaattataaagattttattataccataccaagtaataaccgggaactacgacagattgtgaccgactggcgagaaagtgtgattataccataccaagtaataaccgggaactacgacatgactctccaccatattcgttcctggcgaattataccataccaagtaataaccgggaactacgacctaccttgatgcttccagttccaccttcccattataccataccaagtaataaccgggaactacgacaagaacattgacattataaaagggtgcacaattataccataccaagtaataaccgggaactacgacctatgatgtcgctggttcgagtccagcctgattataccataccaagtaataaccgggaactacgactcgtgttcgtctattcttttgtgttcacttattataccataccaagtaataaccgggaactacgacgaaattataaactaggaaatgtacggtactattataccatatcaagtaataaccgggaactacgacactatggcaacgttgaggcacaaagaaatattataccataccaagtaataaccgggaactacgactgtttccgtcaaacggtactcctccctctaattataccataccaagtaataaccgggaactacgacttgttgcgtctacctcgtcgcagagaacgcattataccataccaagtaataaccgggaactacgacgtacacatatccggaggggttagaagttggattataccataccaagtaataaccgggaactacgactattagtggcggcagtaagcatcgtgaagcattataccataccaagtaataaccgggaactacgacttttgtgtccggcttatataatataccaaaattataccataccaagtaataaccgggaactacgacttcagccaatcagtagtgagcaaaaaaatatatattactcttgaatttagaaaaactgtattgtttaatagggttatcaaacaacaatatgacagggaacaagtatgaaaaagaatagaattttaaaaacaagtttaatagctatgatattttgtgctttttgtggatgtgctaacaatcagaatgtgcagactggaaagtcgataagtgaaaatagcagtgcaattaaaaaatagaaaaattatctgaaaaagcagcggaatgcgtagaagaattgtatataagacagtataaagtggattatagttgctacgaggagttgatagcatatcttacagattgcttaaaaatggttttccggatgaggtagcatcagatgatttttcttgtgtatttcacatgaataatacttatgaaacattgggatatcttaaaatggatatagataaagatggcatagaggagttgttacttggagcaaatggcgagatatgggatggcattatttacgatatttataccatgaaagatggacagatgatacatgtattagatggctgggaaagaagtcgctactttttgtgtaaagacggacaaaaaattgcaaatgaatggtcgggcagtgcttttattaccggttatgattattataaatatgatggaagctgttttaaacgttataaagaagagggtaacagaccagcaaatttaatagaaacagtatatacaagtgtagaaaaaaatccagaagacatgtggtgttattcagaagtgggatactgtgatgagtatgaaaagataacggagcagcaggcttttgaagttataaaaaagtatgagtatcagacattagagtatataccatttatagagtgattttgcataatatttaagaaaatattatcctgacagttagagggaggagcagtacatgaacgattataacagcttaagtgaaatcctatattccaatgaattagacatcaagaaatttgaaaatctgctgagccacaatgcgcagggatataaatttttttggttagaagcaatcatcaatttgctgccggagaaagaagacgaaattcggtttgatgaaattattgatgaaatgatatgggaagcgtggcgaatcgttacatattatcatctgcggctgggaccgatggtaaatggaagtgcggcaaattatctggaacgagcaatccggacactgtataattgcgcaaaggatgaactttcaattaaaatgctgtccaaagaacagttgaaaggtcttatcagaaaatataatgaacagttgcgggaagataaaattcatctgacagactatgtcccatatagattgattagtccgttcttagacaagctgggaaaagattatgtggagcgaaaggattatgcaagatttattgcatatctggatggctataacaagatgcatcatggatttttttacggaattgtagatgcagaaaatgaactggaaaagaaaatcagaatcagtgaagagtggaagcggtttattttgcagaatcatgccatcattttaggctggattcgctataaaaaggcagcatatcttcagaatagaaatccgggtgtaccgggaattatttataaactttcggtaaagccacaaaatgagagacatctggaaaatgcaagaaagctttggaagatggcatcagaaatagcagaattaccactgcgggagatttacacgggaaataaattaagtgtggatgattttacattagaccattttgttccgaaatcctatgtggcaaatgatgaattatggaacctgacaccaatgggaagccggctgaattcaagcaagaataataaattgccggattggaaatatgcaaaggagtttgtaaaatatcaatatgaattttatgaggcaatatttaaaaataccagtggcgcagcagaaaaattgttaaagcaatttgaaaaatgtaaaacctataacgttaatgccagttgggcggcggaagaactatacatagcgggaaaaacagatactcagttcaaaaatctgctgcgtgataatttaaagctgacctacgatgcagcaaaactgcaatcctatgagatttggagagcctgatactattgtcccacatcccaatttgtgctagactatctgtgtcccaaatccggaaaacaaaagaaaatgaagcaaaccaaccaaagtgaaataaagttatgagcagtaaagcagaaagcagaagaaaaagtatcgggatgacatccggctctttatggaagaacatcttcctctttagcataccgttgatgtgttctcagatattagaagtattatttaatttaagcgatgtagcaattgtaggaaaatatgcaggatatatccccctggggtcggttggctcgaccacgctgttggtgtccttatttaccggcttcctgattggaatgggtggcggtgttaatgtaagggtagcacataaactgggcgtaggcgatgcgaagggaacggaagaaaccgtgcacacagcggcattgatttgtctggtggcaggacttatactgtgcctgatatgtaatatatttgcggagccatttttaaacattttacatacaaaatcagagtttatggatggcgcagtactatattttcggatctatgcactggggcttccggcacttgcaatttacaattttggaaatggtgttttaagtgcatccggcgagacgaagcttccacttatttatctgagtattgccggtgtgttaaatgtgttattaaatcttttctttgttattcagtgtaatatggcagcaggcggagtggcaattgccagcgttattgctcagtatgtgtcagctattttggtggtttctcatctgtgccagagaaaggatagctgcaggctttacttttccagactgcgttttcataaggaggcggcgaaaagtgtgctgatgcttggcgttccgggcggaatgcagaatgcaatctttgcaattgcaaatctttttgtgcagaccggagtcaactcctttgatgcggttatggtgtccggcaattcagcggcaatcaatgcagatacgctgatttttaatattatgatagcattttatacggcatgcgccagtttcatgggacagaatatgggagccggaaacagggaacgcatgataaaaagttaccgcatcagtttattgtattcgtttctggcaggtgcaatttttggtgggctgctggtggttttcggaagacagttcctgtctctttttgccagcaaaccggaggtaattgaagctggaatggagcggattaagattatggggttttcctatgcactttccgcatttatggactgcaccattgcggcatcccgcggaattggaaagagcattgtgccgaccattattgttatcatgggctcctgcgtattccgtgtaatctgggtatatacgatttttgcatattttggaaccattgcatccttatatcttttgtatgcattttcctggtcgattacagcaattgccgagattatttatttcaaagtatgcttccggaagcttcggatagcggcatagaaccatagagtcatggaagaaagtaaaaaagaaagcggaagagagaaagaaaaatggaagaaagacgttcggaaaatacaacgctttgctatatagaaaagggaaattgctacctgatgatgcaccgggtgaagaaaagccatgatgtaaataaggataaatgggttggtgttggcggtcattttgaagccggagaatctccggaagaatgcctgcttcgggaagtaaaagaagaaaccgggcttactttggatgcctatcggctgcggggcgtggtaacttttgattccgatgcgtggccgacagaatatatgtttctttatacggcagatgaattccacggtacgatgaccgagtgcaacgaaggaacactggaatgggtgccaaaggaagaagtatataatctgcctatctgggaaggtgataagatatttttcaggctgttagaagagagggagagcttcttttcactgaaattatcctatcagggagatgctttgacccatgccatattagatgggacaacccgattgaaataaaagtaaattataagtagaaataagcaaccagataccattaattagtaaaactaattagtggtattactatatataattggtttttataagcaaatgacgttataatgtaagtagcattgagcagtgccagaccataaccagcccgctgggctgctggcagtccaaacgggctgattatggtctgatagggcaaaagcccgtagtatggaaatgcgaagcatttccatacttgcacggcaagagtagtaacgtgcaggaagataataaaatcagcacaaaataagaagcaggataaataataatttcaggaggaagaacaatggattacaagaacgcaggcgtggatattgaggcaggatataagtccgtagaactgatgaaggagcatgtaaagaagaccatgcgtccagaggttcttggaggactgggcggattttccggagcattttcattagagaagattaaagaaatggaagaaccggtactgttatccggaacagatggctgtggcacgaaagtaaagctcgccatgattatggataagcatgataccatcggtattgatgcagtagcaatgtgtgtaaatgatattgcctgtgcaggtggagaaccattattcttcttagattatattgcatgtggtaagaattatccggagaaaattgcagccatcgtaaaaggtgtagcagaaggctgtcttcagtctgatgcagcattaattggtggagagactgcagagcatccgggtctgatggcagaggatgaatatgatctggctggatttgcagtaggtgtatgtgataagaaagatatgattaccggcgagaccctggcagacggtgatgttctgattggtatggcatcaaccggagtacattccaatggattttcactggttcgtaaaatctttaccatggataaagaaacccttgatacataccatgaagaactgggaactactttgggagaagcattacttgcaccaaccagaatttatgtaaaagcactgcgtgccatcaaagatgccggcatccgtgtaaaagcctgcagccatatcacaggcggtggtttctatgaaaatgttccacgtatgcttccggaaggaaaacatgcagtgattgaaaagaacagctatccgattccaccaatctttaccctgatggcaaaagaaggaaatgtagaagagaaaatgatgtacaatacctacaacatgggacttggtatggtactcgcagttgcaccggaagatgtagataaaaccatggaagcaatcaaatctgccggagacaagccatatgttgttggtaagattgaaaacggagaaaagggtgttacattatgctaaaagttgcagtattagtatccggtggtggaaccaatcttcaggcaattatcgatgccatggataatggaaccattaccaatgcaaagatagaagtggtaatcagtaataatccgaatgcctatgccttagagcgtacaagaaaacataatatcaaggcactttgcatttctccgaaatcctatgagaaccgggcggcattcaatgctgatttcttagaaaaattgaatgaatataaagtagatttggttgtactggcaggctttttggtggtaattccaccggaaatgattgcacagtaccgcaaccggataatcaatattcatccatccctgattccatctttctgtggaacaggcttctatggattgaaagtccacgaaggagcactttcccgtggagtgaaggtaacaggagctacggtgcattttgtggatgaaggaacagataccggcccaatcattttacagaaagcagttgcagttgaagaggatgatacgccggagattctgcagcgtcgtgtgatggaacaggcagagtggaaaattatgccacaggcaattgatttaattgccaatggaagagtaaaggtagaagatggcagggtgagaattctgccagagacgaagtagaattacccacataaatagataaccagatagtgtgtcataagttggtacactagctggtttttgcagaaaacaggaggattaacatgaacgtattagtagttggaagcggcggaagagagcatgcaattgtgacaagcgtagcaaagagcagccgtgtagataagatttactgtgcaccgggcaatgccggaatcggacagctggcagaatgtgtgaacattggagccatggaatttgacaagctggtagcttttgcaaaggaaaaagagattgattttaccatcgtaggaatggatgatccattggttggtggaattgtagatgtatttgaagcagaaggattaaaagtattcggaccgagaaagaatgctgcaatcttagagggatccaaagcattttccaaagatttgatgaagaaatataacattccgaccgcaggatatgagacctttgatgacccgaaaaaggcattggagtatctggaaactgcaaaaatgccaatcgtattaaaggcagacggactggcacttggtaaaggtgttctgatttgtaacaccttagaggaagcaaaagccggagtaaaagaaatcatggaagataagaaatttggttctgccggcaaccatatggtaatagaagagttcatgacaggccgtgaagtatccgtgctttctttcgtagatggcaagaccattaagattatgtcttccgcacaggaccacaaacgtgccaaagatggagaccagggcttaaataccggtggaatgggtaacttctctccaagtcctttctataccaaagaagtagatgctttctgtaagaaatatatctatcaggcaaccgtagatgccatggcagcagaaggaagaccatttgtaggtgttattttcttcggtctgatgctgacagaggatggaccaaaggtattagagtacaatgcccgttttggtgacccggaggctcaggtagttcttccgagaatgaaaaatgacatcattgatgtaatggaagcctgcgtagacggtaaattagataccattgatttacagtttgaagataatgcagctgtatgcgttgttcttgcatctg

SEQ ID NO: 3875 - DNA, 23465 bp, synthetic construct
  source 1..23465: mol_type = other DNA
  misc_feature 1..23465: note = Synthetic
cattgaatgaatatctggataaactggataactatggctatatccggctgaaccggacggcaggactggatatggtatacaaaaatgaagagaaagattggggaccgtatgaagttgcggaactatattatgaaaaataaagggaacgatcaagatgaagagactgaaagatttcgttgagatagataaaagatttcaaaattccataaatttacaactggatttgcaggatgataccaagctggaaagttatattccaaccaaatcatctttattaattctgcaaaaatatctgaaatcagtaatgggacaggaaaaggaaaaagcaacgattctgattggaccttatggaaaaggaaaatcacatttactgctggtattgttgcagtttctttctgcaccggaaaatgaaaaggtaaatgacctggttcaaagaatcagcaaattagatgcagaaacagcagaattgatagagcagtatcagaatcagaagaaaaaattccttccggttattgtatccagctcaattatgaatctttcggatgccttcgtcttaggactgacagaagcattgcagtatgcaggacttagcgacattgttccggacagctattataaggaagcagaaaaggcagcggataactggatggaaaattatcccaagacttatcagaagtttgtagaactgctacattcagagcatggtcgctccattgaacagtggagaaaacagatggataaaatgcaggaagatgccttagaagcattccgggaaatttatccgaaagtgacttccggcagccagttccagccgattgtaaatattgaaaccatgaaggtctatgagggcatcaatcgtattttatgtgaaaaatacggttatgcaggcattttccttgtattcgatgagttcagcaaatatgtggaaggccatgaagaggcaacctttgcaagagatatgaaggtattgcaggacatgtgtgagctggcaaattccggcaaagaggaaattcatatcgtatgtgttgcccacaagagtattaaggaatatggacatcagttatcaaaaaatataaaggatgcttttgatggagtagaaggaagattaaaagaagtccggttcgtagtatctgcgaagaataattttgaactggtgatggacgccattcataaggatatagaggaatgcagacgtgtggcagcaaaaaatgcagagtggaaaaaggtgttagaagatacctatcaactgccttgcatttctgcactttttgaacaggaagagtatgacacagtagtaaaggaaggctgttttcctttgctgccgcttaccgtttatctgttattaggaatcagtgaaaaagtggcacagaatgaacgcagcgtgtttactttccttgcaaataatgagccgggttcactggtacgcctgattgaagaagatgaaaaggaagcccatggaatcggtgcggcagtcgtttatgattatttttccagattattccgggaaaatacagaccttatccatattcatgcggaatggctgaaggcagagtatgcccttggaaaggcagagtatgaggaagaaaaaaacattatcaaagtaatggcattgcttaagatgatgggaaatgaagaagaacttccggtaaacgatgaaagcatctatctggcaagcggactggaatatggaattgtaaaagaaaaattagaacagttaaaaaaagcacaattaatacagtggagaaaccgcaccgcttcttttgattttaaaaataatgtcggtgtcgatatcgaaaaaaagattcaggaagaaatacagaaacagaaaaaagtaaatatcgaaaaagtgttaggtgaaattgcagaattagattatgtcctgccaaagcagtataatcaggaattcaccatgaccagatattttcattatgaatataaaaagttagagcagtttcttgcattaaagaaggcagaatatctttttgaagagaaacccgcagacggaaagattatcgcattgacggatgcagataagacaacagatatggaaaaagtccagcagcatctgaaggagttaaaggacgagcgaatcgtagtcctcattccgcgagaaccgttaatggaagaagaaaatatccggcgtctgatagcagtccggcagttaaaagaagataagacatttttagaagaaaatgcagtattgcagcaggaattgcagctatatgaagaagatttgatttatgaaatcaatgcggcattagaaaagcgttatcttccggaaaatggaaactgcacagtattatgtggaattgtatcccggaacaagagtaaatcagtaggtgaatttaaccgtacgctcagtagaatctgtgaggaatattataatctgactccgaaaattaataatgaaatgattaaccgcagaaaggtgtcgtcccagacaaaacgtgccagaagaaccattgtagatgctgttttaaatggaaaagaaatggcacagtgggagaacggttcggcggcagaagcaaccatttaccgggcaaccttacgggtactggatgaaggaagagcagaagagggaagccagcaggtattacaggaaatcatggaatatatcaaccgctgtgccgggaaaaaacacagtttttccgaactttatgaaagcctttccggaaaaggctatggagtaagagaaggtatcattccaatttatatcgcaaggcagattgtggaacttgaggatacaccggttattcttttacaggagcgtgaggtggagattacgccggaaatatttgacaacatagaagaacatccggagaattacagcctctatgtggaaaaggaaacggtaaataaagagaagtatattaagcagttagaagaaattttttgcggacaggatacctatcagagtattggaaaacgaaaccggctttatgaactggtgcgagcaatgcaaagatggtacagaagtctgccgcagattgctgtttccttccagacatgtccggaaggcatggatgaggaagcttatgtatttatcaaagggcttcgtaagattcttaaaaatatggagccgaacccaagagaaatgctgttcgaacaacttccgggactggtagagaaaaagaatttaaaagaaacgtcacggcaaatcaaagaaggaaaagaatatttagataccttcctttttaagaaaaatgagcaggcaatagaagtcacaaagaaaatctatggcgcagcaaaagaagacagcctttccggcgtcttaaaggcatggtatgaggagcagggaaaggcggcaaagagttttctggccagcaatcaggtgacggcattgatgggctatttatccagaatgcagacccacaatgaacaggaaattgtagaacatctttccaaggcagtccttgatatttatatggaagactggcgggatgagtccttgaagcagtatgaagaagaacttgcccggttaaaggcagagattgaacacatcggaatggaacagagtgagtccggcagcaggcagatgatagaatttaccggaagtgatggaaaaaaggtaaagaaattctatgaagcagaggatgacagcaccagttatttcctgaaaaatgccatggaagaagctatggaggaattcggagacagtctggaagtgaaccagaaggtagcagtactggttcagatgatagagaaactgacgaagtagcaaggagttgtagttatgaatacagaagaaatcatttatcttgacaatgcagcaacaacatatccaaaaccggaagcagtatatacggaaatggaccgggtcaaccgcagtcttgcatttaatgcagggaggggttcctatgcccttgcaaaagaggcggatgaaattatcgcggaaacaagagaatcactgcttgatttagtacatgcaaaagaacaggcagaggtggttttatctgcctctgctactgttgctttcaatcagatcattggcggaatggactggaaggaaacggatgtggtttatgtcagcccttacgaacataatgcggtggttcgcccactggatttatggaaagagcggattgggtttaccacaatagagcttcctttggaaaaagaatccttaaaaattgatttggaaaaaatggaatatctttttacggagcagccgccaactcatatctttctgtcacaggtcagcaatgtgacaggttatatactccccatcgaagaaatatgcaaaattgcaaagaaatatgatgcaatcacagtaatcgatgcatcccagtcccttggactgacagagcttgatatgcgaaaagttccggcagatattgtagcatttgctggtcataaaaatctgtatggtcccttcggaacaggaggatttttcttaagacatggcataaagctgaaagtttttctggcaggaggaaccggcagtgattccttgaatccgaagatgccattggaaagcccggcacgttatgaggcagccagtccgaatattgtagcaatagcaggacttcgtgcagctctcatggagataaaggcagccggaacagcaaactggctggcgcatgaacaacagttgactgataaattaattgcgcagctaaaacggattcccggcgtgaaattatatggagatttcgggcaggacaaagtcggaattgttccttttcatatccggggctatcaggcagccgaggtgggcatgcttttggacacagactatggaattgccgtaagaaccggctatcactgtgcaccactgatacataagcatttaaaggatgaagcttccggcggcgtcgtccgggtcggaatcggaagatataccacggagaaagaggtagatacactggttgccgccgtcggggaactggcggagtaggaggaagaagatggagaatacaacagaaacaaatttaaaaacgttagttgagttagttcgaaaaaatgaattattattaccagattttcaaaggggatttgtatgggatattgaaacgcaaaagagacttattgcatctgttctggcaaagatgccgctaggcagcatactggtattagaggcagataagaacgattatgggtatcgccttattggtcgaaaggatagtccgaaattgtcggatagtggagagacatatgtattattagatggacaacagagattaactgtattagcaaatgtattttcgaatcttttatatttggattatgagaatccaggtaagttaatagataattataaaaagatgtcatctgttgatttacaatacagatttttcttaaaaataccaagaatcaatattctgaaaaaagataatgactggtttggactgagagagttatgtttcccaatcacaaatgtagagagtaaagaggagaggctggattttcttacaagagatatattggacaatattatagcaaatccatttaatgagaaaacagaagagtgttatgcaccacattcaaaaaaggtaaaggatattgaacaatatacaaagcagcaaaatcagtatgtaattccattatatttactgatttgtgatatcaaccagccgtggagttcgggatatttggataagattttaaaggtgattgttggagatgtaattgattatcgcttggaaaaggaatattacattttgaatagtgatgaagaaagagaggattatgttaaaaaaatacttccacaagagtttggggaagaagttattttgaatggaaaagtggatgataatgcattaaaagaacagtgggaaacagtggcaaaagtgtgttggtcagacaaaatgaaggcatacttaaattcttgtattacagcattggatttacatcagattgttgtaaagaagtcagacagggatagagcaatcgatatttatgagaatttaaatataggtggaattagtcttagtacatttgaattagtaatggcaagagcggcaaaaggaaaattaccggaaaataaaaatttgtttgaaacaattgtggattttatccagacagagaaggattatgaaacatgtcttattcctgaatgtatggaaaaatatgcaattagcaaaaactattctgcgtcaaatcaaatgggatgctataacgaaaaaaagaatgaattaaataagaagtatacagagggctttttagatgtattgtcacttttgagttatgcacctgattatgtaccgggaagtatagaagaaaattatataaaacaaaagaaaatattaaatctggatgaaaaacagatattagataattgggaaaaagcatgtaaaggacttgatagagcgtgttattttttgaagacacagtgtggagtaagaaagatacaggaagtgaattataatttaatgcttgtgctcttaggatacatatatgcgaatgattcgtattatgaaaataaagaagtaacaaaattgttgatagcttggtattggtcagctgtttttgcaggaagatacgataaggatcagacaactcatgttatagaagatattaataacatattgaagactctttcggatggtgatgacgcgtggttaaaagaaataaagcttaatattttggatatgaagggattttcggatgaaaatacattattgttaagaaccagtgttactccgaagggcgcattgcgtaaagctgtatgccaattttatttatctggaacatataaggatttgatgacagatactatattacattcattcttagatgacaaagataatttagaagagcatcatctggttccaataggcactttatcaagaaattataagacaatggaaaaagcagaaaggacagataaaagaagtctctttaattctccacttaattttgcatatataacaaaagattctaatttacaaattggaaatacttctgtagaccagtatataaaaattgttgaccaggattccgtattagaacttcatttggattcacttcagaatggacaacagttattggataaaaagagcttggaagaggcattggcaaagaggctttcattaataagaaaggatataaataaacgaattcaaaattatatttagaggggggaatcctagcatggcagcattatcgaatgaaagattaatggaacttacaatggaagttttaaggatggagcggaagaatcttagaagcagagcaaaatctgatacaaacatgtcgcaggagattcagaaagtgattaaagaatatgcggcactgaaatgttaaataatgagtttatgatgggagaataaaatgaagtttaaaacactaaaaatgaagaattttatgaggtacaagggggagaatacaattgaattcagttgtgatgaggagaagaatgtaacaattgtattgggagataatacggttggaaagacaacaatcgcacaggcattccgctggggactttatggtcagatttttgcggaaagaggaaagaaacaggaggatttccagttccttaattatgacatccttgagaagatggatgcgaatagcagagcttctgtatctgttgaaattactgttgtagatgaagaaaaacaatatgatatctgccgtatggtggagtataccagactgtatccgaaaatggagacgcgggaatcggcaaaaaaattacaattgttgatatctgatagaaatcagacagatattaaaattgaagtcgctccggaaaaagcacaggagttgattgatgaactatttccggtaaatctttcacattactttctgtttgatggtgaacgctggaatgatgtaactgtaaatggagtaagggaaaatataaaaaattctgttcacattcttactggtttatcgtcatatcaggcagcaatgaaccatttgaaggatatgggaagcaattctgtaataaaaacatttcgtggtaaaatcagtggttccggaaatatgtatgatgaattggaaaaggaacgcaataaactggaacatcatattgaaagctgtaaagagaagattaaggtattagatataaatattcagaatgatatggataaagtttcagaagtggaagaatatttattaaataatcaaaatacagaaaatatgcaaaagaaattcaaaagtttacaggtgctgcaaagaacacagaaacagacttgtgtggcaaactataagacttttgtaaatgaattcagtgataaaggatatatgctgctggcaaagccgatggtggatgcagcaatgaaaatggtgaaatcagttgctggtgaaagaagagatattccatatatgcggcaggcaagcatcgaccatattataaaatccggtacttgcatttgcggtacgaggattcgtccaggaacaaaagagtttgaggcattaatggaacagagaaatttcctaccaccagcagatattggttctttgctgggtgagttcgaacgaacagcaaatcgatgggggaatcggagcagcagcctgaaacaggatttgcaggaaatggcagaaaaagttgatttgagtatagaagagtatcaggaaaccagtaatgcaatcgataaacttgagactcagatggatgagcagattgatttcgcagagaaacgaaacaagttgaaatattataagcagaatattcagaaaatgagtatggagaagggtacttatcaaggtgaaattgagcagtataaaacacggatagagcggttagaaaatcagatgagaagccaggaagcgcagaatcaggaaaatgaaaaatggcggaaacgtgttgacattgcggagcagctttatgaaaaactgaagaaagattttacagaaaaagaacgaaagacttttgtagaattgaataccaaaatacaggaaaactttgagcatatgtttaatgcaaaagataagaaaattgaactgagtccacagtatgccattgaaatgctatataagacagaaattggttatcgggaagaaaaaaatctttctgaaggtgaaaaaattgcaagaaattttgcttttattgtaacaatcatggaatatagcagacagaaaaaagaagagaagtccggacaggaaagtgatacattgccattggttttagatggaccattttctaagttgggtgacgaaaatatccatctgattgctcaggtattaccaaaagcagcagagcaggttattatttttatgctggataaagactggaaatatacaggactggatgaatatgtaggatcttcttattacattgagaaaaaggcatcccagacttatgcatcaattaaaagaagggggttgtaaaaatggcaagttatgaattttttaaaaaggaatttgaattcaggggaaagcatgcaagaatggtttcagaactatggcagcagaatgactatgagcatacatattttagaaaattgattgatgtatatataattgcaccaatcattggtttccgggtaggacgtaatgtactggaagataactcgccttttactccgaagagtatttttccggaacagatgttaaaagcgaaagaagatttggattatattatgcaaatgatattaatactggataataaagatggaatgacaaatgaggaatgtgtcaaacttgcctttcgtggagcagaaacagaagaacagtttcaaaaataccagagattatttaatggatatgtgcgtggtggagtagaagaattatatgaaagactgattgtccggaaggcagagccggatgatgagtttcacgataataagacagcaaatttatttgaattgttgagccgtttcacggattaaataacggaaaaagttacatataagtgtcgaaaaatgtcgacaaaaagggatttacaaatgatggaaattcttgtaaaataaagaagaattatatcataccaagtaataacaggttattacgataaggtagtatacctgaaagctctaatcccattcttcggaatgggattatcttttatcagcatttatttttattataaataaagcactttgtcccgggtatgcggttcagagagaagaagggagaatttatggaatcaaagtacaattacagaatcggattagacattggtattgcctcagttggctgggcagtattggaaaacaatagtaaagatgagccggttcacatcatggatctgggagtaaggatttttgatacggcagaagattcacagacaggtgattctttagctgcaccacgacggaatgccaggtctatgagaagaagattacgaagaagacgtcatcgtctggaaagaattaaacagcttctggaaagagaaggtttaatccagacagaacaatttatgaaaaggtatgaatcaaaagatttaccggacgtatatcaattgcgttatgaagcattaaatagaagattaacagatgatgaattagcacaggtactgattcatattgctaaacatagaggatttaaatcaaaccggaaagcagagttaaaagaagatgcggaagccggaaaagttcttaccgcaacaaaagaaaaccgtgaacgtttacaatctggaaactatcgcacaattggagagatgatttattgtgatacagcattccagacagaatgtgactgggtggaaaagggatatattcttacaccaagaaataaggctgatagctataagcatacgatagaaagagcattattagttgaagaagtaaagaaaatatttgaggcacaaagaacctttggaaatgaaagggcaacagaaaaattagaagagaactatttatctattatggaaagtcagcgttcttttgatatgggaccgggacttcaggcagatggaagtgaaagtccatttgcactgaatggatttgaagataaagtaggctattgtactttggaaggaaaatcggaaaaacgcggagcgaaagccacctatacagcagaattgtttgttgtttcccagaagttaagtcacttaaaattgctgaaacgaggtggggaaggacgtttcctgaccaaagaggaaaaggcgactgttcttgcattattacatacacaaaaagaagtgaaatatagtgcaatccggaagaagcttaatataccgtcagaatatcattttaatgcactgacttatacttcaaagaagaaagatctatctgcagaagaacgtgaaaaagaagtagaaaaggcaacctttggtaagctagagaattaccataagatgatgaaatgtctgaacgatgagacaaaacagagaccggcagaggagttacaggaactgttagatagcatagcaacgacattaacattatacaagagtgatgataaaagaagagaatgcttaaaagaactgcctcttatagatgaagaaatagaaaatttattagagcttacttttgctaagtttatgaatttatcagtaaaagccatgagaaaacttattccatatcttcagggagaagaaagcatgacttatgataaagcatgtgcagtagcaggctatgactttaaggcagagggtggagaatataaatccaagttcctgaaaggagaacgggtaacggagattattaatgatattccgaatcctgtagtaaagaggtctgtttcccagacagtgaaagttattaatgcaatcatacagaaatatggaagcccgcaggcagtttatattgaactggcaagggaaatggcaaagaattttaaagatagaaaagatattgaaagaaagaataaagccagagaggcagataatgagaggataaaaaaacagattcaggagtatggtatttcctccccgactggtcaggatattattaaattccggttatggcaggagcaggatggaatctgtatgtattctggtgaaagaatgtctattgaaaatctgtttggaaagaacagcagctgtgatatagaccatattttgccatacagccagacctttgatgacagttatcataataaagtattggttctttcgagggaaaatcgccaaaaaggtaatcagacaccatatgagtatttgggacaggatgtgaaacgctggaatgaatttgttgcgcgtgtatcagcactggaaaaggacggaaagaagagagaacatttcttcaaagaacatattacagaggaagataaaaaacagttcaaagagcgtaatttgaatgatacgaaatacattacgacaattgtttataatctgattcgtcagcatctggaacttgcaccatataatgtgccaggtaagaaaaaacaggtaaaggcagtaaatggagtcattacatcatatcttagaaaacgctggggattaccacataaggaccgttccacagatacacatcatgcaatggatgctgtaacaatagcatgttgtacagaggggatgattaataaaatctccagaagtatgcagatacttgaattacgatatatgcgtaatggaagaatggttgatgaagaaacgggtgaaatctatgaccgtgagaattatactttgcaggaatggaaagacaagtttggtgtacacattccaagaccatgggagactttcaaggatgaactggatgtaagaatgggagaagatccattgaattttcttgatacacatccggatgttgctaaggaattagattatccagaatattattatccggatgagaagagtaattggaaaggatttatacgaccgatttttgtatcccgtatgccaaatcacaaggtgacaggacaggcgaataaggatacggtaagaagcccaaaactatttgaagaaggatatgttatttccaaagtgccacttacatcattaaaattaaaagatggtgagattgctaattactataataaagaaagtgatatgcttctttataatgcattaaaacgtcagttagaattatatagtaatgatgcagcaaaagcatttgcacagccgttccataagccgaaagcggatggaaaccagggaccggttgtgaaaaaagtgaaagtggtagataagcagtcatcaggtgtctatgtacatgaaggaaaaggtattacagcaaatggagatatgatccggattgatatcttccgggaaaatgaaaaatattactttgtcccaatttatgcggcagatgttgtaaagaaagtgttgccgaataaagcagcaacagcgcataaaaattatgatgaatggcgagagatgaaggatgagaactttgtgtttagtttgtatccgaaagatttgattcatgttaagacgaagaaagaagatggtttaaaattaaaaatggcgaatggagggatggtaaagagacaggaagaatatgtttatttttctgtggctaacatttcgactgcaagtatagcaggatttgcaaacgataaaagtttttcgtttgaggggttaggcattcagagtcttactatatttgaaaaatgtcaggtagacgttctgggaaatatatctgttgtaaaacatgaaaagagaatggatttttctgcaaagaagcattaaagaaatgaggtggatattctgggctttcgtaatataaagattgacagtaaagtgcagttacatattaagaaccaacagttattgattgataatggagaattgattcatattccattagaggatattaattgtatactgatagaaaaccaatcagtaactgtatcaagctatatgctgcagacatttgcaaattatggaattgcatgttatgtatgtgatgaaaagcatttgccgaatgcggtgttactgccattggtgagacatagccggcactataaaatattgaaagcccagatgaaccttggaaagccacttcagaaaaggttgtggcagcaggtaatagtacaaaagataacaaatcaggcattgtgtttaaaattacttgatatagaaggtagtgcagaattgttgaaaatggtcaaagaggttcaatctggagaccggatgcatgtagaagcaaaagcagcggcattttattttaagaatttatatggaattggcttctccaggggagatgataatatcataaatgcggcattgaattatggctatgctattataagagggattattgcacgttccattgtctgttatggattagaaccttccattggaatttttcatagcagcgaattgaatagttataatctggctgatgatatgatagaagcttttcgaccattggtagatttgtatgtagccagccattttgatgttgcagaagttgattttgctttgacaccagagataaagcgtggattatttggaattacaaactatgatatgtcagtgaaaggtgaaaaacgaattgtaagtaattgtatagatatgctggttgcgagttatagtggtgcaattcagggaaaaagaacagaattggatttaccagaattgatgcagttacaggtacatagttatgaataagtttatgagaatattagtattttttgatttgccggttgtaacaaaaagagaaaaaggaacagcagcaaagttccggcagtttttattaaaagatggttataatatgatacaatggtcagtttattccagagtctgcaatggaatggattctgttgccatgcataaagcacgcttacagcagaatcttccaagtaaaggctcggtcaggatgttgacattaacagaaaagcagtatgaatcgattgatgttttgttaggaacaaaaacatttgatgatgcatctgaatcggttgaattaataaatattttttgaaaaaaagaaaaaaagacatgtcatatcagtttaaattgattgaaatgaaaatggtaaaagcccgcatatctttagaagatatgcgggctttggtgctccctattataccataccaagtaataaccgggaactacgacataccaatattacttgaagtggtgaacgtgattataccataccaagtaataaccgggaactacgacgaaacattaatataaaaagagaggtaagaaattataccataccaagtaataaccgggaactacgacatacggtgataaactttttcaaggaattgcattataccataccaagtaataaccgggaactacgaccttttcgcgaaagacgaacgtaaaccgctattataccataccaagtaataaccgggaactacgactttgttgtttcttttttgccgcctgtcgttattataccataccaagtaataaccgggaactacgactaagaattgtaaaataattgttgacaataaattataccataccaagtaataaccgggaactacgacgtatattgaaaagctggttttaatagtccaattataccataccaagtaataaccgggaactacgactgtagccattttaaatattctaaactctcaattataccataccaagtaataaccgggaactacgacattgtttcaccatactcaagaataccctttattataccataccaagtaataaccgggaactacgacaatagatggttttatgacaatgaatagggattataccataccaagtaataaccgggaactacgacatgaaattttaggcaatcttgctcttaattattataccataccaagtaataaccgggaactacgacaaacatttaccgttagttttaattattgtaattataccataccaagtaataaccgggaactacgaccagaatgatatgtaatattatacacattatattataccataccaagtaataaccgggaactacgaccaatggttaacgcttttgcgctcgcttcgattataccataccaagtaataaccgggaactacgactacacacgaaaagtaacattgttaatttttattataccataccaagtaataaccgggaactacgacttccggtaaatccagtcgtttccgaaccacattataccataccaagtaataaccgggaactacgactgtaacaccccacacatgccaatgtaaatattataccataccaagtaataaccgggaactacgacattgcttttttctcttcaacaaattgtttaattataccataccaagtaataaccgggaactacgacttatattattattttacacctataaactttattataccataccaagtaataaccgggaactacgacctgcaatacatgaatttaataatctgaaaaattataccataccaagtaataaccgggaactacgactaatgccacataattaaaagcctttaacgattataccataccaagtaataaccgggaactacgactggcgaatactataaaatttcaaaatccatattataccataccaagtaataaccgggaactacgacaatcataatcactaatgtgatttacatgatattataccataccaagtaataaccgggaactacgacatgtaacagaatcggtaaatgaaacaaaacattataccataccaagtaataaccgggaactacgactaggtatcaacgttccttgtcaagaagtgtattataccataccaagtaataaccgggaactacgacatctccttcactctctctaaaaatccattgattataccataccaagtaataaccgggaactacgacgctggaaagaaccagacgctttactacgttattataccataccaagtaataaccgggaactacgacccgaatggtaagtaatgttatatacattgtattataccataccaagtaataaccgggaactacgactctgcaaccttgtttacatctgtcctttgtattataccataccaagtaataaccgggaactacgacctctctgcttcctttctgttatgtttgtttattataccataccaagtaataaccgggaactacgactcaccttcattggtcacaagctgctctgtaattataccataccaagtaataaccgggaactacgacctatactcctattcttccttggcttttactattataccataccaagtaataaccgggaactacgacccttttcgtgtggtcttgttctagtcacatattataccataccaagtaataaccgggaactacgacgtattataatatcaagaaataagtaaacaaattataccataccaagtaataaccgggaactacgacgccgtggccttggcatccttcgcgctggcaattataccataccaagtaataaccgggaactacgaccgttttgcatcttctcggtctatgtattcattataccataccaagtaataaccgggaactacgaccattttcgcggcttttatggtatattgttcattataccataccaacatatactatttaacatagtggggtgataaacgaaagcgtctgtgataggaaagctgcttgcagattttctatcacagacgctttcacgaaaaaaatatatatcattacacttgaaattaaaaattgagtattgtttaataatataagaaaaatagtattaccctagttatcaggaggtatagagtatgaacgattataacagcttaagcaacattttatattccaatgaactggatataaagaaatttgaaaatctgctgagccataatgcacaaggttacaaattcttctggttagaggcaattgttaatctgcttccggagagtgacggagtgattttctttgaagaaatcatagatgaaatgatatgggaagcatggagaatggttacatattatcatttgcggttaggtccgacagtaaatggaaatgcagcaaattatctggagcatgcggttagaaaactatatagttgtgccaaggctgaactttccattaaaatgttatccagagaacagctgaaagcactgattcacaaatataatgagcagttacacgaagataaagtccatctgacagactatgttccgtatagattgattagtccttttttggataaggctggaaaagactttgtggatcgtaaggattatgcaagatttattgcatatctggatggctataataaaatgcatgagggattcttttatggaatcattgatgccagaactgaattggaaaagaaaatttctattagtgaagaatggaaaaaatttattctgcagaatcatgccattatttcaggctggattcgttataaaaaggcagaatatcttcagaacagaaatcctggtgtgccgggaattatttataaactttcaacggaaccgcagaatgaacgtcatttggaaaatgcaagaaaactctggaagatgacggtggaagtgacgggaaaaccgctgtatgatatttatacaggaaatcctttggatgcagaaaaatttgatctggatcattttgtaccaaaatcctatgtggcaaatgacgaattatggaatcttacgccaatggatggtaatttgaattcaagcaagaataacaagctgccggcggaaagatatattaaggaatttgtgaattatcagtataaattttatgaaatgatatttaaaaatacaggcaatgcagcagagcagctgatgaaacaatatgaaaagtgcaagacgtataatgtcaatgccagctgggcaatggaaaaattgtatgtaaagggaaatacagataatcaatttaaagcacttttggaagaaaacataaggcttacatatgatgcggcaaagcttcaggaatatgaaatctgggaagtatagtctattgttccacatcccaatttgtgctagactatctgtgtcccagataagggaaaataatgtaaatgaagcaataaataaagtgaaacacaattatgagcagtaaagcagaaagcaaaagaaaaaatatcgagatgacatccggttctttatggaagaatatcttcctgtttagtataccgctgatgtgctctcagatactggaagtattatttaatttaagtgatgtagcaattgcaggaaaatatgcaggatatatagcccttggttcggtaggctccacgacacttttagtgtcactgtttaccggcttcctgattggaatgggaggcggtgtaaatgtcagggtggcacataagctgggcgtgggtgatgcaaaaggaacggaagagaccgtgcacacggcagcactgatctgtctggtaacaggatttattttatgttttatatgcaatgtatttgcagagccatttttaaacattttacatacgaagccggagtttatggatggagcagtattatatctgaggatatatgcgttgggaatgccggcacttgccatttacaattttggaaatggtgttttaagtgccataggagagacgaagcttccgcttatctatctgtcgatagccggagtattaaatgtattgctgaatctcttctttgttattggatgcaatctggcagcagccggagtggcaattgccagtgtcatagcacagtatgtgtctgcaacactggttgtggcacatttatgccggagaaaagacagctgcaggctgtatttttcaaagttgcatttccataaagaagcagccaaaggcgtgttaatgcttggagttccgggaggattgcagaatgcaatttttgcgattgccaatctttttgtgcagaccggtgtgaattcttttgatgcagttatggtgtcaggcaattctgccgcaatgaatgcggatactttaatatataatgttatgggagcattttatacggcatgtgccagtttcatggggcagaatatgggagctggaaacagggaacgtacgataaaaagttaccgtatcagtttattatattcttttctggcaggagcagtttttggcggactgctgcttattttcggaagacagttcctgtctctttttgccagcaaaccggaggtaattgaagccggaatggagcggattaagattatgggattttcctatgcactttccgcatttatggactgcaccattgcggcatcccgcggaattggaaagagcattgtgccgaccattattgttatcatgggctcctgcgtattccgtgtaatctgggtatatacgatttttgcatattttggaaccattgcatccttatatcttttatatgcattttcctggtcgattacagcaattgccgagattatttatttcaaagtatgcttccggaagcttcggatagcggcatagaaccatagagtcatggaagaaagtaaaaaagaaagcggaagagagaaagaaaaatggaagaacgacgttcagagaatacgaccctttgctatatggaaaaagaaaactgttatcttatgatgcaccgggtgaagaaaagccatgatgtaaataaagataaatgggttggtgttggcggtcattttgaagccggagaatctccggaagaatgcctgcttcgggaagtgaaagaagaaaccgggcttaccttggattcttatcggctgcggggcgtggtaacttttgattccgatgcgtggccgacggagtatatgtttctatatacggcagatgaattccacggtacgatgaccgagtgcaacgaaggaacactggaatgggtgccaaaggaagaagtatatgacctgccaatctgggaaggtgataagatatttttccaactgttagaagagagggagagcttcttttcgctgaaattatcctatcagggagatgctttgacccgtgccatattagatgggacaacccgattgaaataaaagtaaattataagtagaaataagcaaccagataccattaattagaaaaactaattagtggtattactatatataattggtctttataagcaaatgacgttataatgtaagtagcattgagcagtgccagaccttataagcagtccgttgggctgattaaaaggtctgatagggcgaaaacccgtagtatggaaatgcgaagcatttccatacttgcactgaaaaaataaagagcaagataaagaataatttcaggaggaagaacaatggattacaagaacgcaggcgtggatattgaggcaggatataagtccgtagaactgatgaaggagcatgtaaagaagaccatgcgtccagaggttcttggaggactgggcggattttccggagcattttcattagagaagattaaagaaatggaagaaccggtactgttatccggaacagatggctgtggcacgaaagtaaagctcgccatgattatggacaagcatgataccatcggtattgatgcagtagcaatgtgtgtaaatgatattgcctgtgcaggtggagaaccattattcttcttagattatattgcatgtggtaagaattatccggagaaaattgcagccatcgtaaaaggtgtagcagaaggctgtcttcagtctgatgcagcattaattggtggagagactgcagagcatccgggtctgatggcagaggatgaatatgacctggctggatttgcagtaggtgtatgtgataagaaagatatgattaccggcgagaccctggcagacggtgatgttctgattggtatggcatcaaccggagtacattccaatggattttcactggttcgtaaaatctttactatggataaagaaacccttgatacataccatgaagaactgggaactactttgggagaagccttacttgcaccaaccagaatttatgtaaaagcactgcgtgccatcaaagatgccggcatccgtgtaaaagcctgcagccatatcacaggcggtggtttctatgaaaatgttccacgtatgcttccggaaggaaaacatgcagtgattgaaaaaaacagctatccgattccaccaatctttaccctgatggcaaaagaaggaaatgtagaagagaaaatgatgtacaatacctacaacatgggacttggtatggtactcgcagttgcaccggaagatgtagataaaaccatggaagcaatcaaatctgccggagacaagccatatgttgttggtaagattgaaaacggagaaaagggtgttacattatgctaaaagttgcagtattagtatccggtggtggaaccaatcttcaggcaattatcgatgccatggataatggaaccattaccaatgcaaagatagaagtggtaatcagtaataatccgaatgcctatgccttagagcgtgcaagaaaacataatattaaggcactttgcatttctccgaaatcctatgagaaccgggcggcattcaatgctgatttcttagaaaaattgaatgaatataaagtagatttggttgtgctggcaggatttttggtggtaattccaccggaaatgattgcacagtaccgcaaccggataatcaatattcatccatccctgattccatctttctgtggaacaggcttctatggattaaaagtccacgaaggagcactttcccgtggagtgaaggtaacaggagctacggtgcattttgtggatgaaggaacagataccggtccaatcattttacagaaagcagttgcagttgaagaggatgatacgccggagattctgcagcgtcgtgtgatggaacaggcagagtggaaaattatgccacaggcaattgatttaattgccaatggaagagtaaaagtcgaagacgggaaagtgaagattcttccgaaagcagaccattagaattgagtaaaagtaaataaagattaagtagaaatgaatgaaaaataaccggattaggaggagcagcatgaaagtattagtagttggaagcggcggaagagagcatgcaattgtgacaagcgtagcaaagagcagccgtgtagataagatttactgtgcaccgggcaatgccggaatcggacagctggcagaatgtgtgaacattggagccatggaatttgacaagctggtagcttttgcaaaggaaaaagagattgattttactatcgtaggaatggatgatccattggtcggtggaattgtagatgtatttgaagcagaaggattaaaagtattcggaccgagaaagaatgctgcaatcttagagggatccaaagcattttccaaagacttgatgaagaaatataacattccgaccgcaggatatgagacctttgatgacccgaaaaaggcattggagtatctggaaactgcaaaaatgccaatcgtattaaaggcagacggactggcacttggtaaaggtgttctgatttgtaacaccttagaggaagcgaaagccggagtaaaagaaatcatggaagataagaaatttggttctgccggcaaccatatggtaatagaagagttcatgacaggccgtgaagtatccgtgctttctttcgtagatggcaagaccattaagattatgtcttccgcacaggaccacaaacgtgccaaagatggagaccagggcttaaataccggtggaatgggtaacttctctccaagtcctttctataccaaagaagtagatgatttctgtaagaaatatatctatcaggcaaccgtagatgccatggcagcagaaggaagaccatttgtaggtgttattttcttcggtctgatgttgacagaggatggaccaaaggtattagagtaca

SEQ ID NO: 3876 - DNA, 23459 bp, synthetic construct
  misc_feature 1..23459: note = Synthetic
  source 1..23459: mol_type = other DNA
gaaaaacatggagtgcattatgaaccctttgataaaactgatacaaattaatcattcctttcagaagtctgttaatttacagctggatctggataattatgaacgcattggaagttatattccgacgcgttcttctattgcaattttaaagcgttattggaatatcgtatcaggaaaatcaggggagagtgcctctgttttgatcggaccttatggaaagggaaaatcacatctgttactggtacttctggcatttcttcacggaagtatggaacaggatcaggtgattttagggaaaatagaaaaaatcgatccacagttgacggaagagatcagacagtggataaaacaggggaataaatatcttccggtattagtgaattctgtttcaggtgcagatttaaatcagagttttatttatgcgcttcagcaggcattaaaccgtgaagggttacagaatctcgcacctgcggattattattcagaggcagttaaggttattgaaaaatggaagagagaatatccggaaacatatgtggcgtttgaaaagctggcagagcaggcaggatatgaaatggctgggttctgtatgcagcttgaaaagcaggatcgggaaagtctggacttttttacggaaacctatccaaaactgacggcaggaagtcaattccagccgatgatgcaactagatactgtccgcatttatcagcagatcaacagaattttggtggaagaaaaaggttatgccggcatgttcctcgtttttgatgaattcagtaaatatttggagggacatggagcagagtatttttcaaatgatatgaaagctttgcaggacatgtgcgagctggtgaacgcttcaaaaggacagatgatatttacactggttgcgcataaaagtattcatgattacggaaaaaccattgataaatcggtcaagaattctttccgtggtgtggagggcagaatcaaggaaattgattttatcgtatcagcacaaaataattatgaattaatcgcagataccattgagaaaaaagagccagagttttcagaggcgtacaaagagtggaaaaatcagtccgtatatggagacattgtggagaaaacatattatgtgccatgcttccaaaagctttttgcagagaatgaatatctggaaacacttggaaaaggatgttatccgctattgccgttgacagcttatgcgctgctttgcatttcggaaaaagtggcacagaacgagcggacaatttttacatttctggcggaagaggaacagggcagtttaagctggcttttgcaaaaaggaatagaggactttatcggaatcgataaaatttatgattattttaaaaatctgtttcgggacaatacggatcttccacagatccataatgaatggatgaaagcagaatatgcaatttcacaagtgtcagaggatctggagatccgcatattgaagacgatcgcgattatccgcatgattcataaagaggaagaactgcctgcaaaagaggagatattcagactctcacttggctgtggagaaaaagaatttcaacatgcaatgcagcagctcatggagaaagatctcattatatacagaaaacgcctcggggtgtatgcgttccgttctaacgtcggggttgacatagaaaaggcgatcgaaagccgcatgggagaactggaaagcagatttgatctgtgcagaagccttatggatagcgcagagatggactacgaactgccgaagcggtataaccagaaatttgcgatcaccagatatttccagtatgagatcatgctgctttcggatttcctgaaactggaaaacagtgcatatttatttgaagaaaaatttgcagatggaaaaattttactcctcatttatgaaaatgagacagatgtgactgaggtacaaaaacatctgcagaaattagcggatgacagactgatcgcactggtatcagaccataaactgtcagtcagaaatcttgctttaaaatatgaggcagtcaaaagcctgaaaaaagatgaaaaatttatcgaagataatgtggtactgcttcaggaattaaatttatatgaggatgatattgtttttgagataaatacagtgttagaacaggatttttcaccggaaagccggaacacagctgtgtttggaggaaatggagaaacagtggtctgcgcaaatccggcggactggaacgattatttaagcagtgtatgtgaaaaatattatgggcattctcctaaggtaaatcatgagcttttgaatatcgggtgtgttggtgcccaatataaaaaggctaggaatcaggtcattaaaaatcttttgaatgaaaatgactgcgcaggatatatgaaaggtaccagtccggaagcgatggtatatcgtgcagcatttgtccacacaaaaaatgatgaaggctgcaatcaggtttgcaatgagattgagaaattctttgaacaatgtgcgggagaaaaacattcttttgaaacattatacaaatgtctgcagggaaaagattatggtgcaagaaaaggaattatacctttattcctggcaaaaaagctggcagacacagaaggaactgccgttatttatctgaaaaataaagaattagaagtttcttttgatacgttaaataacgtgaatgagttcccggataaatatgaattatacattgaaccggagacggctgccaaggactggtatttaaaagaattagagcagattttctgtgaaaggggagatttcacacgctcaaaacaaagccggataaatggaatcgcggcatgtatgcagaaatggtatcgttcactgccacaatatacggtagttacagatcattattcgagtgagagcatttcaattgtaaaagtacttagaagtttattaaagcgtgcagagataaatccgagggaattgatttttgacagaattccagatgggatggaaacagatgattatgaacaggcaattgtgggggtcaaaaatgctgtctcggagatgaatggaaagctggatgaacttttaacacagatcaatatccagatcaaaaaagaatttcatgtggaaaaagatacgaatctgaaggcatgcctcctcgaatggtacgagagacagagtcatgcttcaaaacagtacatattaagtactggaatcagtaaattcatgtcttatctggatcaattagcgacaaatgatgaagaagaaattgtgcggaaactgagccggatcgtaacagatatgtatgtggaagactggaacgatacttctattgtgcaatttcaggaagaactgcatcagatacgtattgaaattgagaatatccaggatgcctctgctgccactgacagtaagagcaggtttattttgcaggatgcagagggaaatgaggttatgaagtattttgatgcagaaattacagatgctaccagcatttatctgcaaaatatgatcgaggaagcactggatgattttggtgatacgctggagatgaaccagaaagtagcagttctggttcaggcgatcaggaagttattgtagaaggtgggcagaaagagaccggatcattacgaaaaagatgtggagtacagatatggaaaaagtatattactttgataatgcggcaacgacatttccaaaacatgaaaatgtatataaggcaatggatgaggcaaaccgggattacgctgtcaatgccggaaggggcgcttatgcgcttgcaggaaaagcttctgaagttatcagtgggacaagacagcagatcatggaattgacggagacagagaatgtagcagaggttgtatttacagcctctgctacgcttgcatgtaacgagatttttggaggaatagactgggcgaaaaaacggaccgtgtacgtttctccatttgaacataacgcagttatgcggagtctgtttttatatcagaagcggtatggatttctgatcacagagcttgctctcgatgaaaaagggatggagctggatcaggagaaaatcagattccagttcatgagagaaaagccggatctggtagttatgtctcatgtgagcaatgttacaggttatattcttccggtagaagaaatagcagcgtcagccaaagagtacgaagcgattgtagttgtggatggtgcacaggcattaggattggttccaatttcacttaaaaacagtccgattgatttttatgtgtttgcagggcataaaaccttgtatggtccattcggaaccggaggttttatctatcattccaaatataaattaaaacatatgattgccgggggaaccggaagcgattcactgaatctggaaatgccagaaggaggaacggctgcctatgaacccggaagtccaaatgttgtggcaattgcaggactgcatgcatccctagaagagagaatggcatatttgaaagaaaatacagattactttctggacagggaaaaagaaatgacggagtatctgatcctgcagcttaggaagattttcggagtgacactgtatttgccaaaacatctggaaaatcacgccggaatcgtgtctttcaatgtagaaggctatcaggcaggggaagtgggaatgatcctggatcaggactatcatgtggcagtccggactggttatcagtgcgcaccgctcattcataaatatcttggaagtgtgagttatcttggagtggtgagagcgagtgtgggacggtttacaacgaaggaagagattgatgtgcttgtggatgcagtcagggaaattgcggaaggataaggagaggggaagttatgaaaaatgatacaaaaacaaatttgaaagaaatgattgaattaatacaaaaacaggagttgttattaccggattttcagagaggttttgtatgggatatagaaatgcagcaaagactggttgcatctgtattaactaaaatgccaataggaagcattcttgttttggaagcagatacagaggattttggatgtagaattttaggcagaaaagatgaagtggatatatctgcaggaaacagaaatgtaaatgtgctattagatggacaacagagaatgacagcattagcgaatgtattttcgaaccagctcttctatgattattccggtagtggaaagttaatgaccgattataggagactaatttcggttgatctgcaaaatcgtttctttctgcggataccatcggtagagaacctggatgaaaaagaagactggtttcatttgaaagaattacagtttgcgatgaccagtccggaaagtgatgttccagagtttttgacaggggatatcagagaagatattgtatatttttcttatgatgaaaaaacacaggaagtctatgcgccacatgctgaaaaaccacagaatataggaaatttttgtttgaaagaagattattattatattcctttgtttttattgattaataacagaaaaggggattcaagtaatgaaacccgtttgaaaaatattttaaaggacatcgtaacaagagtggtgcgttaccgtatagagaaagaatttgatattttaacaacggaaagtcagaagcaggaatttgtaaataaatatattgaagatgactataagggagaaattatcaaggcagagaaagtggatcgaagtgaacttgaagaaagctggatcagtatgggagaaacccattgggctgataagatgaagcaatatctgacatgttgtatatcgaatttggatcttcaccaaattgtagtgtcaaaatcagatagaaacagagctattgatatttatgaaaacttaaatataggtggcatatcgttaagcacatttgaattagttttagctaaagctgcaaaaaagaagcttgcaagtaataagaatctttttgatttaatcgttgatgatatacagcggacgaaaaaatacgatgaaaaaattgtcccagacaggatgaagaaatattacaaatgttttatagatacaattggaatgtactcggcatcggatagactcggatgttttgatgaaaaaaagaatcaattgaataaaaaatatacagatatttttttgaatgtattgtctctgatttgttatgttcctgattatcagaaaaatagagtggagttatcttatattaagagagacaaaatattgtcgttaacatcggatgaaatctgtgacaattatgggaaagcatgtaaaggaatagatagagcatgtttctttttgcaagtgagatgtggaattagaaaaatacaggaaataaactataatctcatgcttgttttattaggatacatattatcaaatgacagtttctatgagaacgaaaatataataaatatattagaagcgtggtattggtgttccatattttcaggaagatacgataaagaccaaagcgaaaatattatcgaagacatcaatcatgtcttaagtataattaaggatccggaagataagaactggattcaggatatgaaaaaaaatgtgtttcatatgcagggcttttctgataaagagacattgctaatgaaaacaagtgtaattccaaaagtagttgtaagaaagacattatgtcagttttatctggcagaaacatacacggatttaatgacggatgcagagatacaggtgttttcagatgtgtgtgacaaattagaggagcatcatattgttcctgtaggtacattagacagtacatataagggaatggaaaagaaacgcagggatgataaaaagaatgtctttaattctccattaaattttatttatattacaaaagattcaaatcaaaaaatttcaaatcatcaagtagagtattacgttaagtattgtaatgataattcagtttatgatttgcacatcgacattaatggaaaaaaggaaattaatgaactcaatttagctgagatacttgaaaaaagatttggaagcgtaaaagcggatgtggaaaaacgtgtgaatatgtatttataggagacagtcgagatgaaagaaatagatgaaagattattgaatacattaaccttcgaagtccttagcgcagaacgcagaaacctcagaagcaaagcattgacagaccagaaaatgtcggaggagatacaaaaaataattattgataacttaagaacaaggtagagacaaaggagagagcagcatgaagtttaaaagcatcacaatggaaaattttatgcgttacaaaggggtaaacacgattgaattcagctgtgatccgggcaaaaacgtgacagtagtattgggggataatactgttggaaaaacaacgattgcacaggctttccgcttcgggttatacggagctgtaaatatggagaaatggaaaaatgcagatgactaccagcttttaaataatgatgttctggcgttcatggatgcagacagtaaggcagcggtatccgttacgattgtggctgccgatgaggaaaagcagtatacgatctgccggaaaacaatttacagcagaaattatccacagatgacatgcagggaatttcagaaaaaagtatccatgaagatagcagatcttcaagcaccggatgtggtgacagaagtagatgagaggcaggtggaatatgttataaatgaactatttccaagaaatttatctcattactttctgtttgatggtgagcgttggagtgatgtcacggtcaacggtgtcagagaaaatatcaaagaatccgtacatagtctcactggattatcctcctatcaggcagcacttttacatctgaaagatatgggatctaactctgtcacccgaaaattcaaaagtaaaatcaccggtgatggaatgatgtatgattcgttggaaaatgaccggatgcggatagagcacatgattgaaaaagaacaggagcatgttaagaatattgatattaatataaaaaattatcaaaagaaatgtgatgagatcgaacaatatctggaagaaaataagagtacagaaatgctgcagggcaagttaaaaaatctgcagattgtgagggaagaacaaaggaaaagggcaaataatcattataaaactttagtgtcacagatcagtgacaaagcctatatgatgttctcacagccgctcattgaagcgtgtgtgaaaatggtgaaagctgttgccggggagagacgggatattccgcatatgcgacagggaacgatcgattacattattaagacaggcagatgtatctgtggcacgccacttacggaaggctcccatgagctggaatgtcttttagaacagagaaattatcttccgcctgccgatatcggatcgctgttaggagaatttgagagaaccggaaatcgttggaaaaaccgtaccgatggaagttatgaagaattaattgaaatggcgcagaatgtggatgacagtgtccacgattacgaagaaacctgtaatcagcttgaaattttgaaccggcagatggatgcgtcatttgatttcgcagaaaaaagaagattgttaagacattaccgctccgaaatggaaaaaacgagtgtggaaaaaggagagtgtacaggaaaaatttcgaactacaaaaaagagattgaaaatattgaaaacaacatgcgcaggcgggaagctgcaaacgaagagaaccgcaagtggagggcacgtctggaagttgcagaagcgctttatgccaagatgaaaaaagaatttgaacagaaagagcggaaaacatttctggaactcaataaaaatgtgcagcttaattttgaaaagatgttcaatgcgaaagataaaaagatccagctgaccgaacagtatgaaatacaaatgctttatcagacggagcgtggctaccgggaagaaaaaaatctttccgagggagagaagatcgcccgtaattttgcatttattgtgactgttatggagtacagcagacagaaaaaggcggaaaagcttggagtcagtgaacttgaaggagatacgctgcctatcgtgttggatggtcctttttcaaaactgggagatgaaaatatcaaactgatcgcaggtgtattaccggaagtctcggagcaggtgatcctttttatgctgaaaaaagactggaaatatacaggtttagattcttatgtaggtgcggcttactgtattgataaaaaagctgaggaagctttcgcattgatcagaaaaatggaggaactttaaatggctgattttgagttttttaagaaagagtttgaatttaaaggaaagcatgcaaagatggcacaggaattgtgggtgagagatgacacagaacgtacttattttaagcgactgatcgatctgtatgtggcggcagctattgttgggtttcgtgtagacagaaaggcagaggaagattattcgccatttgagacaagcagtattttcccggaacagatgttgaaagaaaaggaaaatctggattttatattacagatgatgatcatgctgaattacagaggaacactgacagatgaagagtgtgtgaaaaaagcttttcagggggcacagacgaaggaagaatttgagcagtataaaaagatgttcaatgattatgtccgcggcggggtggaagagctatacgaacagcttatcatacgaaaggcagatccggatgacaagtttcgtgataacagaacagcaaatctgatggcactgatggaaagatatggtgcagggaaaatgaacgttattccggaaaatgaagatgaaaccgtgagaattcagatttaaaatgaaaaatattgtcaaaaaacagaaaaaagtatttacaaatgtcggaaaaaggattagtataaaagggaattacaacataccaaataataaccggttactacaataaggtagtaaacctaaaagctctaatcccattcttcggaatgggattatcttttacccgtatttattcaagcgtatgaaataaatggcattgtcccgaaagaggttcaatgtagaacggaagtgcaaaaacatttttacatgtaacgttatgtctgtagttgatgaatgcagaacatggaaaggaagggttacttattatggaggaaaattttcagtacagaatcggattagacatcggaatcacatcggtgggatgggcagttttacagaataacagtcaggatgaaccggtacggatcacagatctcggggtaagaatttttgatgtggcagagaatccgaaaaatggtgatgcgttagcagctcccagacgggatgcaaggacaacccgcagaagattgagacggagaagacacagattagagcggattaagtttttattacaggaaaatggattgatcgagatggattcctttatggagcgttattataaaggaaatcttccggatgtctatcagttgcgatatgagggattagatcgtaagttgaaagacgaagaactggcacaggtgctgatccatattgcaaagcaccgcggtttccgttcgaccagaaaggctgagacgaagggaaaagagggcggagcagtattaaaggcaacgacagagaatcagaagatcatgcaggaaaaaggctatcgcacggttggggagatgctgtatctggatgaagcttttcatacggagtgcctctggaatgaaaaaggatatgtgctgacaccaaggaatcgtccggatgattacaagcacaccattttgcggtcaatgctggtagaggaagtgcatgctatttttgctgcacagcgggcacttggaaatgagaaggcaactgaagaattggaaaatgcgtatgtggagattatgacgagccagcgttcctttgatatgggaccgggactacagcctgacggaaagccaagcccatatgcaatggaaggattcggcgaccgtgttggaaaatgtacgtttgaaaaagacgaatatcgggcaccgaaggcgacttatacagcggaattgtttgtcgctttgcagaaaataaatcatacgaagctgatcgatgagtttggaactggcagattttttacagaagaggaaagaaagactataattgatcttttgctttctggcaaagagttgaaatatggaacgataagaaaaaaattaaacattgatccgtctttaaaatttaatagtctaaattacagtgcaaagaaagagggagagacggaagaagagagagtccgtgataccgagaaagcaaaatttgcaagtatgttttggacttatgagtattctaaatgcctgaaagacaggaatgaggaaatgactgttggacagaaggcagacttacttgatcggatcggtgagatactgactgcttataagaatgatgacagcagaagcagccgtctggaagacttgggattatccggagaagaaattgatggattgctggaactttcccctgcaaagtatcagagagtatcgctcaaggcaatgagaaaaatgcaaccatatttagaagatggtttgatttatgataaagcctgtgaagcagcaggttatgatttccgtgcgttgaatgatggtaacaaaaagcatttgctaaaaggggaagaaatcaatgctatcgtaaatgatatcacaaacccggtagtaaaacgttctgtatcacagacgatcaaagtcatcaatgcgatcattcagaaatatggaagtccacaggcggtcaacattgagctggcaagagagatgtcaaagaactttcaggatcgcacgaatctggaaaaagagatgaaaaagcgtcagcaggagaatgagcgtgcaaagcagcagatcatcgaattaggaaaacagaacccgaccggacaggatattttaaaatatcgtttgtggaatgatcagggaggttattgtctgtattccggcaagaaaatcccgttggaggaattatttgggggagggtatgatattgaccatattcttccatacagtatcacatttgacgacagttaccggaataaggtgcttgtgactgcacaggaaaaccggcagaaagggaatcgtaccccatatgaatacttcggagcggatgaaaaacactgggaagattacgaagcgagagtccggttacttgtccgggattataagaaacagcagaaattactgaagaagaatttcacagaggaagagcgcaaagagtttaaggagagaaacttaaacgataccaagtatattacaagagtagtttataatatgatccgccagaatctggaattggaaccattcaatcatccggaaaagaaaaagcaggtgtgggcagtcaatggagcagtgacatcttacctcagaaaacgctggggactgatgcagaaagaccgttcgactgacagacatcatgcaatggatgcggttgtgatcgcatgctgcacagatgggatgattcataaaatctcaagatatatgcagggcagggaacttgcctatagcagaaatttcaaatttccagatgaggaaacaggagaaatcctgaatcgggacaattttacaagagagcagtgggatgaaaagtttggcgtgaaagtaccacttccatggaattctttccgggatgaattagatattcggttgctgaatgaagatccaaaaaatttcctgctgacacatgcggatgttcagagagagcttgattatccgggctggatgtacggagaagaggaaagcccaatcgaagaaggcaggtatatcaattatatacgaccactttttgtatccagaatgccaaaccataaggtgacaggttcggcacatgatgcaaccataagaagtgcgagagattatgaaacgcgtggtgtggtgataacaaaagttccgctgacggatctgaaactgaataaagacaatgagattgaaggatattatgataaagacagcgacaggcttctttatcaggcattggtaaggcaactgttattgcatggaaatgatggaaagaaagcattcgcggaagattttcataagccgaaagctgatggtacagaaggtccggttgtacgcaaggtgaagattgagaagaaacagacttccggtgttatggttcgtggtgggacaggaattgctgcgaatggtgagatggtgcggattgatgtgttccgggaaaatggaaaatactatttcgtgcctgtgtatacagcggatgtggtacggaaggtgctgccgaacagggcggcaacacacacaaaaccatattcagagtggagagtcatggatgatgccaattttgtttttagtctgtattccagggatttaatccatgtgaagagcaaaaaggatataaaaacaaatctggtaaatggtggattattgctgcagaaagaaatatttgcgtattacaccggggcagatattgcaacggcaagtattgccggttttgcgaatgacagtaattttaaatttagaggacttggaattcagagtctggaaatttttgaaaaatgtcaggtagacatccttggaaatatttccgttgtccgccacgagaaccgtcagggctttcattaaaaaattgagggaaacatatgggatttcgaaatattatgattaccagtaatatgaaactacgcattcaggatcagcagttagttgtgactgccggggatgaggtgcatattccactggaagatattaactgtattttaattgaaaatcagtcggtcacattatctgcctatctgttacagaaagttgcggatagcggtattgcgctttatgtctgtgatgaaaaacatttgccaaatgcagtgttattgccaatggtgcgacacagccgtcattttaaaattttaaaatatcagatggagacgggaaagccattgcaaaagcgtttgtggcagcaggttgtgatccagaagatacgaaatcaggcactgtgcctgcaattactggagctggatggacatgaggaacttctcagaatgtgtaaggaagtacagtccggcgacaggacacatgtggaagccaaagcggcagcatactatttccgatgtatgtacggacttgggttttcgagaggaaatgatcatattattaactcggcattgaattatggatatgcaatcatccgtggaatgatcgcacgttccatcatatgttacgggttagaaccatcgattggtatctttcatcacagcgagctgaataattataatctggcagatgacatgattgagccattccggccattggtggatctatatgtttccagtcattttgatatttcagaaatagacagtacattgacaccggaaatgaaaaagggattgtttggaattataaattttgatatgtcagtgaaaggagatatgcgtattgtaagtaactgtattgatatgttgattgcaagttacagcagtgcattacagggaaaccggacagagcttgatctgccggaactgatacagctacaggtacacagttatgaataaatttatgagaattgttgtcttttttgatcttccggtcgtcactgcaaaagagaaaaaagcagccgcaaaattccggaaatttttgataaaagatgggtacaatatgatgcagtggtccgtgtattcaagaatttgtaatggaacagattctgttgcaatgcacagacagaggctgaaacagaatctcccggaaaatggctctgtccgggcacttacgctgacagaaaagcagtttgaatccattgatattttattgggagaaaaaacatttgcggattcaccggaatctacggaactgatcaatattttttaactaacacacaggcttgccatctatcggtagctcctttactattttgatagaaacgagacatatgcatataattataaaaagcgaaaaaggatagcaagtaattgagatggaagaacagacgatgagtgcaagagagaaaaataatgttaagaattatgtgaaagtgaggtgaggtgtgtgctaatgaatacatctgagtatctttctattattgaaaatattaagagtgaaatcaaggctgcgcaataccgtgcagcagttcatgcgaacgtagacatgctgctcctttatcatgatataggctgtgtaatcaatgagcataaatcatggggcaacaagtttattgacaatcttgccactgatattaggatcgcattcccggagagtaaaggatattctgttcgtaatctaaaatacatggcaaaatttgccgagacatatccagatcggaaatttgtgcagacggtgtctgcacaaattccgtggtctcataatattgcaattttggaaaaagtcaaagacccgcaacagcgtatatggtacattgaaaaaacggctgaaaacggatggtcacacaatgttttgattcatcaaatcgaaagtagtttgtatgaacgtcaggttctggcggataaggttacaaattttgaacaccgtctaccgtctccacaaagtgagttggcagtacagactatgaaagacccatatgtatttgatttcattccttttcgggaaaatatgcttgaacgggacattgagcaggcactggttcgggatgtcacaaagcttcttttagagcttggaacgggatttgcatttttgggaaatcagtatcccctgaatgtaggtggtgatgatttttacattgatttactgttctataatctgaatcttcgttgctatgtggttatagaactgaaaacgggtgacttcaagccggaatatgccggtcagctaaatttttatctgtcggccgtagatggtattttgaagaaagaacaggacaatccgtcgattggtttgcttctgtgtaaaagcaaaaacaatgtggtcgcagaatattcgctcaaggatatttcaaagccgattggtgtaagcgaatacaaaataactagcagtttgccggatgatctggaaaagcagctgccgtctgttgaagatattcagaaacggattaaataagaaaattgtaacaaaatttctgtttgacttttttcaaatcaatcaatataataattcctgaacgagtagcagactagcgtaaatccagttatgttactcgtttttttattttaaagttaatagaaagacatgaaaaaagtgtgtagcctatcagcgtaagtccagcttattgtgataggaacacactttttttgtgtcgcaaaacaaggaggtcaaatcctctgctcctgcaagggcagtcgcatttgcttcgcaaacaaggaggatgtatgtcagaaagtaacaaaatgaaggagatgccggtcaataggctcatggtgcagatgggaataccgatgatcttatcgatggcattgcaggcggtctacaacattgtggacagtgcctttgttggaaacatgaaggtgggaagtgaagcggcgcttaacgcactgacactggtgttcccggtacagatgcttatggtggcagtaggaattggaacgggtgtcggaaccaatgcgcttctcgcaaggacactcggacagggaaatgcaaaaaaagctgcaaaagtggcgggcaacagtttatttctcggagtaattatttatgtggtatgtttcttatttggaatttttggagtaagagcatatatttcatcacagaccattgatccggaagtgatttcaatgggaatgagttatttaagaatatgctgtgtggtttcatttggaatcattttcttctcattatttgaaaaattattacaggcgaccggacgttccctttattctacgatcggtcaggtggtaggtgcggtcgtaaatataattctagatccgatcatgatttacggtatcggaccggttcctgaaatgggcgtggagggtgcagcctatgctactgtaattggtcaggtcgcatcggcagcattattatttatttttcatatgaaattaaataaagagtttgaacatggtgtgggatacatgaagcctgataccggaattataaaagaaatctatgcgatcggtcttccggcgatcattgcacaggcattgatgtctatcatggtttatgtgatgaatctgatcttaaaattcagtccttctgcacagaccgcatatggattgttctataaagtgcagcagtttgtattgttcctcgcatttggactcagggatgcgatcacaccgatcattgcgtttgcctacggaatgcacagcaaaaagaggattcaggacggaatcaggtatggactgatttatacgatcgtacttatggtcgttggtgtggcaatcacagaaattttcccgggtgcttttgcgacgttatttaatgcgggacaatccagagagtatttcattggagcgatgagaatcatttccatcagctttatttttgcgggaatcaatgtggcatatcagggaatttatcaggcactggacggtggtatggaatcacttgtgatctcgctgctcagacagcttataattatattaccgctggccggtattttctctgtttttgtcagaaacggtcagatgggagtttcgttgatctggtgggcatttccaatcaccgagcttaccgcatgtctggtgggatatgtattgttgaagaggatcagaaaaaacaaggtggaaagtttaaattaaggaggagtcagttatggaaaagagaatcataacgatcagcagagagtttggaagcggcggccgctttattggtgaagaagtggcaaagaaacttgggatttcctattatgacaaggatatcatcggacagattgcagagcagtcaggattttcaccggaatatatccgggaaaatgcggaattgtctccgaagaaaggcttatttgcctatgcattttccggacgtgatatcacagggaaatcagtggaagatatggtgtatgaagcacagagaaacgtgatcctgaaaattgcggaaaaagaaagctgtgtgatcataggaagaaatgcggattttatcttaaaagaccgggaggatgtgctgaatgtttttatacacggggatatgccggaaaaagtgcagcgtatctgtaaactttacaatgtcgcagaagctgatgctgcaaaaatgataaccgaaacagataaaaggcgcagaacaaactataatttctacacagaccagaaatggggaatggcaacaaactatacattatgtttgaacagctcgcagcttggatatgaaagatgtgaggaaatcattatggagtgtgtaaaatagagaatagtatggatcaataaaaagaactggtttttgaggtgtcccctcaaaaaccagttctttttttatgatgtctgaaattctgttaaattaacacttctcaggttccggataatcaacaccgaacgtttcaactgtcacggttttcattacctgtggctgtaacggacgatcagagtaatcggttgctgtttccgcaattttattgacaacatccataccctcgatcactttaccgaatgcagcataagcgccgtctaagtgtggagagttcttgtgcatgatgaaaaactgggaaccggcagaatccgggatcatagttcttgccatggataaaacaccttcagaatgttttaagtcattcttgaaaccattctgggagaattctcctttgatctcatagccaggaccacccattccggttccgtctggatcgccgccctggatcatgaaaccgttgatgacacggtggaagatgacgccgtcataaaaacctttttttactaaactgataaagttgtttacagtatttggtgcgatttcaggataaagctctgctttcatgatatcgccgttttccatctcgattgtaacaattggatttgacataataattgattcctttcattgaatatgatatcgtgatttttcatatacacaccatattgtaacgaaaaaatatgttttcgtaaagataaaacacaaaaaatcaaatcgttgtattctgaaagcagactctgatcttttgtgcaatgccggcatcaataaagcctttgtctgccatatcatcgagaatatcgcaggttttttcatgcgaaaaaccctgtttataagggcggctttcggtgagtgcctgataaatgtctatacacgccataatgcgttccggctcgtttaattcggcggcagttttgccgaaaggatagccttttccgttcagtttttcgtggtggaatgctgaccagtcacggatgtcttcaaaatcgttgatattggacagaatcagataagtatatcctgcatggtttttcatttttgaaaattcttcatcggtcagcttatccggtttttccaaaatatcattgtcgattgccattttgccgatatcatgaagtgcgccggccagatacattttctgaacctgtgtgggatcgtagccgttgtacgctgcaaatgcggcggctttctctgcaacaccaatggagtgtctgcttgtaaaagaagatttatagtcgacgatctgcgcaaaaaagtcggcgatatttttgcaggtttcccagtcaaaggtctgtttttctctcggaacgatctcccagagtttcgtttcaaaggagtcatccctgaaagctgcaaattcgttatctgaaaatatatggaaaaaagcatccacacatgcggcgtcaaaaagtttatccgtatgccggatcaggtactgttttaccacatcccatctctgtgtttcaaaagcaccgctgtgcccgatgatgtccaccacatcggcaaggtggataatgcgcgcagacagaggaacttcatcccattttttgtgaaatggtcctgtgccgtccgcatgctcatgatgatataagattgcgttggctacatcggttttaaaagggatttttgcaagattctgttcaccgtagatgcaatgcaggtttgtagtgtttgccacaaggtcagcggtcaggtcttttgcagaatgcttctgcaattcctcggaaatatattgggtgagggcattgtcgtgcagtagggcgcagattgcgagatcctgcagggcatcctctggcagatcaaaatactgccccatgcgcacactgatatatgccactcgctttccatgtttatttttaatattcaccagttctgcctcgatgcagtcgagagcataggaacaggcactgatcaaaccgataatatctatctccataatttattttaaagaaatcggacggcatacaaagccatgccttgcgatttcataacctccttaaattagtaataattcctattattggattataaaatcagttttccatattgtcaataagttaccgttcacaggttaccctgcgaacggtaacttcgcagccctatataaagttttgcttcgcaaaagagggctgctcacacccacatcacgttcatacgcacctgaacagcatggtgttcaggtgctgagtgaacagtaacgtcaatattcgttacagtattcatatgaccatgattagttttggaaagaatagcagaagtttcatatttttatatgaagtgtctcaaaaaacttccttgtaaatttttttgttttatggtttgataagtacagaaaaagagtattggagaataaaggagagaaaaagtatgccagtttttgatttcagcagcgcttcagaggaaaaagaagcgtttgtatgtacatataccgcatttacatcagacagttccgaaaaaacaccggacaatccgatcctggtgttagacaatcagcaaaagcagtggagccatcattccaccggagtattttgcaaccagagccagtggacagcatttgagtttaaggaggaggacgagacattccgttccaatatcctgcggatcgatgcacgttttgtgaatctgatcaaatggcttggggagaaccgtatcaacgttcttttgtccggggaaaacagggcggacggctatgccgtgtacaagatcagggaaaatgcttttcacggtggaacgaaactctctgcggcggatggatttttacagtatgtgatggaacgccttttatcgagcagtgcaccggagcaggaggatgaggacgaagagttagacgagagcggtgacagcatgaagcttaccagtatccagagtatttcagatttcttaaactgcgcaggaagaaccatgccggacaatatcagactgtgggcgagaagaaatttagcagttgcacgttccagcgaagtgtctgctgaggaacgccgccacgcgcagcgtgcactttccattatgacgaatatccagtggaaaaataattattttgaagcaatcgatccggtggaagcgcgcaggattttagatgaagaactatacggaatggaaaaagtaaaacagcgtattatggagaccatcatccagatcaaccgcacgcacacacttccggcttacggacttctgcttgtcggaccggcaggaaccggaaagtcacagattgcctatgcggtggcaagaattttaaaactgccgtggacgacactcgatatgagttccatcaatgacccggagcagctgaccggaagctcccgtatctacggaaatgcgaagcctggtattattatggatgcattttccatggctggcgagtcgaaccttgtattcatcatcaacgagcttgataaggctgcatccggaaaaggaaacggcaatccggcggacgtacttcttaccttattagataatcttggatttacagacaactatatggaatgtatgatcccgaccggcggtgtctatccgatcgcgaccgccaatgtaaaagaagatatcagtgccccgctgatgtcacgttttgctgtgatcgatatcccggattacacgcaggaagagaaaaaaatcattttctccaaatttgcactgccaaaagtattaaagagaatcggattgctgcagggcgagatcgttctgaccgaggagggactggatgaactgatcgagcagtataagaatacatcgggaatccgtgatctggagcaggcggcagagcacctagcagccaatgcactgtatcagattgaagtagaccatgtaaaacaggttgtgtttgatgcggaaatggtgaaaaaattatttgcgtaaaaaacaaaatataagaaaggtaaaaagaccacttcatgaaatttttcgtgaggtggtcttttactgtccgaattaatggacagaaaatatggataatgggaagcagcaagagggcaaaatgacggaaagtgaggagcatggcagatgaaaacggaatatcagattattgcggtagactttgacggaacactttgtacggactgcttcccaaagatcggacagccgaatacagcactgatcgaactgctgaaaggattgagaaggcagggacgccagattattttgtggacgtgccgctgtggaaatcagttagaggaagcagtggaatggtgcaggaagtgggaactggaatttgatgcagtgaatgagaatctgccggagattatcgaaaggtacggatcagacggaagaaagatttatgcggatgtttatattgatgacaaaagctgttttccatgggaggtaaaaaaggatgagaaagttggattatgaatttatttttacatgcggtattgttgcatttatcgcagcgcttggaatggtagctggcattgttgtgctggctggggcaaagatttatgtttataacctgcctttgatcgtgggaagctttctggctatcggaggactcttgtggggattattgttagttttgaacaatgataaggtggaaaaaaggacaaaacatcgttactgctcagacagtatctgagcactttgctgtatcatacatatcagttactatatttaccagattaaggttgacgctctatcgtgaattaaatataataaacttgatttactgtgtctttttggggaataccgaaggcatctggaggaaaaatgagaagaaaccttaatataaaacagagaaaatggcggagctttatctttgcaacgatttttggtgtgacagcagcgactgcggtcattacggtaaaaccgttggaaagttatgcgtatacggagacggcgggtgttttgaatgatggaccggtacagatgcgaaagactccggtagatggggacaagatcacatctttagctgcgggtacagcagtccgtgtgatagatgaagtggatggctccgatggaatgaaatggtacaaggtacagatttcctataatggaatggcatccaccggatatatccggtcagattttatcacgctttcaacagaagatacctcttccggaagtacgatcacagataattcagcacagggtgcagccggagttgtcaccaacacgaacggcaatgtctatgtgaggacaggtgcgagcacggcatattctccggtcacgacggtaaaaagagatcagacagtcaatgtactcggacagacaaccacaaatggaactgtgtggtacaatgtgacatttaataagaatggtgtggattatgcaggttggatctgcggaacctatctggcagtaaccggacagacttctgcggatggatcgcagggagacaccacaacggtgacggatgaag

SEQ ID NO: 3877 - DNA, 23423 bp, synthetic construct
  misc_feature 1..23423: note = Synthetic
  source 1..23423: mol_type = other DNA
ttattgggaaaaaggattgaccggggaaatgatcgtaaaaaattattacgaaagataaagacatataggagttgccggaatggaacaatggagaaacttaatacatatcaaccgtaatttccaaaaagcagtcaatttgcagcttgatataggagatcatggaagaattgaacattatataccgacacggtcatccatgttgatattgcgcagatatttaaaagctgtgatgggagaggcaaaagaacatgcaactgttttaatcggtccgtatggaaagggaaaatcccatttattactggtattgctttcaattctttcctgtgacctgccacagagtgtttttgaaaaaataaagatcacagatccggagacagcggatttagtcacgcagatccggaaggagaataaaaaatatttaccggtattggtttcttctgtaccggggttttccatgaatcagattttattattcgcactgcgcgaggcattagagaaaaatggtttgtcggatattgcaccggagactgcattcacagaagcacttagaatccttgaaaagtgggaaaaggaatattcggatgtgtatgccagattttgtgagtatctgacggaacatcagacagatgtgcaggatttgaaaaagaatctgaaaagaaaacataaacagtcattggaattatttaaagaattatatccgatgctgacggcaggaagcacttttatgccattgatgcagtctgagaccatacggtcatatcagcagattataagaagtctgacagaagaatgtggttatgagggcatctttattatttttgatgaattcagtaaatatatagaaggacatgagaaatccggttttgcagaggatatgaaaacgctgcaggatatgtgcgaattggcggaaagttccgatcagaaattattttttacaatggtggcacataaaagtattcatgagtataccaggagtatagacacttccatgaaaaatgcgtttcgcggagtagaaggaagaatttcagagatatctttcgtcgtatccgcacaaaataattatgaattgatcgccaattcaatccggaaggaagaacctgcgttttcgaaacaatatgaaaaagagattgtgaaaaatgagcaggggaagctccagaagttatcctatcagcttccatgttttcagaaattattttcagagcaggactttgaacggatcgttgccaaaggatgtttcccgctgacaccgcttgctgcgtatgcattacttcatatcagtgaacgtgttgcacagaatgagagaacaatatttacatttttagcagatgatggacagggaagtttatcatggctgttagagcggaatgaagaaaactgggtaggcgttgataaaatttatgattattttaaatcaatgttccgtgaaaccgaagatgtaccgatgatccattcagagtggctgaaggcagagtatgcgctgggaaaagcggaaacggaagatgagaaagctgtcataaaagcaatcgcagtaatccgtatgttacatagagaggatgaacttcctgcacaggatcaggcaatctgtcttgcattagggatggatccggaaaagaagtatcgtcctgcaatggaaaaattaaaaaaagatgggattttaatgttccgcagcagtgtcggagtatatgcattccgcagcaatgcaggcgttgatgtggaaaaagaaatcacgaagaagatggatgagcaaaaagggcactgtaatttttgccagattctgtcagaggctgcagacacagagtatgaactgccaaagcagtataatcaggaatatgcgatgacacgctattttcagtatgagtatatgtttgcagaagagttttttgccctggaaaatacaagatatctgtttgatgaaaagttttcagacggaaaaattatagtgatgccggaaaaagaaaaaccccaaacagatgagatacaaaagcagttagataaactggcggataaaagaattcttgtgttagtgtccgaccaacgttttgacaaagaggaattattacttcgctatcaggcggttatgacgttaaaaggggacaaacgctttattgaagaaaatgaagtgctgctgcaggaactggaattatgtgctgaggatatccggtttgaaattaatatctatctggaagagcattatctgccggagagcggaaaggtaatagttctccagacgcaaaagaaaaaagaaaagtgtacaacggccgcagaatttaatcagatattaagtgatgtctgcagagaatattatggctacgcgccgcgtgtaaaccatgaactgttaaatattgaacacatcggcaagcagtatttaagagcgcgcaatcaggtgatcgataaaatgttagggcatgaggatctgtctgtgtaccaaaaaggaaccatgccggaggctatggtatatcgtgctgcatttgtgcataccagaggggataagggctgtcagaaagttagtttagagatagatcgtttttttgcggaatgtgcaggtgaaaaaaagtcttttcagatattataccagcgattgcagggaaaatgttttggcgcaaggcgaggagtgattccattgtttctggcaaaaaaattatctgaaattgaaggaacagcggtcatttatattggggagaaagagctggaaattacttcggataacctgaatcatgtgaatgattttccagaaaactatgcattgtatctggagctggaaaccgttgaaaaagaaaaatatttaaaaaaattggaaaagatttttgaatgtgatacggagaagttttccggacagagcagattcgcacagattgctgcctgcatgcagaaatggtatcggtcacttccccagtacacgatgataacactaaatcttccggaaaatcaaagtggatcgataaagaaacttaggaatctgttgagaagagcagaaatcaatccaagagaattgttatttgaaaaaattccggcatgctatggagaacctggttttgagcaaacggcacaggatttaaaagaaagtaaaaaaatattagatgatgtatttattacattaaaaaaacaggtcgcaggaaacataaagcgcgaatttggaaaaacgcagaatgtgagtctgaaagcatgtttacacgaatggtatctggcacagaattattcatcaagaaatcatgtactggcaacggcagagagtgaatttttgaattatttagagaaactttctaccaatgatgagggagaaattgtatcagcgttgtcttatattttatcaggggtatatttagaggactggaatgatacaaactttgtagaatttcaggagaaattgcacgcggtaaaagctgaagttgaaaaacttgaggaacatggtaaagatgcaggtggcagcagtcgtatcctgttgacagaccagaatggaaatgccatagaaaagtattataatgcggatatttcggatacaacgagcctttacttaaagaatatgttagaagaggcattggaggactttgggaatacgctcgaaacaaatcagaaggttgcagtgctggtgcagactttagagggattattacagtaagagaagaggagattggttatggaagaaatttatcttgataatgcagcgacgacatttccaaaaccagaatgtgtatatcaggcaatggatgaaattgcgcggaccggtgctgtcaatgcaggcaggggttcttatgcgctggcgcggcaggcatccgggttgattgagagtacaagaaaacagatcaaagaacttgcaggagcagatgatgtagcagaggttgtgtttacagcctctgctacgcttgcatgtaacgtgattttagggggactcgaatggaaacagacggatatcgtatatgtttcaccttttgagcacaatgcaatgatgagagtgttgtatcattaccagaaacaatatggatttaaaattatcgaacttgcattaaacagggagtcgttagaattagatttgtcacagatcaggtttcagttcaccagagaacatccaacagtcgttgttatgagtcatgtcagcaatgtgacaggttacattctgccaatcaatgaggtggcagagtcagcaaaacaatatggagcagttgtggcggtggatggttcacaggcgcttgggcttgtgccggtaaaattgaaagagagtggaatcgatttttatgtttttgcggggcataaaacactctatggtccgtttggagttggaggatttatcagtgagggggatatttctttaaaaccgtttcttgtgggtggaacaggcagtgattccttaaaccctgatatgccaggacaaatgccgggaatcttagaaccgggaagccccaatatagttgcgattgcaggattacatgcagccttagaagcgtgctgtgacatggaaaggcaactttcacaagaaagaaaatttgcagaatatctgattgaaaagctaaaaagaatagacggagttttactgtatctgccttgggatgaaatgaaacgaaccggaattgtttctttttccatagagggttaccgtgcggatgaagttgggatgctgctcgatgaagattatcatatagcggtcagaacagggtatcaatgtgtaccgctgatccataaatatttaaaagataaaaaatatggcggcgtgatccgggtggggatcggacgttttacaaagcagagtgagttggaaatattaatcaatgcgatagaagaaattgcagaagggtgaaggaaaaatggaaaatcaacgtttggattttggagagattgtcagaaaaattgcggaggataaaatgctgctgccggattttcagagaggatttgtctggaaggatgaagaacagagaaagatcgtagcatcagttctggcaaaaatgccgatagggagtattttactgttgaaatcaaagccggatgagtatgcatcgaagtcaatcggtatgaaagaaaaaaatacatatcaaagccaggatggtgaggtcgaatttctactggatggacagcagcgtatgacagcgcttacgaatgttttttcaaatgtgatttatgaaaaatgtaaaatgttttcaaaattgagttcacgggcattacagcgaagattttttttaagaattccaaagtgggagaactgtaaagaagaggcagatctgtttggagtccataatttgacttttcccatatcagattctgcggaaccggattttctgacagcggatattttaccgtttattaaatgtgccgcattttttaatcaggatggagagccgtataatccacagcagtctttgtcgacccgtctggatgatttttgcctgacaaatgaggatggatatttagtaccgctgtatttgatggtggcaccggaaaatataaaaaaggcgcagataatgctgcgctataatacgatcacctctgatatcgcaggtaaaatcggagatgagatcagacagcattttacagatttgtcggatgaaaataagaatgattttatagcagagatttttggaaatgatgaaaactgtaatgaaataaaagaagatcattctaagttcggtgaaaaagtgcaagaaaaacaaatggtgtggaaagtctgtctgacaaattatctggattcctgtgtaaagaatatggcgttgaataagattgaggtatcgggggaacagcgtgacagggcgatcgatatctatgagaatttaaatcgtggaggaatcagtttaaatacttttgatctggttatggcgagagttgcaaaagtaagtacagataatttttatcgtcgtctggtcaggtatattcaggaagaaaaaagttatgacaaacaggtcttaccggatcagattgttcccttgattgggaaaaaaatacaaaataatcaatacaatgcatccatcagtacgggatgttataacgaggaaaagaatgacatagcaggaaagtatattgatgtttttttagatgtgctgtgtctgtattgcaataacaagttatttgaaccggataaattcaaattagattatataaagaagaagcagattctgatgttagcaccaacggatattaatgataatgcgaaaaaggtttgtgatgccatagacagggtaatgtttttctttcagagcagatgcggaatccggaatatccaggaaataaattattctttgatgattgtcttagtggcagttatatttttaaaggatgagtggtttaacgataaaactgttcacgatattttagaagcgtggtattggtcatcattattttccggcgagtatgataaagatcagaatataaagatgatcgcgcatcttcagaccatggtaaagacaatgcaggcatccagccgaaaagagaatgttgactggattgcaaatatcaaaaattatgtgttggaagcacagaatttttcggatgaaaagtttttactgatggaaaaggcggatgaagaccgtatcccgaaaaaagtgatgcgcatgtttatgtgtcagtatctgctgtcaaagacatataaggatatgtttgacgaaaataaaattttaagtgcatattccgatgaaacagaaagatttgaggcacatcatattataccgcttggaacagtaaaaaaggtaggggaatctacgaaaaaacttcgtgatgatgaaaaaaatatctgcaactcgcctttaaattttgtgtacataacgaaaaaagcaaataaggaaatatccgatgaatccttaaaagattatgtacagaagatcaacgcggaagcaaaagcaaaactgcatattacggcttatacaaattcggatataccacaagatcaggtaaaacagattttaagggaacggtatgatttcctgaagggggatatcagggagcggatcagtactttattaagttaaatacggcttggaaagtgcagataaagatattgttttacgaaagaacaatgcaggatggaggtattttatgaaagaggtcagtgaaaaagtaatgcggaatatgatttttgaggttcttcatgtggagcgtaaaaatttgcggagcaaggcaaaaacagatcagaggatggctgaggaacttgcaaagatcatagttgattatgcgaagatgtcagtgtagcagacttagggggagaatagcatgaaattccagagcattacaatgaataattttatgaggtataaggggcagaatgtaatcgagttcagctgcgatgaaaaaagaaatgttactgtcgtgctgggagataatacggttggcaagacaacaattgcacaggcatttcgctgggtgctttatggtgcggtattgacagaacgcggaaagcagcaggaagactaccagctgttaaacaatgatattctggcaatgatggatgcgaacagtaaagcggatgttacggtggaactggttgctgttgatgatgaaaaaagataccggatcaagcgtgaaatccattatacgcgtgcatatccacagttgatcgcaaaagaattttataagaaagtttcactggaaatatcagaaaaggatgatccaaatgccggtatttctgtggaaacggaaaaaatagaagaggtaatccgtgaattatttcccaaaaatctgtcacattattttttgtttgatggagagagatggaatgatgtaactgttaacggtgtgcgtgaaaatatcaaagagtctgtacatacactgaccggattatctgcgtatcaggctgcaatctggcatttgaaggatatgggaagtcattccgttattaaaaagttcaaaggaaagatatcaggttctggtaatatgtatgataatctggaaaaagaccggaatcgcatggaacatgagatagagcagtgtaaagataagataaaaaatatcgaaatcaatatacaaaacaataatgaaaaaatagaggaggtgcagcagtatcttcttgaaaataagaatacggaaattttgcaggcaaaatataaccagttattagtagtaagaagaacgcaggcggaaagaggagttgctgcatataaaagtctggtaaatttattcagtgataaagcttatatgttgtttgcgaaaccgatgatagaggcatctgtgaaaatggtaaaatctgttgcaggagagcggcgtgacataccgcatatgcatcaggcaagtattgactatattataaaaacaggcagatgtatctgtggaactccaatattaccggagtctaaggaattagaaagtctgatggaacagagaaattttcttccgccggcagatattggttcattgctgggtgagtttgaacggacaggacagcgctggaaccggcaaagcaattctgtttatgatgatttaagagaagatgcgcaaaatgtggatcagagcatccgggcttacgaggaaacctgtaatcagttagccgggatggaacagcagatggacaggcagacagactttgctgaaaaaagaaaaatgctgaaatattatcagagtgaaaacagtaaattaggggtggaaaagggaacactgcagggacagattataaactttgagcggcagattgaacggatcgaagcggagatgaagagccaggaggtcaagagcgaagaaaataaaaaatggcgagagcgtgtagatttggcagaagcattatatacaagattaaaaaatgattttgaggtaaaaaagaataagacatttctggaattaaacggacagatccaaaaaaattttgagcgtatgttcaatgcgaaagataaaagaatacagttgacggaaaattatgagatccagatgttatatcagacggatttgggtttccgcgaagagaagaatctgtcagagggcgaaaagatagcacgcaattttgcatttatcgttacaatcatggaatacagcagaaataaaaaggctgagcatcttggagtggaaagtggaggagatacactgccgattgttttagacggaccgttttctaaactgggggataaaaatatcagtctgattgcaaaagttttgccggaagtatcagaacaggtaattatttttatgctggacaaggactggaagtacacaggactcgatgaatatgtcggtgcgtcttattatattgaaaaagcggccgacgaggcatatgcgtccatacggaaagtagaatctgatcagtagcggaaggggatacaaaagatggggaattatgaattttttaagaaggagtttgaatttcatggaaagcatgccaggatggcaggtgaattgtgggtaaaaggtgactatgagcatacctgtttccggagactgatcgatctgtatatggtggcagcagtggtgggatttcgcgtagaccgtaaagcaaaggaagatttctcgccgtttgggacaaagagcattttagccgagcaggtcatcaatgcaaaagaagaattagattttattatgcagatgatgatcatgctggatgcgaaagaaagcatgccggctgaggaagcagtaaaaaaagcattccggggtgcggagacggaggaagaatttcaggcttatcagtccatgtttcatgattatgtcagaggcggggtagaggaactgtatgagagactgatcattcaaaaagcagaaccggacagtgaattttatgataataaaacagcaaatctgatgtctgtgttagaaagatttggttatggtttacaggatatggaataataattttacatgatttttgaaggaaaaatgtaaaaaatcaaaaacaggtatttacaatcgtcgaaaacaggggtataatctaagagaattatatcataccaagtgataattaggttattacaataaggtaagaaacctaaaagctctaatcccattcttcggaatgggattatcttttatacagaagtttattcatgacaatgaccggtatgcggatcattgttgaagcgcgcagaataaaacagttgtcccgtttgctggtatgagagagaacggttcagatgagaggagaaggaacatggacgaaaaaatggattatcgtattgggttggatattggtattgcatccgtcggctgggcggtattacagaacaacagtgatgacgagccggttcgtatcgtagaccttggggtaaggatatttgatacagcagaaatcccgaaaacaggtgaatctttggcgggaccaaggagagctgcacgaacgacaagaaggcggcttagaagaagaaaacatcgtttagacagaatcaaatggctctttgagaatcagggtctgataaatattgatgactttctgaaacgatataacatggcagggttaccggatgtttatcagcttcgctatgaggcattagaccggaaactgacggatgaagaattagcacaggtgctgcttcatattgcaaaacaccgtggatttcgttcgactagaaaggcagagacggctgcaaaggaaaatggtgcagttttaaaagcgacggatgaaaatcaaaagcggatgcaggaaaagggatatcgtacggtcggggagatgatttatttagatgaagcatttcgaaccggatgttcctggtcagaaaagggatatattctcaccccacgcaataaagcagaaaattatcagcacaccatgttaagggcaatgcttgtggaagaagtcaaagaaattttctccagccagagacgtcttggaaatgaaaaagcgacggaagaattagaagaaaaatatttggaaatcatgacaagtcagagatcttttgatttaggaccaggcatgcagccggatggaaagccaagtccatatgcgatggaaggtttttcggacagagttggaaaatgtacatttcttggagatcagggggagctgcgcggcgcaaagggaacttatacggcagaatattttgtggcactgcagaaaataaatcatacaaaactggttaaccaggatggagagatcagaaactttacagaagaggaacgacgggcactgacgttgctgttattcacacagaaggaagtgaagtacgcagcagttcgcaagaagttaggtttgccggaggatattcttttttataatttaaattataaaaaagctgccacgaaagaagaacagcaaaaagaaaatcaaaatacggaaaaagcaaaatttattgggatgccatactaccatgattacaagaaatgtttggaagaacgggtgaaatatctgacagaaaatgaagtcagggatctgtttgatgagattggtacgatcctgacctgttataagaatgatgacagtcgtacggagcggctggttaagctgggacttgtaccgatagagatggaagggttattggcgtatacaccgacgaagtttcagcatctttcgatgaaggcgatgcggaatattatcccgtttttggaaaaaggcatgacgtatgataaagcatgtgaggaagccggatatgattttaaggcggattctaaggggattaagcagaagttattaacaggagaaaaggtgaatcagacgatcaatgagattacaaatccggtagtaaagcgttctgtatcacagactgtcaaagtgatcaatgcaattatccgtacctatggcagtccacaggcaatcaatattgagcttgcaagagaaatgtcaaagacttttgaagaacgccggaaaataaaaggtgatatggaaaaacgccagaagaataacgaagatgtgaaaaagcagattcaggaattgggaaaattatcaccaaccggacaggatattttaaaatatcgcctgtggcaggaacagcagggaatctgtatgtattccggtaagactattccattggaagaactgtttaaaccggggtatgatattgatcatattttgccatacagtattacatttgatgacagttttcggaataaggtacttgtcacttctcaggaaaaccgccaaaagggaaacaggacaccttatgaatacatgggaaatgatgagcagcgttggaatgagtttgaaactcgtgtgaagacgacgatacgggattataaaaaacagcagaaacttttgaaaaaacatttttcagaggaagagcgtagtgaatttaaagagcgtaacttaacggatacaaaatatattacaaccgttatttataatatgatccgtcagaaccttgaaatggcaccgttaaaccgtccggaaaagaaaaaacaggtacgcgcggtaaatggagcaattacggcgtacttaagaaaacgctggggattacctcagaaaaatcgtgagacagatacacatcatgcgatggatgcggttgtcatcgcctgctgtacggatggcatgatccagaaaatatcgcgttatacaaaagtaagggagagatgttactcaaaaggtacagagtttgtggatgcggagacaggagaaatctttcgaccggaagattacagcagggcagaatgggatgagatatttggtgttcatattccaaaaccatgggagacattccgggcagaactggatgtgagaatgggggatgatccgaagggatttttagatacacactctgatgttgctttggggttggattatccagagtatgattatgaaaatcttcgtccgatttttgtctcaagaatgccaaatcataaggtaacaggggctgcacatgcagatacgatccgcagtccgagacattttaaggatgaaggaatcgtattgactaagacggctttgacagatctgaagttggataaagatggagaaatcgacggctactataacccacaaagtgaccttttattatacgaggcattgaaaaaacagttgttgttatatggaaacgatgcaaaaaaggcatttgctcaggattttcataagccgaaagcagacggtacagaaggtccggtagtacggaaagtcaagatacagaagaaacagacgatgggggtatttgtggattccggaaatggaattgcagaaaatggcggtatggtcagaatcgatgtatttcatgtgaatggaaagtattattttgtaccggtgtatacggcggatgtggtgaagaaggtgctgccgaatagggctgcgacagcacataagccatatggagaatggaaagttatggaggataaggactttttattcagtttgtattcgagggatttaatacatataaagagtaaaaaagatatacctataaaaatggtaaatggtgggatggagggtataaaagaaacgtatgcatactatataggcgcagatatttcggctgctaatatacaaggaattgcacatgacagccgttataagtttagaggcttaggtatacaaagtctggatgtgcttgaaaaatgtcagatagatgttttaggtcatgtttcagtagtaagaagtgaaaaacgaatggggttttcttgataaaaacatgggggataaatgggatttcgaaatattaagatagacagtcatgtaaagctgtctatcaaaaatcagcagctaaatattgaaacagacatagcaagacagattccactggaggatatcaactgtatcattatagaaaatcagaccgtaactgtctcagcttatttacttcaaaaaatggcagatatgggaatcgcggtttatgtctgtgatgagaaacatcttccgaatgcagtattgcttcccatggtaaggcacagtcgccattttaaaattctgaaatatcagatagaggcaggaaagcccttacagaaaagactctggcagcagatcgtggttcagaaaataagaaaccaggcattgtgtttagcctaccttgaactggatggatcagaagaactgatgaaaatgtgtaaagaagtccagtcaggcgatcgaacacatgtggaggcgaaagcagcagctttttattttaaaagtctgtatggattaggattttcacgcggtaatgatcatatcattaacgcggcgttaaattatggttatgctattgtaagaggtctgatcgcccgctccattgtctgttatggattagaaccttcgattggagtgttccatcatagtgagctgaataattttaatttggcggatgatatgatcgagccatttcgtccgttagttgacctgtatgtagcccaaaattatgatatagcagaaattgacagcgatcttacgccagaaagaaaacgtggtatttttggtattataaattatgatatggatatgaaaggagaaaaacgtattatcagtaattgtattgatatgctggtggcaagttacagtagtgctttgcagggaaaaagatcagatttggagttgccggaactgatgcaattacaggtacatagctatgaataggtttatgagaatgttagtattttttgatctgccagtagtaactgcaaaagagaaaaaggatgccacaaaatttcgtaagtttttattgaaagatggctacaatatggtgcagtggtctgtatattccaggatatgcaatggtatggatgcagttgcaatgcataaacagcgtttaaaacaaaatctgcccttaaaaggatcagtacgtgcgctggttttaacagaaaagcagtatgaatctatggaaattatgttaggaacgaaaacgttcgatgacaccccggaatcaatagaattaatggatgttttttgaaaaaagaagattttcgatagaatttaacttccaaattaaagattttttttagatgaaatccccacgaatccctgtagttcgtggggatttgtgctccctattataccataccaagtgataacagggaattacaacgagatcgaagacgataatttcgaaataattattataccataccaagtgataacagggaattacaactactgttaaaacaggcgcaaaaatcagtgaattataccataccaagtgataacagggaattacaactcagcacttaaggaataatttacatctgctattataccataccaagtgataacagggaattacaacggatattgatagtgatagtgttgtgcaaggattataccataccaagtgataacagggaattacaacgtaagtcattgctatcgagataatgacaaattataccataccaagtgataacagggaattacaacgtgcaggttgaaatattattgactgctgatattataccataccaagtgataacagggaattacaaccggtgggcataataagcggaatgatgatatattataccataccaagtgataacagggaattacaaccggttgaaaaagagactgtgatcgaggaaaattataccataccaagtgatgcaaattccgcttcatcggatcaccgattccgctagcaacggatcagtgtttccggttgtaacggaacacttttccgcttcgtcggatcacgtattcttataaagtgttatagttttttcgtagtcattatttttagattacgaaaggaggcatttttatgcaggactacaacactattattggtgctattcagatgcgtctgaataagtgcccaaccagatctgttacggatcgttttcgaatcggatcaagcactcttaacttgatcatgagtcgatataaggctcttgagctcaccattgacgagcttgaagctatgtcaccaaaagaagtagagaacctcttttacccacagaaaaatcttcaacgcaaagaagttccacttccagattttcagtattactatgatcgtattcatgccccaaacagtagagtaaatatttcattctgttggctggattacaaagaaaagaatccagatggatatgaaaaatctcagttctatgaatgctatcaacgttttgttcaggaaaactatggtggcacaaaaatttcaatggcggtaaatcgcaagcctggtgaaaagatgtacatcgactgggttggcgaccagcctggacttctgacggatgttacaaccggtgaaattatgagagttcacatctttgccacaacattaggcgtgagcagtatgatctatgcagaggcatttccaaatgaaaaacttccttgttttatcgaaggctgtgtacatgcggtatccttctatggtgcagttgctaaacactttgtcccagataatctaaaaacagctgttacgaagcatacaaaagatgatcttgtattacagtcaaccttctctgatttggaagacttctatgatacgattgtgctcccaccaccggctcgtaagcctaagggaaagccaacggtcgagaatcatgtgcgttaccttgaaacacatcttatagaaaagttaaaagaaaagatttacacatcctttgaggatttgaatgctgatatcaaaaagatagtagccgtcctcaatgcgagaccttttcagaatcaagctttttccagacaagaaatgtttatcaagtatgacaaaccatgtatgaaaccactgccaggcggagaatacacaacttgtgattacaaagcagtactgaaggtgcctaataattatcacatcgattatgacggccactactactctgtattgtatacttactgcggaaaaccagcaatccttaaagctacaccttctgagattcgtatctgtgatcagtacaaccgtctgatctgcactcatagaagatcttataaggattttccgttgtacataactacggatgagcatatgcctccggaatacctttattatcaagaaatcaattcgaaagatggaaactattacaggcgctgggcgtctgtgttcggtccttccatgtcggaattgattgatcgaatcctaaaatcttctaagcacgaagagcaagcattcaatgcatgtgccgggatactacatcgagtaaaagcaatccctcaaggcattgcagaagaagccgctcgtaaatgcattgaaatgaactcctgtcgctactcgacgtacaggcaggtgcttaaaaagatggagtgcgatgagcattcagaatcatcaccggaatcacttccatctcatgaaaacatcagaggaaaggattactacaagtagaggtgaatgattatggcatacagacaaaaagaatacaattataacgacaaacttacaaaggatcaaaatcttcttatggacaaactctataagatgcgtatgtccggcatggcagaagcttttgaaaaccaacttatgaatccgaattcgggattagagagctttgaaacaaggttctctgaaatcatcaaccatgagtggttagggagagaaaacaagaagttcaatcggctcttaaaacaagcaacactaaaatatccggcagctgaccttgatagttctctttatgatccagagaggcagttaaacacacatgttattgaattactggccaaaggtgattggattgatgaaccgaacaatcttttgattacaggtggagcaggagctggcaaaacgcatgttgcatgtgcactttgcgtcacagcactacatcaaatgagaactgttaaatatatccgtgcgaattatctgcttcaagaatccgccaatgcgcatagtgaagataattactatgagtattcaaacaagatggccggttatgatcttcttgttatagatgattttggattgatggacttaaatcttgacaagtgccgtgatctctttgaaatcatcgaagctagagattgccgaaaatcaacagtcatcatctcgcagatgccagtagcgaactggtaccaattgtttggtgataacacatatgcagatgcatgtctcagccgcatgacctctaaagcatatcgattagactttccaggtcgcgatagacgtgtagaaagcaagtaactttattaaccaacagggcaatgatccgttcctagcggaacagcgctccgctcatgcggagcgagtgctctgtttttgcggaatatgcaccacagggaattacaacgtgcaattaatgactatgatttaaaatttattataccataccaagtgataacagggaattacaacgtagcaatcataaagcaccggcgaatgaaaattataccataccaagtgataatgaggaaaatcagaaaagtatattgaaattacggaaaaaccgtaatcaacctttacactacaacaaaaaacaggaaaccttgtaaatcaaagtttcctgtttctcaacagaagagcgcgagacgggactcgaacccgcggccccgaccttggcaaggtcgtgctccaccaactgagccactcgcgcatatgtaaattgttttgtatctgtctgccagacacatttgatatcatactatgggaaaagtaatttgtcaacaattttttgaaaaaatttaacagaaaaatttaacagaaattttggatacccgaatagaaaattgtgcgcggatctacggcgaaaaaaacgaaaaacagaatgaaaacgatactttttaggggtagaactcataaatgaagagtgttacaataaaggacatgggaaaatggtcacagaaatttaaaatatgactttgtaaggccaaaggggtggcagaatgtacaaaaaaaatgcgaagattcgtactgtagcagttttatgtgcaatattgttaattttaggaatagcattatttggatgttttgggcagatacggagcagtttacagcagcagttgatgagcagcattgaggggatggcagaacagaatgtaatattggtagagaaagaagtaagcacgcgttttagactgctttctggtcttgcgagagagtcaggcggggacgaaaaaattatcgttaataaattacagggatttgtagagacgtatcagtttaaacggataggatagatatattgcggcagatggtacagcagaaacgacggatggctatcggctaaatatgtctgacagggatttttttcaacagtcgatgcggggaaaaaactttttgacggatgcatttgaagacaggattgatacttcacatgaaaccataaatgtattcagtgtgccggtatatgaaaaagaacggaaaacggtaaaaggagttttatttgcaacctgcaaagatgaaatgcttgaggggtgcctgaagaatgagatatttgaaggacaggcttttaattacatcataaaaatagacggtacgattgttgcaacttccggaaacagtaaagaatggggaatcgggagaaatatttttaatacggatgtttctgaggatgaaagagatgattatgccggagacctgatgctcagtaacatgaaagagggaaaaagtggctatggattggatccaaaacggaaagaagtctcactttattactatatgccacttaaaatagaagagagcggtgaaccatggtatgtggtcactgcagtagaggatagcgttttaacaagccgtatgcaggtggtcatggatgcgatcaacagtctgatggtgatcattctggttgtcatatcggtcagcgtcggggtgtatatttactcctggcgccaaagtaaaaaagaacttatgtcgcttgcatatcaggatcctgtcacattaggagataattttgcagcttttaagaaaaaggcaaaaagcaaaaaagatggtgtaggatggctgattgctatggatgtgacagattttaagctgatcaacagcacctgtggagtcaaaaaaggtgatgaggtgctgcgtgtcatatgggagatttttgaaaccgaaacgggagaaaatgaactggcagcgcatgtcaatgccgaccggtttatattgttctggatggatgaaaatcaggaaaacatcaaacaaagactggaacatgtaataagaaagatagaagagataccggaacgtctggaaataccaaatcttttcccggtgtttggaatttttcatacgatcgtattagatgagatcgatcctttatacggaaatgcagtgcaggcaaagcatcagatcaaaggaaggcgtgacaggcattatatattttatgatgagctgaaccatgagagtattcaggaaaaccgtgaattagaagaacattttgaaacagcgcttgaaaacgaagagtttgaaatctggtatcagccaaaatacagtgcacattcgagaaagcttgtgggagcggaggctcttgtgcgatggcgcagggcggatggagcactgattccgccgcttaagtttattccattgtttgaacggaatggaaatatcatccggctcgatgagtatgtattccgagctgtgtgcaggcagcagaaagagtggcagaaacagggacagaagatgcttcctgtttcggtaaacatttcgcgtgtcagcctctattattcaagcgtcgttgaaaaatatgaaagtattatccggtcgtttgaccttgattcgaaatacattcagctggaaattacagaaagtgcaacgattgataataatgaaatatttaatctgttagagcagtttcacacggcaggatttaagatacttctggacgatttcggaagtggatattcatcccttgcagctttaaaccgtatgcatttcgatacgatcaagctggataaaagtcttgtcgattacataggggacgataacggagagaaattgttaaattcaattacaaagctggcacagagttttggcatggaaattacggcagagggtgttgagacggtagagcagctgatgtttttgtgcaatctggactgtgatgatattcagggatactatttttcgcgtccactgccggtaaaagaatatgaagaatgtttaaaagaagcgtgcatgtaatatgcttcgcgctcatacaatataacaatcgataccatggaggtacagggtgagcgcaaagacgaggatcgtggtccttcatatgaaggaggttatctatacagcgatatttgtcggacttgggatcgtactggtcatattgctgcttttcatgtttttacctaaaaaacagaagggcgatgcagagccaacgatgcagtatacggcaggcgtatacacttcgtcggtaatgatgggcagccagtcagccgatgtacaggtcattgtagatgaaaaccgtatacaatccatttccctggtcagtctggatgaaacagtggcgacaatgtatccgcttatggagccggcattggaaaatgtcagtgaacaggtgataaaacagcagtcgacggaagggattacatatcgtacggataatcagtatacatcgattgtacttttaaatgcgattgaaaatgcgcttgcgaaagcggaggtcgcagagggagaggcagattaacacagtttaaaatcaaagaatgagaggtttgagaactgtgtgttgtcaagaatcaaaaaaggttccggatgtaccggaacctttttgtgtaaaaaagttattcttctgtgttgagcgtatccatgtaattattgatagcatcaagatcggcatagatcgttttgatcggtctgctcttttcgtaagcgttataaccggagtatcctgcccatccgacgataagtaatgcaattaaccatccacagatggtgcctgcgatacgttttcttttttcttttgcaagaatctttttgcggtttgctttctcttctttatagcggtcaacttttgcctgactcataatcatcctccgttttattattcacatgcccagcatggataaaaatcaaataaacataatgataatataccccattctgttagaaaaagcaatagaaatacaccttgtcattttcgtggaaattgggtaaaatgagagtttgagagagaagaaactgtgcgcgggataagagcatgatgcttgaaaagcagtgcagtgatcagaatggagaatcgtgtgaaaaaaagatctttcacacggctatttgtttctgagcaaaaacaaatagctttgatggcaaggcataaaaaaacatgcctccgagaatttaagattctcgtcgcctcttcgcaataagttgctcagaaatgaggatttttatgaatttaattgtagcggcagatgaaaactgggcgatcggtaataaaaatgaattgttagtccggattccggcagatcagaaatttttccgtgaaacaacgatgggaaaagtagttgtgatggggcggaaaacgttagaaacatttccgaatggacttccactgatggggcggacgaatattgtgctgacacatgataaaaagttccgggttccgggagcgctgatcgtgcatgatatggaagaattacatgaagagttagaaaagtataacagcgaagatatttatgtgatcggcggggaatctgtttatcgccagctcatcgatgaatgtgatgtggcgcatgtcacaaaaatcgattttgcatacgatgcggatgcacatttcccggatctggatgcagatccggcatgggagataacggcagacagtgaggaacagacgtattttgatcttgagtattatttttaccggtatgagagagtcagaaaataagtaaacgtaaacagaaagcagtgcagtaaagatggaaaattttatttacagtatcaatgtgacgtttccgatttttttagtgatggtcatcggctattttttaaaacagatcggtatgttaaacgacaattttgtcacggtggcaaaccgttttaattttaaggtaacactgccgtttatgctgttccgtgatattgcgggcgtggatatcagggcagtattcgatttaaaatatgtattgttttgtgcgcttgtcagtaccgcgtgtttctggctgatctggggtggcgtgaagctgtttttaaaggatcagactatgcggggagcttttgtgcaggcatcgttccgcagtagtgcggcggtgatgggacttgcctttatccagaatatctatggaacctcggcgatggggccgcttatgatcgtcagtgcggtgccgctttataatattttttccgtgatcgtgctgacctttgagggagaaaatgcaagcggggtggatggaaaacaaaaaatcaaagaggcatgtatcggaatcgccaaaaacccgatcattcttggcattttagcaggattgatcgtcggacttttaggaatcgaatttccaacgattatcaataagacggtcaacagtgtggcgcagatggctacaccgcttgcactgatcacgatcggagccggatttgagggcagaaaggcacttgcgaagatcaagccgacgatcgcggcatctctgatcaagttagtgatccagccgctcattttccttccggtcgcagtctggatgggatttggtggggagaaaatgatcgcaattctgatcatgctggcatccccgacaacgccgagctgttatatcatggcaaagagcatgaacaacgacggtgtgctgacggcgagtgtgatcgtgacgacaacgttattagcggcatttacgctgaccggatggatctttatcttaaaatcagtcgggttgattggataaataaaatcat

SEQ ID NO: 3878 - DNA, 23402 bp, synthetic construct
  variation 14940..17239: note = note, n is a, c, g, or t
  source 1..23402: mol_type = other DNA
  misc_feature 1..23402: note = Synthetic
ccccggctgaataagctgccggcggaaacggtactgtatcttatggccggccgggccggaaaagagagaggaatccatatggaggatctgctggtgcggccgggaggaccgggaaagatactgaatctgaaacgcaccggcctgatggaactgctggaacagctggagtgggccgggaagattattctcaaccggactgccgggctggatatggtatatcttccgggaaacacaacatcagaccaggtcctgcaggaatactattatggaaattccggcggcaggaaatcggccgcctgggtttgcggcagataaagaccgggaaagggcagagagggaagcagaatgaaacagttaaaacaatatatcagcattaacagcaggtttcagaaatctgtaaatctgagtctggacctgggaaatgcagaccggattggcagctatattcccacccgttcttccattcagattttaaaatactatctgaaaaatatactggaagaatcaacggagaatgcaacagtcctgatggggccttatggaaaaggaaaatcccatctgctgctgcttctgctggcttttttacagggagaacagaaaggtactgcgccggtgctggcccggatatcggagacagaccgggaagcagcagacatggtgaaccggttataccgggaaaaaaagcgttttctgcctgtactcatagggggaagggcatcggatctgaacactgcttttctctatgggttaaaagaagggctggagcgggaaaatctcagggatattattcccgaaagcgattattcgcaagcattgaagaccttaaagctgtggcggcgggaatatcctgaggtgtacggtaagtggcaggagtttctcacagaccagggggaaactccggtaaatgtaaaaaagggactggagcggatggacgaaagggccatgaagctgtttctggaatgctatcccagactcacagccggaagccggtttctgcccatgcttgggtcggacgccatgagagtttatcaggaagtggggagaaagctgacagaacagtacggttatacaggaatggtactggtgtttgatgagttcagcaagtatgtggaaggccatggaaaagaagggtttgccagagatatgaagacactgcaggacatgtgcgaactggccaataacagcagggagcagaagctgcagataatacttgtggcccataagagtattcatgaatatgaaaaaggcctggacaaatcggtaaaagacgccttccggggtgtggaggggcgtctcagggaagtgagatttcatggctctgccagaaatcattacgagctgattgccagcacactgctcaaaaaggagccggaattttcggaattattttctgaatatgaaaagcagaccggatatcaggaaattctggaaaaatcctgcagcctgcactgctttctgggactgtttccggactatgatttttataagcaggtcatgggcagaggctgttttcccctgacgcctgtgtgcgcctgtatccttttgcatatcagtgaacgggtggcccagaatgaacgtacagttttcacctttctggccggaagggagcgcgggagcctgccggaaattctggaggaatcagaagaatactgggtgggagcagacgcggtgtacgattatttcaaacccctttttcgggaaaacagcgatcagcccaaaatccacagtgaatggctgaaagcagattatgccttaagacagacaaaggatccggcggaacagaagattataaaggccatcgggctgcttcggatgattcatcaggaggatgagcttccggcagtggacgcttccatacgtccggcgctggggatggaagaaggaacctaccggaaggccctggaatctctgaaacagcaggaactgattttgtttcggagcagccttggggtctatgcctttaaaaatcataccgggctgaatattgacagggagattgaggcggagatggcaaaacagccggaaccgtttcctgtctgcagttacctgagccggatatcagatctggaatatgtcctgcctaaacagtacaatcaggagcggaatatgacccggtatttccggtatgaatttttaacagcagaagattttttccgcatggaaaccctttcctggatgtttgaagagcagttttcggacgggaaaatactggctctggtcagcgaaaaggaaatcgacagagagcaggtcagagagaaaacagaagcattgcaggaggacagaatcgtggttctggtgccggaacagccctttgccctggtaaagcatataaagaagctggcggcagtatacgccctgaaagagcggccgggatttgcagaagaacataaggtgctgctgcgggaactggacctgtatgaagaagatattgtgtttgaaatcaatactttgctggagcgggatttcatgccgggatacggagcctgcggcgtggccagaaaaggggagccggtccgtatctttgaaaatgatatggaatttaaccgaatgttaagtgaaatctgtgagcagtattaccgcttttcgcccgttgtgaatcacgaactgctgaatattcagcatgtgtccggacaatacctgagggccagaaataaagtggtaaaagctctgctgatggatcaggcagagacgttccggcaggggacagctccggaaaatatggtgtaccgggctgcctttgtgaggacgggaattctggacagcagttatgaaaaggacaggggctgcggcaggattctggatgaaacagacaggttcctggcacagtgtatcggacagcgcagaacctttcaggaactgtaccggaggcttcagggaaaggattacggcgtgcgcagagggattatgccgctgtttctggcacagcgtcttgggatggcggaagggattccggtgatctatcttaagaaaaaagaactggaagtcagtgaggaagtgttaaacagcgtcaatgattttccgcaggattaccagttatatctggagccggaaagcgggaaaaaggaacagtatttaagaacgctggagcagtcctggcggggagagggaattgcgttcagccgccagaaccgctggataaaacttatggaaaacatgcagagatggtatcgctctctgccaaaatataccatggtcaccggaaaatttcccagggaagaacagaggaaaacagaacggttccggaacctgctgaaacgcagcgaactaaatcccagagaatttctgtttgaacggattccggaaattatgacagaagaagggcaggaggctgatttacagaaagcagccgaagagctgctccgtgtcagagcccggatggagcaggcgtttttccgtctgcagtcctgtgtggcagaggatatccgcagtatattccacggaaaagaacaggaaagcctgaaaggatgtctgctttcctggtatcggaaacaggaggcggcgaagcaggaatatattctgaataaagacgcccgcggattcctggaatatctgaaacatctggaaaccaatgatgagcaggaaattatcttctgcctgtccaggctggtgatggatttgtccatggaggactggaatgacgatacgccggaacggtttcgggaaaaaatacggaatgtaaagcaggaagtggaacaggcggcgggagacagcggagaacggggaaagaaaaccattatactgatggatgaacaggggaggcgcatcaggcgcagttatgaggccgaaacttctgattctaccagcagttttctgaaaaacatgattgacgaagccatggaggattttgaggatacactggaaaccagccagaaagtggcagtgctggcagaggtgctgcaggagctgataaaccgatgaatgacagggaaaatggctggccctgttatggaggagatatgaaagacttaatatattttgataatgcgtcaaccacatttccaaaaccggagcccgtttaccgggcaatggaggaagccggaagacattttgcagtgaatgtgggaagaggcgcttaccggctggcacgggaggccttccggctgacagaggacacaagggaggaaatccttcatctggttcagggaaattacggggcagagacggtttttactccttctgccaccattgcctgtaatcaggtgctgggaggtctggagtggaaacgtgcagatgtggtttatgtaactccttttgagcacaatgctgtaatccgggtgcttcatcatctgcaaaaacagtatggatttgaagtggaagaactggctgttcaccaggaatctctggagatggacagggagaaaatcagatatcagtttttacggaaaccaccggctgcgctgattatgaaccatgtcagcaatgtaaccggggccatccttccctggcaggatattgcaaaactggcagaggaatataaagctgctgtgattgtggacggttctcaggcccttggactggtgccggtgtgcctgaagcatacgaatgtggacttctatatatttgcaggccataaagccctctgcgggcctctgggaatcggaggttatgtaaataacagcggcaggaaactgaaacagattctgttcgggggaacaggaagcgattccctgaatccggaggtcagtccggaagatgtgagaggatatgaaccgggaagcatgaatatcacagccattgcagggctggaggcggccataaaagaatctgtccggtcagcagcagaagaaaggctgagagaagaacagcggctgcgggaagggctccttgagaagctgaacaggataccggaaatccagctgtatccgccactgcactcagcggctgcgggaattgtatctctgaacgtagaagggtatcaggccgaagaagtggggattctgctggacgaaaagtatgggattgctgtgcggacagggtatcactgtgcgcctctgatacataaatatctgaaagataaggaatatggcggtacggtgcgggtgagcctgggaccttttaccacagaggcggaactggatgttcttgcagaggcgttggaggagattgcagcaggatgacagattttatgtgaagcacgaaagaggagggttttttatgaaagcggaggcaaagtcagtaaaagaaatttttggcggagggcctcagaagctggttgtgccgttttttcagagaaggtacgtctggaaaaaagaaaactggaaagaattactggatgccattgaagggaaccgggaagtccaggtgtttctgggctccattattatcaaatggggagagagcagagaaccgtcggaggcggccattgtggacgggcagcagaggctcaccacaatctcactgctgaccaaggcaatctatgatgaatttgacgatgaaatgcgccagaatgtaagggataccatacagaacgtgctgttttacaaaaggaacaccacagattccctgaaaaacagtgaaattaaaatttcccattccagagtggacagggacagctatgaggccattatcaggcagggggtgtttgagggaagcaggccccggacggaagcagagaaagaaggatctccccaaatcagacagtgctatcactattaccgcagggtgctccatgaaaaagaccagcaggaactgaaggatatttttgacattatgtacaatgacaataacaagatgctggtcagaattgaactgacagagcacgacgtgaacgaacagtctatttttgataccatcaaccgggcgggagcccgcctgagcaccgcggatattatcaaaaacaatctgtttcagggatttatggaaagctgcggaaatgaccgggaaaagcagcgccgggtaagcgaaatttataatgagaagtgggacaggattttttactcggaggacggggaaaacgaatgggatctgaaacggcgttttggaaatgtggacagaaataatctggaatttctgctgtactgcgtggcctgtatcaaatggacgaaagaagataacagggattttttcggaaatctggataatgcttataccagagaaacagccgcttatgatttttcagagtatgccgcactgataaatgagatttatgagtatgccggtctgttcagcagatatatcaccggcctgaatcagattatgagtgataaagacagggcggaaagagaatatttttcctggcaggaggatgtgaggcggcttctgctggttttagaggaattcggcatacagatgttttatccttttattctgaaaatcctgaaagagtccggagaaaatctgcaggatgaaaccataaggaagcagtgccggatactggaatcttttgtaatccggagaaggattatggggacgagtgtttcggattatgcgtccagatgcagtctgattctgaatcagggtgcggaaaaattattttccgcagcaggagaaaaggcagtcaatatcagtgacggagaagtcagaagacagctgacgaagatgaaaagcgacacagccaaaatgcttttatttctgacagagctttcccgcagaaataaaaactcagacgaaaaggccctgacctatacttatacgctggagcatattatgccccagaaatggcaggaaaactggcaggtttcggaggatgaggcggagaaccggcagaatcatattgacgatctgggcaatctgacccttttgagaaattctctgaacagttccgtaaggaacatggattttaagacaaaaatagaaggcattccaaaatcgggaaagcagaaggccagagaggggtacaaagggaatgtaacactgaaaatcaccggggaaatcattgaacagtacgatgcaggcaggacagagtggaatgaatgcaggattgatgagagaagagaaaaactggcggaggaaatactggcattatggcctttctatacaggagaggcggagtgaaagaaagggaagaccggttctgcaggaaggagaaagaaaatgaaggagatcagtaaacagttattgcaggaaatcaccctgcaggtactgcatatggagcggaaaaatctgcggagcaaagccaggagcgaccagaaaatgtcggaggaactccagaaagtcattgtggagtatgccagaagaaatcattgagcatccctgtccgggcgggtttataacggtggcaggataaaggagaagatgtattatgcggtttgagcgtgttactctgtataattttatgcgctataaaggcgaaaacagaatagaattcagctgtgagaaagagagaaatgtaacggttgttctgggagataataccgttgggaaaaccaccattgcccaggcattccgctggtgcctgtatggagctgtgctcacggaacggggaaagagacaggaagattatcagcttttgaatacggatgtgctggcactgatgaatgcggacagcagggccagtgtccgggtggaactggttgcctcagatgaggaaaagcgctataccatccgcagggaaattgtctgtacacgggcatatccccggctgacagcagaaacatttcagaagaaactgaccatgtatatttcagatatttgcagcagccagtcgctgattgaagtggaggaacggaaggtggacgagctcatcaatgagctgttccccggaaatctgtcccattattttctgtttgatggggaacggtggaatgacattaccgtaaacggggtcagggaaaatatcagagattccgtacatatcctgaccggtctgtctgcataccaggcagccatgaaacatctgaaggatatgggttcttattctgttatcagcaaatttaaaaagaaaataacaggctccgggaatctgtatgacaatctggaaggggaatacagaagatgcgggcgggaaatcgaaggctgcaaaaaagaactggaaaccatagaaatcaatctcagcaacagccataagaaatgtcaggaagtgcaggaatatctggagacgaaccggaatacggaaaagctgcagagccagtaccggaatctgggaattgtcagaaaaacccagggagagagatgtatcagcgaacggaaaatgatggtgggtgaattcagtgacaaggcttacatgctttttgcagaaccactgacagaagcgtccggggcactggtaaaatctgtggccggagaacgacgggatattccccatatgcgtcaggcgaccatagattatatcatgaaaagcggaagatgcatctgcggaactgaacttacaccggggacgacggaatgggactgtctgctggagcagaaaaactatcttccgccggcagatatcggctccctgctgggagaatttgaacgaactgctttaaggtggaaaaaccgggtaaaaaatttgccggaagaacttcgtgcaatggcaaaacagacagacgactgtgtgaaaaactatgaagaaacctgcaatgaatatattatgctggaacagcggatggacgcccatatagattttgcggaacacagaaagaggctgggaagttatcagaaaaacatacaggaactgaattaccggaaagggcagatacaggggaaaatacagacgttcctgcgtcagcaggaacatctggcagaagaaatgaaagggctggaagcaaagaacgaggaaaatcagcgctggcgggaacgggtggagctggcggaagcactgtataaaaagctgtcccacgatttttccatggaagaaaagaagatatttctggagctgaatgagcagatacaatacaatttccggcggatgttcaatgcgaaagagaaaaagatagagctgtctgaccagtataatattcagatgtactataaaacagacctggggtacagagaagaaaagaacctgtccgagggagaaaagattgccaggaattttgcatttattgtgacggttatggattacagcaaaaagaggaaagcagaaaaaaatcctgacattcctcagggaaatgacactcttcccattgtactggacggccctttttccaagctgggagcggagaatatccgcttaattgcaaaagtgctcccggaagtgtcagaacaggtgattatctttatgctgaaaaaagactggaaatacacagggctggatgactatgtgggaaaagcgtattacattgacaaaaaagcggatcagtcatacgcagctatccgggaagtggaggaattttaactgatggcagcttttgaatttttcaaaaaggaatttgaatttcgcggaaaacatgccagaatggcaggagaactgtgggtgcccaatgactatgaacatacatatttccggcggctgattgacctgtatcttactgcggctgttataggattccgcgtggaccggaaagcagaggcggattatgcccccaacgagtcaaaaagtatttttccggaacagatgatgggagccaaagaagatctggattttatcatgcagatgattatgattctggaaaacagaaccggaatgtcgccggaagacagtgtgaaaaaagcatttcggggagcggaaacacaggaagaatttgaatattacagagacttgtttaattcttatgtacggggcggcctggaagaactgtatgaaaggctggtattgcggaaagcagaggtagatgaggaattttatgatgaaaaaactgccaataccatggcgttgatggaacggtttgggacctccttccaggttcctgcggaataatgcagatatcccaaatccggacaacgctaagaaactgctaagaaatgaaaactttctgacagatatttacaaaatgggacaaaaaggatataataaatgcgtattatatcataccaagaaataatatggttcctacaataaggtagaacaccaaaaagctctaatcccattcctcggaatgggattatctttttataaaaatgagtaaaggagcagggtatggatttgaattacagaatagggttggatattgggattgcatcggtaggatgggcagtgctggagaataacagcaaagatgagccggtgagaattgtggatctgggagtcagattatttgaagcggcggaagtgccgaaaacaggtgcggctcttgcggagccaaggagagaagccagaaccacaagaagacgtctgcggcggaggaaacaccgcctggagcggatgaagtggctgctgcaggaatatggtctgattcagacagaggaatttatgaaacggtatcattctgcgggactgccggacgtataccggctgagatatgaagggctggaacggaaattaaaagatgaagagctggctcagattttaatacatatcggaaagcacagagggttccgttctacccggaaagcggaattaaaggataagaatgacaaagaaacaggcgcggttttgtcagccaccagagaaaatgagaagctgatggaggaacatggctatcgtaccgcaggtgagatgatatacaaagacgataaattcagaaccggatgtacctggaaggaagaaggctaccgcctgacgccccggaataaagaaggggattataagaataccatgctgcgggcccttttggaggacgaggtgaaagtaattttcgactgtcagaggaaattcggaaatcagaaagcctcagaagaactggagaaagcatatcttgccataatgaccagtcagcgctcctttgacatggggccgggaaaacagcccgatggaagcgcgagcccttacgccatggaaggatttggagaccgggtggggctttgcgccctggaacccagagaaaaacaggagccaagagcgccaaaagccgcctatacatcagaactgtttgtggcgttgcagaaaataaatcatctccgcattacggaaaaaaatggaaagggccggggactgacatcagaagaacgtgagagattgtctgatttgctgcataagaaaaaagaattaacctatggcgccgtgcgaaaagaactgcagctggatctcagataccgtttcaatacactgaattacagcagcaaaaaaatgacagaagaagaaaaaataaaagatgcggaaaaggcaaagttcgtcagtatggtaagccattatgaataccgaaagcgcatgtccggcatgttggaacagctgtcgccggaagaacaggcggatttgatggatgaagtgggtaaaattctgactctttacaaaaatgatgatacccgcagcagggaatttcagaaactgggtctggactcagaaatcacagaagaacttctggagctgaatcccagaggatttcagcatgtttctcttaaggccatgaaaaagctgatgccttatttgaaagaaggccttacttatgacaaagcatgtgcagaagccggatatgattttcagggaagtgtacaaaaggaaaggtcccgcttattaaagggaaaagaaatcacggatattatcaatgatatcaataatccggtggtaaaacgttctgtctcccagacagtcaaagtaattaacgccattatacaaaaatacgggagtcctcaggcagtcaatattgaactggccagagaaatgtccagaaattatgatgagcgcagaaaaatggaaaaacagatgaaggatcgccagtcagaaaatgaaagggccaaaaaggaaattcaggaactgggaaatgcctttcccaccgggcaggatattctgaaataccgtttgtggcacgaccaggatggaatatgcatgtattccgctaaaagaattccactagcggaactgtttacgggagcatatgatatcgaccatatccttccctacagcattacctttgatgacagctaccggaataaggtactggtcacttctgaagagaacaggcagaaaggcaaccgcattccatatgagtatttcggcagtgattccgaaaggtggagtaaatttgaaacactggtgaattcccgtatcagagattacagaaaacagcagaatttattaaagcagagctttacggaagaggaacgaaaggaatttaaacagagaaacctgaatgatacaaaatacattacccgtgtgatttacaatatgatccgggagaacctggcgctggccccctataacagtccgggaaagaaaaaacaggtttttgcagtaaacggaggggtaacggcctatctgcggaaacgatggggaatgtcagcaaaagaccgctccattgatacccatcatgccagggacgcagtggtgattgcctgctgtacagatggcatgatacagaaaatctccagaaacatacagggaagagaactgctgtatgccagaggttttacggcggttgatgtggaaacaggagagaaatttaccagagatgattttaccagagaccagtgggacgagatattcggcgtgcaggtaccgaagccctgggagtattttaatgaagaactggatattcgtctgggagaaaatcccgtagaatttattgaaactcattccgatgtttccagaaaactggattatccggcgtggttttatgaaaataatattatccggcctgtttttgtatcccgaatgcccaaccggaaagtgaccggagcagcccatgcggataccatccgaagtcccaggcactatcaggaaaccggctctgttctgactaaaactgccctgatcgatttgaaactgaacaaaaaaacaggagaaatagaaaattattacaagcccgaaagtgatacgctgttatataatgccttaaaggagcgcctggaattgtatggcggcgacggaaaaaaggcattcgaagagcctttctataagcctaaagcagatggctccagaggaaatctggtaagaaaagtgaaaacatatgataaactcacccttggggtgtatgtgaattcccaacatgggatagccgccaatgccaatggctccatggtgcgtgtggatgtgttccgcgtcagtggaaaatattattttgtaccggtttatattgcggatgtggtaaggaaaagactgcccatgaaagcggtagtccagggaaagcagtatattgactggaaggaaatggaagataaagattttattttcagcctgtataccagagatttgatttcttttaaatccaaaaatgggaaaaaggtgacctgtgtggacgggacatcaaaggcagtgaatgaagaaattgtttattattatggggcgaatatatcaacggcaagttttagtggaaagtcacataatggaagttttgagtttacaagtttaggaattcagggcctggaatatctgaaaaaatatcaggtggatgtactcggaaatgtatcggaggtaaagcgggaaaagagaatgggatttcgttagagccgggtgcacagtttacgaaatattggctggtatgaaggaagaacaggtggtaaaacgcaggaatgcctgctggcagcggaggtgatatatgggatttcggaatattaaaatcgagggcagcagaaagctgcatattgaaaatcagcagctggtaattggaggagacagagatgtcaggattcctttggaggacattaacagtattttgatagaaaatcattctgtgatggtgtccgcttatatgcttcagaaatttgctgatatgggaattgctttgtatgtctgtgatgaaaagcatcttcccaatggtgtattgctgccgctggtaaggcatagccggcattataaactgttaaagtgccagatggagataagtaaaccgctgcagaaacgactgtggcagcagattgtgatacaaaaggttcgaaatcagtccttatgtctgaaactgagcggcaggacaggagacacagaactgcagaagatgtgcaaagaagtgcagtccggagacagaacccatgtggaagcaaaagcggcagccttttattttcgaaatttgttcggaccggaattttcaagaggtgaagaacatatcatcaatgcagcattaaattatggatatgccattgtcagaggaatgattgccagaagccttgtatgttatgggatggaaccttccatcgggctttttcaccggagtgagttaaacagttataatctggcggatgattttattgagccgtttcgtcccattgtcgatttatatgtggcttcaaagtttgatatgtcagaatcttcccatgcattgacaccggaaataaagcgtgagctgtatggaattgtaaattttgaaatgcagataaaaggagaaaaacgtattctgagcaactgtgttgacggaatggcggcaagttacagcagtgtattgcaggataagtgcgaaatgctgagtctgccggaactgatacagctgcaggtacatagttatgaataaatttatgagaatgatagtattttttgatttaccggtagttactgcgaaggagagaaaagcagcagcgaaattccgtaattttctgttaaaagacgggtatcatatgatgcagttttccgtttataccaggatttgcaatggcacagatgcagtggagaagcatgaggccagactgaatctgaatttgccgtccaaaggttctgttcgtttgctgacaatcacagagaaacaatacgaatccatccatattctgttgggtaaaaagacatttgatgataccggagaatcggcagaattattaaatattttttagaaaaagaataaaattcaatcgtttttccggcaaaatcagagattttaaattgagaaaaatccgcataaccttattggttatgcggattttctgttccctattataccataccaagaaataaatgggaactacaactaagaacaaataatatctgggtgtttacctattataccataccaagaaataaatgggaactacaactgttatgtttcactttatagagattgnnnnnnnnnnnnnnnnnnnnnnnnnnnnnnnnnnnnnnnnnnnnnnnnnnnnnnnnnnnnnnnnnnnnnnnnnnnnnnnnnnnnnnnnnnnnnnnnnnnnnnnnnnnnnnnnnnnnnnnnnnnnnnnnnnnnnnnnnnnnnnnnnnnnnnnnnnnnnnnnnnnnnnnnnnnnnnnnnnnnnnnnnnnnnnnnnnnnnnnnnnnnnnnnnnnnnnnnnnnnnnnnnnnnnnnnnnnnnnnnnnnnnnnnnnnnnnnnnnnnnnnnnnnnnnnnnnnnnnnnnnnnnnnnnnnnnnnnnnnnnnnnnnnnnnnnnnnnnnnnnnnnnnnnnnnnnnnnnnnnnnnnnnnnnnnnnnnnnnnnnnnnnnnnnnnnnnnnnnnnnnnnnnnnnnnnnnnnnnnnnnnnnnnnnnnnnnnnnnnnnnnnnnnnnnnnnnnnnnnnnnnnnnnnnnnnnnnnnnnnnnnnnnnnnnnnnnnnnnnnnnnnnnnnnnnnnnnnnnnnnnnnnnnnnnnnnnnnnnnnnnnnnnnnnnnnnnnnnnnnnnnnnnnnnnnnnnnnnnnnnnnnnnnnnnnnnnnnnnnnnnnnnnnnnnnnnnnnnnnnnnnnnnnnnnnnnnnnnnnnnnnnnnnnnnnnnnnnnnnnnnnnnnnnnnnnnnnnnnnnnnnnnnnnnnnnnnnnnnnnnnnnnnnnnnnnnnnnnnnnnnnnnnnnnnnnnnnnnnnnnnnnnnnnnnnnnnnnnnnnnnnnnnnnnnnnnnnnnnnnnnnnnnnnnnnnnnnnnnnnnnnnnnnnnnnnnnnnnnnnnnnnnnnnnnnnnnnnnnnnnnnnnnnnnnnnnnnnnnnnnnnnnnnnnnnnnnnnnnnnnnnnnnnnnnnnnnnnnnnnnnnnnnnnnnnnnnnnnnnnnnnnnnnnnnnnnnnnnnnnnnnnnnnnnnnnnnnnnnnnnnnnnnnnnnnnnnnnnnnnnnnnnnnnnnnnnnnnnnnnnnnnnnnnnnnnnnnnnnnnnnnnnnnnnnnnnnnnnnnnnnnnnnnnnnnnnnnnnnnnnnnnnnnnnnnnnnnnnnnnnnnnnnnnnnnnnnnnnnnnnnnnnnnnnnnnnnnnnnnnnnnnnnnnnnnnnnnnnnnnnnnnnnnnnnnnnnnnnnnnnnnnnnnnnnnnnnnnnnnnnnnnnnnnnnnnnnnnnnnnnnnnnnnnnnnnnnnnnnnnnnnnnnnnnnnnnnnnnnnnnnnnnnnnnnnnnnnnnnnnnnnnnnnnnnnnnnnnnnnnnnnnnnnnnnnnnnnnnnnnnnnnnnnnnnnnnnnnnnnnnnnnnnnnnnnnnnnnnnnnnnnnnnnnnnnnnnnnnnnnnnnnnnnnnnnnnnnnnnnnnnnnnnnnnnnnnnnnnnnnnnnnnnnnnnnnnnnnnnnnnnnnnnnnnnnnnnnnnnnnnnnnnnnnnnnnnnnnnnnnnnnnnnnnnnnnnnnnnnnnnnnnnnnnnnnnnnnnnnnnnnnnnnnnnnnnnnnnnnnnnnnnnnnnnnnnnnnnnnnnnnnnnnnnnnnnnnnnnnnnnnnnnnnnnnnnnnnnnnnnnnnnnnnnnnnnnnnnnnnnnnnnnnnnnnnnnnnnnnnnnnnnnnnnnnnnnnnnnnnnnnnnnnnnnnnnnnnnnnnnnnnnnnnnnnnnnnnnnnnnnnnnnnnnnnnnnnnnnnnnnnnnnnnnnnnnnnnnnnnnnnnnnnnnnnnnnnnnnnnnnnnnnnnnnnnnnnnnnnnnnnnnnnnnnnnnnnnnnnnnnnnnnnnnnnnnnnnnnnnnnnnnnnnnnnnnnnnnnnnnnnnnnnnnnnnnnnnnnnnnnnnnnnnnnnnnnnnnnnnnnnnnnnnnnnnnnnnnnnnnnnnnnnnnnnnnnnnnnnnnnnnnnnnnnnnnnnnnnnnnnnnnnnnnnnnnnnnnnnnnnnnnnnnnnnnnnnnnnnnnnnnnnnnnnnnnnnnnnnnnnnnnnnnnnnnnnnnnnnnnnnnnnnnnnnnnnnnnnnnnnnnnnnnnnnnnnnnnnnnnnnnnnnnnnnnnnnnnnnnnnnnnnnnnnnnnnnnnnnnnnnnnnnnnnnnnnnnnnnnnnnnnnnnnnnnnnnnnnnnnnnnnnnnnnnnnnnnnnnnnnnnnnnnnnnnnnnnnnnnnnnnnnnnnnnnnnnnnnnnnnnnnnnnnnnnnnnnnnnnnnnnnnnnnnnnnnnnnnnnnnnnnnnnnnnnnnnnnnnnnnnnnnnnnnnnnnnnnnnnnnnnnnnnnnnnnnnnnnnnnnnnnnnnnnnnnnnnnnnnnnnnnnnnnnnnnnnnnnnnnatctgtttccctccctgtcatttcctattataccataccaagaaataaatgggaactacaacttctccatcgccgggtattgcggacatacgattataccataccaagaaataaatgggaactacaactactccactggcagatgcgtgtatagatgcattataccacaccaggaaataaatgggagctacaacacagatagccttacacatagccaggggacaacccgccgagccggcatacatatcttcccacaagtggcatgtcaggctttatcttgctggtattggcaggcgcaggaacgctgtaaaaggcgtatagagagcatgaaacagacacagggcaaaacagccaaaggctgactatgccctggaatggacaggaagaatgaataacataggatattgtaacgtaaaaaataccaacagatatatcatatgtttctgttgactgatacaggatttcccctttgaaaaagcgacagatacagaaaaacattcttaaacacaccatatgccggattattcctgtcttagtctctatttacagtattatcccgttcaagttctcttaatctttcatttatcctttttgcttcatttcggttaaagagataaaaacagagccagattgccatgaaaataccgcatgacagtaaaaattgtaagatagtatagattaccctgcctggatagaaaggaatccatcctaaataaatggcagttggaaagaaaactcccattccaatacaaaagtgtattatcatttgcgccaggctggaaagacgatggaattgatagacgacagccgtcccgccacaggcaattcccacaatcatagcacccacagagtgccttgcaaaatctttgaatattggcctcagcagagcttccccgcctccgacaaagtaagataaacacataatcacaaagaaagtgcaacccagagaaatcccatataaaatatatttaaccactaattttacagtttgtttcattttaatcccagcctttctttgaaacctttccgaaaacttctggaaatgtaatccgtaaccccgtttttcatcaccagctccattgtcccattgaaacttgcttccacatgacagatttggttaatattgacaatcgttgattttgaaatacgcacaaaatgagtatcaagtatgttttccagttcatacaggggcttatctaccagatatctgtttttgagtttatcatagcagacaatttccctgccttcggtacgaaccaatgagatatcttctggtttgataaaatacgtttttctttctttcgttgcaatcaatgtcagggaaaccgtatcttctttttctaacatggaaatgatttctgtaactgccggggtcattctgtttatgtaaagaactgcatagggttctttataatctgcactgattttgcattcaactttcatagacgtgcctccttctcttattattatagcacgacagggcaatgaatttgtgcatttcagacatgaaatccgacatcttgcacatggcagactgccgctccttaaaatactgttgtttatctttaaggtgcgttataaaataacaccatcataggacagggaggaattatgatgtcacagacaattgtacaagtggaaaatctgaatctggcatataagcatttgcgtgcggttcagaatgtctcattttctgtaaaatccggagagattctggctgtgatcgggcagaatggctctggaaagacctctgccatagaatgtgtggaagggttacgaaaaccagacagcggcctgattcgtgtttttggaaaagacccatggctgcaccgccgggaagtttataaagaaatgggtgttcagctgcaggaggcggaatatcccttgaaaatcaaagtggaggaactatgcagactgtttgcaggtttttacgaaaggcctgccgactggaatttattactgacacaaatggggctggatgaaaaaagaaaacgtccggttcacaggttgtctggcggcgaaaaacagcggctgtccattctgctttcccttatgggacgcccgaagctgctgattttggatgaactgacaacgggacttgatccggaggtaaggcagaatatgtggattagctttgagaatatcaggaaaggcggggtagctgttattatggtttcccattatatggatgaggtcgaagcccttgcagacaaaatcctctatttagaaaaaggaaagcagcaattctttggaaagcaacatgaatttcgggaatatgtgaaaaatcgggtttccggggatgaatgggaagaaaatttatcattggaaaaactttatttaatgattgcacctgaaacaacaggacttacgatggagggaatattatgagacggtttgcggttatctgtgagatagaattacgtttgtttatgcgggatttctttagctttttctttgctcttgtgtttcctgtgctaatgctcctcttatttggcgccatctatggaaatacaccgatttacgatggagcagaggctggaatgatggatgtttctgcgcctgcgtattcagtcatggtcacaggagttacaggcttaatgtcgcttcctctgacgttatcgggttataaagagagaaaaatttataagagatttgatgctacgccagttggaaagaaaagcatcatgtcagcacaggtatttgtcaaccttgttatgacgcttatgggagtttcccttttactgatcactggaaggcttctttaccggatacagattcagggtactgtcctttcgatttgcgtcagtatattgttttccataggggctatgttttccatgggatttcttttcacagctatcggatgggatttaaaaagtacaaacctgctttgctatcttttttattttcttatgttattcctgtctggtgcaacacttccggatatgttgttccccgataccgtgaaaaaaatctctgactttttgccaatgacccatgcggttgatttaatgcaggggacttttgccggagacagccttagcctgcatggaacagaattacttatccttgggtcactgtcggtggtatgtatagctgtcggagctgttttatacagaaagaaagactggacataaggcaatggagaaaaaatgaatgaaaacccggtagatactatgcctgcttgtggaaagaaaaccctgacagtatccgaacatcttatacggtaatttcaataagatttccttcccggtcttcaatgcagctttcataatatccgtctcctgttgttcttggcccgctgattacggaaaatccatcttttcgcagtttatcagtcagggcattgacattttccatggaacccgcatgaaaagcaatatgcgcatagcctgccattctcaaaatgttttctgctttcctggtatccggcatattcataatctcatgtcttgtcccgtcttcaaaagctataaagtaagaggtaaagcctgttttttcattgaagtatttctctccggctgtaccgccgaaataggtttcaaaaaaatttttttcatcttccagattttctgcatataaagcaatgtggtctatggtcatttccatgcccctttcattggtataatatttgtttctggctataataatactgttttatttttatgaagtataccattattttttaaattatgataacaatcctgcgaaaagagaggatatatggaaatatttatcgacgtaaacgagaaccgttccgaaaaagtgtcttatgataacgcagagtatcccattcatatgcgccattcctgtctgaacagttatccgggatacgccgctccgcctcactggcatgatgatattgagttttatcggaattctaaaaggcagcatgacgtataatgtcaatggggagctgacggaactgaattctcaggaagggatatttgtaaattcccgtcaggtgcatttagattgcagcctccggcggtattggacagagcaagtgctgcaaattattcagtacctgtatacatcagacgcccaatgcctgtcttaccggataccggcttcacagaagcgcggagcttttgcagatgacagacctgaatattacagaaattgcatatgaggtgggatttaacggagccagctattatgcggaaacatttcgtaaatatatggggatttctccgtcatcctacaggaaaaacagaactggtaataaaaaagaaaccgggaaagaatctgtgaatcatgaggcggtcagcggctcagaacgttgaccgccagaatagctgttcccagaatggccagaacaatgcccgttacacggttcagagtggcagcactggccttatttgcaaattttgcggcgattctggcccacagcagggtggaagccacacagaacaccagacaccgcagatcgggcatttttccaattgcaaaatgactggcagctccggtcagagcggtaaaagtcataataaacacactggtgcctactgctgttttcagttcatatcccagaataccggtgagaagcagaagcatcatcattccgccgccggctccgataaaaccgcagataaatcccacaggaattcctcctgcgatggactggaacacgcgtgtccggctgtgggcagattccatggtttcttttgtggccattacaggccttacaatgaatttgattcccaacagcaacgtcatgaatacggaaaaatttcccattgtggtattgggaacaaggcttgcagtccagcttcccagaaaagtgcacagcaaaacggtaatcatcataaccagaccgttgcgaatatccagatttctgttttttccataagtataagcgctgacggcgctggccagcacatcacttgccagtgcaatgcccacagcctcataagccggcattttcagaaatgtgatgagcatggggctgataactgctgcggcgctcatacctgcaaacccggtgccgagtcctgcgccgataccggcagcaaaacaaatcagaaattcaaacatgttgtctcctcctttgaatgatacaattatagcatgtaagagaaaatgcacaagtatattggaaatattcatttttttattccacaggaaaaactttttctattatctttccgcagtaaaggcggtttccccgattccggtgatgatgggctttgcgttctgcagcctggaagatgtggcgcctgtgaaaaatgttatcgacggtgtggtttcaggttcacattttgtccgtctgatggaagcatgccggtattcccccaaaaaagcaggagcgtactgcagcgccttcagacagcagttaaatgcacggcaggcctgaacgacttgaaatggcacagattaatggtataatactgaaaaagaagaaaaattcacagtcaggagaggtcaggcagaatggaagaagcagtggttacactgaaaaagggtgcaggaaaaacggtcaaatccggcggtctctggatttatgacaatgagattgcgtctgtggaaggaacatttacagacggagacctggtggcggtacatgattttgacggttatccaatgggaaaaggatttctcaacaccaaatccaaaatcagtatccgtatgatgacacggaacaaagaacagaaaataaatgcagattttataaaaatgagggtgcggaatgcctgggaataccggaagaaaacctctgataccagttcctgccgggtgattttcggcgaagcagactggctgccggggctggtggtggataaattcgcagatgttctggtagtacagtcgctggcccttggcattgaccggttcaaagaagagattatttccgatttaaaagcgtgcatggcagaagacggaattttgattcgcggcgtttatgaacgcagcgatgcaaaggttcgcagacaggaagggatggaactccagaagggatttctggggccggaatttgatacgaaagtggaaattgaggaaaacggtgttcgctatctggtggatgtgaaagacggacagaaaacaggtttttttctggatcagaaatacaaccggaaagccattcagcctctgtgtgccggtgcaaaagtgctggactgctttacccatacaggatcttttgcactgaacgcggggattgcag

SEQ ID NO: 3879 - DNA, 23336 bp, synthetic construct
  source 1..23336: mol_type = other DNA
  misc_feature 1..23336: note = Synthetic
gcgggagtggattacgattaaccatacagcaggacttgatatggtctaccttaagacggataaaacagcaaaagacataatcgaagcgtattacggctaagacaagagagtggagccaatctccattcttttacaagatggagagaagtacaatgagaaaacaaatgaatctaatacagatgaatcataattttcgaaaatcagtaaatttgcaattagacttaggagacatggagcgaatcgaaagctacattccgacgcactcctcaattgcaattttagagcgatatctcgaaagtgttgcaggaaagacatccgagaatgcaaccattctgataggaccttatggaaaaggaaaatcgcacttgctgctggttcttctggcaatgcttcacgcaaaaaaagaagaactttccacaatttttgcaaagatggaaaaggtggatgaagaagccacaaaccgcatgaaaaagttgattgcgtccaaacgctatcttccggtcttagtgtccgggaatgccggagaggacttaaaccaggcatttatttttgcattgcgggaggcattgcaccgtgaaaagttagaagagctggcgccggaaagctattattccgaggcggttgcaaggattgaaaactggaaaaaagtttatcctgacacctatcatcgattagaggaaatgcttgccctggaaaaaagttcggtaattcaactacaaacagagttgaataagcagaagaaagaagccttagagcagtttcgaagtctgtatccaaaactgacatcgggaaaccgttttgaacctcttttgcagcaggaagcaatgaaggtgtaccagcaggtaaaccgcagtttgcaggaagagtacggatattccggcatgttcctcgtgtttgatgaattcagcaaatatctagaagggcatgagaccgcaactttttcaaaagatatgaagattttgcaggaaatgtgcgagcttgcgaatgcaggaaaagaaggacagctgctgcttaccctcgttgcacataagagcatccacgagtatgtaagaggattagaccgtgataccatcaatgcgtttcgtggtgtggaaggcagaatccgtgagattgagtttgtcgtatccgcccagaacaactacgaactgattgcagacacaatcttgaagaaagaaccggaattttcaaaagaattcgaaaaattacaaaaagagacacaatatcagaagctgatgcaggaatcgcgttcgcttccttgtttttcgaagttgtttggcgaggaagatttcgaacgtgttctcatgaaaggctgtttcccgctcactccggtgaccgcatatgcgttacttcgcatcagtgagaaggttgcgcagaatgagagaaccatttttacgtttctggcggatgaaggacagggaagtctgtcgtggttgttgaaaaatggtcagaatgagctggtcggtgtggataaaatctatgattacttcaagggcttgttccgggaaaacaatgaccagcagcagattcatgccgagtggctggttgccgagtatgcacttgcacgtgtggagacagaagaagagcgaaaggtgataaaggcgatggcggtcattcgaatgattcaccgcgaggaagaactgccggcacagaaattgccgattcgcttaggactggctatggatgtagcgcagtttgaaggggcgatgcagtcgcttgtgaaaaaagaacttgtggtctaccggagcagccagggtgtctatggcttccgcaagattgccggaaccgggttagaggaaaagattgcaaaagcgatggcaacagtgcaggataagatttcgctctgccaggatttgcaaaaggtttccgatttagagtacgaacttccgaaaaagtataaccaggaatacaccattacaagatattttcaatatgagtttatgatggaggaagattttttccagttaacacagacgaagtatctgtttgacgaagcattttcggacggaaaattgttacttcttttatcagaagatgcgtcggatgcaaagcagttggaagagaaaaaaagagcggtgcagcagcacctggagaaactaggagatatcagagtgttagcactgttgtccgagttgccgtttacgcagcgggaaaatttagtccgtctgtccgcaattgagactttgaaaaaagatgaaagttttattgaggacaatgatgttcttttacaggagttatatctctatgaggaagatttgatttttgaaatcaatgcagcattagaagaggcattccttgcagaaaataaaaatgtgtggattctacgtgcaaggcaagaggcagagcgcggtacgacaaaggcaagaatgaatcagatgttaagtgcaatctgcgaagaatattatgaattttcgccgcgtgtcaatcacgagctgctcaacatccaagaggtacagggaaattatcttcgcgccagaaatgccgtcatccgtactctgctagaggatggagctaccgatgcttaccggaaaggaaccaacccggaggcactggtataccgtgcggcatttttaaataccaaagaggatgcaggctgccgtctcctttgtgaaaaaattgacgaattctttgcacattgtgccggagaaaagaagatattcattgagctgtaccgcaagctgcaaggtgaggggctgggtgcaagaaagggaattattccgttatttattgcaaagaaactggcaatggtagaaggaacacctgtcatttatctaagaaataaagaattagagctttcaccggaaacgctcaataatatcaatgaattcccggaaaagtaccagctttatattgaaccggaaactgcagcaaaaaatcagtatctggcaggtttggaaaagattttctgtgcatcggattcccttgttttgactaagaaaaagagaatcagcggaattgtaacctgtatgcaaagatggtatcgctcgctgccacagtacacgatggtgacgcagacttatccggaaaatgtgtccgatgccgtaaaaggactccggaatctgttaaagcgggcggagttaaacccgcatgaacttctttttgaaaaaatgccacaggcactcggtgtaacgtcgtatggcgatgcaagaaacgtgttagagcaggtgatgcagcttatgaatgaaaagctgacagagttaaaccatagcgttgcggaaaagacgaaagaagtatttgcggcagaaaagaaagaaagtctaagtgctattttgcatgcatggtaccgaggccagagtgaggcagcgaaaacgcatgttttaagtacaaatgtaaatagatttatgaattatcttcagaatctcacaaccaataatgaggaagagattgtagcagatttatccaaaattgtgatggatatgtatttagaagactggaacgataacgttttggcctcctatgaggaagaattaaaagccatcaaagaggagattgagcagttatccagtcaaggtacacaggcatccgggaaaaacagaatcattttaaaagatgccgatggaaatgagatggaacgctgttttgatgcagatatcacagattccactagtgtttatctgaaaaatatgattgaagaggcactcgatgattttggagataccttagagatgaatcagaaagttgccgttttggtacagacactggaaaaattaattcaatagaaaaacgttgcaaaatacgagcggaggaagagagacttggaaaattgtatttattttgacaatgcagcaaccacatatcccaaaccagaagaagtctatgaaacaatggattatgtaaaccggcatggcgcagtaaatgccggaaggggttcttatgctctggcaagggaagctgcaactcttatttccgacaccaaaaaatcaattttaaaattagcagatgcagacgatgtagcagaggttgtatttacagcctctgctacgtttgcgtctaatcaaatttttggtgggctggaatggtcaaaagaggatgtggtctatgtaacgccttacgagcacaacgcgacggcaagagtgctgcatgcgctaaaggagaagtatcacttttccatagaacttttagaactgaatccggaaacactagaactcgatttggaaaaaatccagttccagttttccagaaaagcaccgactgtggttgtcatgacccatgtcagcaacaccataggatatgtggttccgataaaggaagtagccaatctcgcgaaaaaatacaacgcaactacaattgtagatggagcgcaggcatttggattacttccgttttcattaaaacaaatgccaattgatttttacatttttgcaggtcacaaaacaatgtatggaccgtttggagtcggcggatttatctggaaagggtccgtgtcgctgcatccgtttttagcaggtggcaccggcagtgattccttgaatcttgatatgaaatcaggcgatgaggtgatgctagaacccggaagcccaaacctcattgcaatcgcaggactccaggctgcaatcgaaacactaaaaccagcggagctcatgcaaagagaacaacaactgaccgcatatctggtagagcagcttcgcaccatctcaggcgtaaccttgtatacaccatacaatcgcacaaatcatgttggaattgtagcgtttaacctagaaggttaccagtcagccgatgtcggtatgattttagatgaagattacaacattgcagttcgcaccggttaccagtgtgcaccttacatccacgatgtgcttgaggacaaggaacacttaggcattgtccgggcgagtatcggcaggtatacgacgaaagaggaaattgattcgttggtgaaagcggtaagggagattgcggaagagtaggaggaagagaaaatggaaaagaatacaagtaatttgaaagatttgattggaaaaatagaaaagaaggatattttgctgcctgattttcagagaggatttgtatggaaagatgaagagcagcagcgaaaaatcgtagcatctgttttggctaagatgccgattggaagtattcttttattaaagtcacaggccggagattatagttccaaacagattggttccaaaaatacctttgagccggaagatacaaagcaggtggtagagtttttattggatgggcagcagagaatgacggtacttaccaatgtattttctaatgtgattcatgaacagtgtgagaaagtaagtgatttgatttctccaactttgaaacgtcgtttcttccttagaattccaaaatggaaggattgtgacaaggaaaatgatattttcggagtaaagaaatttgaattttcctataaaaatccagattcagaatatccgaagtttttatcaggggatgtattgaacaatgttgaatgtttaagttttttaaataatgataagaaaccttataatccgcaaagtgatttttctacagatttggatgatttttgtagaacatatgacaaggggtatttaataccactttatcttgtagttccatcacgcaatagaaacggcgataagatgaaattgcggatggaagtgattcaggatgaaatagcacacaatatagaaaaagagattaaaacagaatttcaaaattgtgatacggatgaggaaagaaaagtatttattgaaaattttattgaggataaaagaatctgtaaagaaatacttgagggtaatatagggcgtctggatgattatttggaggaaaagaaatatagttggaaggcggaccttagcgaatatctggattcctgcgtaaaagcgattgcattgtcaaaaattgaagtggaaagcgaacagagagagcgtgcaattgacatttatgagaatttaaaccgtggaggggtaagcttaagcacgtttgatttaattatggctcgtgttgcaaaagtaaatcgtaactggtacagagagtttacggaatgtctgaaggaaaagcaggagtatacattagaagtagtgccaaaagatttgaaagcgcttgtcagcgaacaaattacagataacaattacaatgcaattattcagaccaagtgtctgaatgaggataaaaatgagattgcatccaagtttattgatgcatttttagatgtgttgtcgttgtattgttccaataaggagtatgacccgcagaaatattctatagatgatattaagcgaaagaaaattttaaatttacagccggaagaaattaacgacaataccaaaatggtttgcaatgcgttaaacagagcgttatttttctttcagacaagatgtggaattcgaaatgtgaatgagataaattattcgctcatgttggttttagtcggtgttgtttttacaaaaaaagaatggtttgagcagagcagggtacatgatttgttagaggcattatattggtcagatattttttcgggagaattcgataaggaccagaatgtgaccatgattgctcaattgcaaaagataataaaagcgataaatgaggatgcagatatctcatggttggtaagtttggaaagtgaagttttaaacggacagaatttctcagataaagaattcctgcttatggaaaaagcaaaagaagatcgttatccaaaacaaatattaagaagctttttatgtcagtatttattggcaaagacctatacggatatgtttgaggataagaaaatcagtgtattttaccaggatgcggattctttagaagaacatcatatcgtgccacttggaagcgtgaagaaagtaggggaatctactgcaaagcttagaaatatgcaagataacatctgcaattcaccattgaattttgtatatatcacaaaggaagcaaataaggaaatttcgtctaaagatttggatagttatattaaggggattttaccaaaagcaaagtcagcacttcatatatctaacatagtagtggcagatgataacaaggtaaaagaaatattagcagatcgatttgtgaatttgcaaggagatattacgcagcatattacaaatttacgtgattcatgggaagcacaaaagtaatcaagggaggtttttacatggcaaaactaaacgataaccagctttttcaattaaaactcgaaattcttcggcttgaacggaaaaatctccgcagcaaggcgaagacagaacagcgaatgtccgatgagattcaaaaaattattgtggaatattcaaaaatggtcagagattagtgtaaaaaactaacggaggagaaggaagaatgaaatttaaatcgataacgatgaaaaattttatgcgctacaagggaaccaatcagattcagttcagttgtgatccagagaaaaatgtaacggtaatattaggagataacacagttggaaaaacaacaattgcgcaggcatttcgctggggattatatggtgcaatttttgcagagcgcgggaaaaagcaggaagactatctgctcttaaataatgatgttttggcgatgatggatgccaatagccatgcaagcgtttctgtggaattagttgccgaagatgaggaaaaacagtaccggatttttcgtgaaatcagctacgccaggatatatccgaaaatgatggtgcgtgaggtttataaaaaattagaactacatacatcggaaatagagacaagaggtgatgaaatcgaagttgaaacagaaaaagtgcaggaggtcatcaatgaacttttcccaagagacttgtcacactattttctgtttgatggtgaacgctggagtgatgtgaccgttggtggcgtaaaagaaagcatcaaggattcggtgcatattttaaccgggctttcgtcatatcaggctgcactcgatcatttaaaagatatgggtggaaattctgtcattcgtaaatttaaaagtaaaatatccggttcaggagcagtttatgatggtctggaagaggaacggaaacggttagagcatttgaatgaaaaaagagaggaagaaatcgggacgattgatattaatgtttcgcattacctggaaaaatgtgaggaaatcaatctgtatctcgaagaaaatcaaaatacagaaaaaatgcaagccgattataagcggttaaaagtggttcaaagtgcacaggaaaaacgtggtgttgataattacaaaacgctggttaacgattatagcaatcaggcatttatgatatttgcgcaaccgctgatgaaggaagcactctccatggtaaaatcggtcgcgggtgaacggcgtgatattcctcacatgcgtcaggcgagtattgattttatcatcaaaagcggaagatgtatctgtggaaatccgattcatgaaaattcgaaagaattggaatgtctgttagaacaaaggcgttatcttccaccggcagatatggggtctttgcttggagaatttgaaaaaacatgtaagcaatgggaaaacagaaccgtagatactgccaaggaattaaaagaacaggcaagactggtggacgatagtattcatgactacaacgaaacctgtaatcagattgtggcaatggaaaagcagatggaagaacatgttgattttgcagaaccaaggcggcaattaaaatattataaagaagaaattcagacgctcagcattaaaaaaggggaattgcaagggcagattcagtcatccgagcgaagaatcatgcagattgaagaagagatgcgcggacaggaggcgaagaatgaggaaaatgcgaaatggagaaaacgccttcagattgcagaacagctttatgattcgatgaaacaggattttgatgaaaaggaaaagaaagtatttcttgagttaaatcagcaggttcaggaaaattttaaccgcatgttcaatgcaaaagataaaaagattcagctgaatgagcagtacgagattcaaatgttatataaaacagaaattggctttcgcgaagaaaagaatctttcagaaggagaaaaaattgcaagaaactttgcgtttatcgtgactattctggattatagccgcaagaaggctgccgaaaaaggggatggaagtatgggagacacgttaccaattgtacttgatggtccattttccaaattgggagatgagaacatcagtttgattgcaaaagtcttaccgcaggtttccgagcaggtcattcttttcatgttgaaaaaagactgggaatataccggattagatgaatatgtcggagcatcctattttattgaaaaagaggcggataaggcatacgcatcaatcaaaaaagtgggaggtgacaacattggctaattacgaatttttcaaaaaggaatttgagtttcgtggaaaacatgccagaatggtcggtgaattgtggaaagcgaacgattatgaacatacctattttaaacgattgatagatgtttatatcttagcagcagtggttggatttcggctggatcgaaaagcagatgaagattatgcgccatttgaaccgagaagtattttcccggaacagttaatccgcgagaaggacaagcttgattttttaatgcagatgattttaatgttagaatttgcagaaaaaatgccgcaggaagaagcggtaaaaatagcatttcgtggtgccgagacaaaagaagaatttgaccgctacaatgagatttttcattcctatgtaagaggcggtgtcgaggaactgtatgaacgattgattattcgaaaagcagaagtagatgatgattaccgggataataagacggcgaatctgatgacacttttcgagtggtttgcaccgaaaaaaaacagctttacaagatgaaatcaatgggatataatataggagaattataacataccaagtaataacaggttcttacaataaggtaagatacctaaaagctctaatcccattcttcggaatgggattatcttttatccgaatttatttaagcgcacttaataaataaatttgtcccggtatggttcaaatgaaaggagaacaggtatggaagacaaaatgtattacaggattgggttagacattggaattgcatcggttggatgggcagtacttcaaaacaacagtaacgatgagccggttcacattgtggacatgggagttcgaatttttgacaaggcagaacagccaaaaacaggggaatcattggctgcaccaagaagagatgctcgttccgtaagaagacgtttacgcagaagaaagcacagattagacagaattaaatggttgtttcaggaaagtggattgattgaaatcgattcctttatggagcgatatcacaaggagaatttgccggatgtgtacaagcttcgttatgaagcactagatcgaaagctgagtgatgaagaacttgcacagattctattacatattgtaaaacacagagggtttaagtcaaaccgtaaagcggaattaaaagagaaagataatggggctgtcttaaaggcgacaagtgcaaatgaggcactgatgaaagaaaaaggatatcgcactgtcggagagatgctatactgtgatattgcgtttaagactccgtgtgcatggagtgaaagtggatatattttatcaccacgtaataaagcagaagattacagacatacgataaaacgtgactggctggttgaggaagtaaaacagatttttgcaagccagcgtcagcttggaaatacaaaggcaacggaagaattagaagaaaaatatcttgaaattatgcagagccagcgttcttttgacatggggcctggacgacagagtgatggaacaccgagtccgtatgcgatggaaggttttgaaggccgtgttggaaaatgtacacttgaaccagaggaattgcgtgctgcaaaggcgacatatacaggtgaattgtttgttgcattacaaaaagtaaaccatattcgtctggtaaaaaaggatggaacatcaagaccacttagtgcggacgagagagcattgattatggaaatgcttcattctaagaaagaggttacctacaaggcaattcgtaaaaaattaaatattgatgaaacctataagtttaacatgttaacttatagtgagaaaaaggattctgagacaacaaaatttgccggcatgccatggcattatgaatatcaaaagagaattggatattttgcagatgagttgccaaaggcagaacgtgaagaactatataataatattggacgaattttaacctgttataaaaacgatgatagcagaacaatccgtttaaaagaacttgggttagaagatgaggatatcgataaattattagagttaacaccgagcaagtttttgcgtgtttccgtcaaagcaatgaagaaaattgttccgtatttggaagaagggatgatttataatgaagcttgtgatgctgcaggctacgattttaaggcagatggtacacagaaaaaaagcaagttgttaaagggcgaggatgtgactacaaccattaatgagattacaaatccggttgtaaaacgttctgtttctcagacagtgaaagttatcaatgcaatcattcagaaatatggtagtccgcaggcaatcaatattgaacttgcacgtgagatggcaagaaacttccaggatcgtatgacgatggacaagaacatgaaaaaccgtgcggctgagaatgaaaagataaaaaaagaaattcaggaacttggaaaactatctccaacaggtcaagatatcttgaagtatcgtttgtggaaagaacaggatggggtatgtctgtattcaggaaaacacattccgccagacgaattatttgacgcaggttatgatattgatcatattttaccatatagtataacatttgacgatagtatgcgaaataaagttctggttacgtcgcaggagaatcgtcaaaagggaaatcgcacgccgtatcagtattttggaaataatccagaaaaatgggaagcgtttgaagcaagggtatatcatattgttcatgattacagaaaacagcagaagttatttaagaaagagattacaaaagaagacagaaatcagtttaaagaacgtaatctaaatgataccaaatatataacaacggtagtctataatatgattcgtaaaaacttggagttcgaatcattttataatccagagaagaaaaaacatgttacagcggtaaacggtgctattacgtcctatttaagaaagcgttggggcatacagcctaagaatagagagacagacacacatcactctgtggatgcgataattgttgcatgctgtaccgatggcatgattcaaaaaatttcaagaagtgcacaggcgagagaagcgatatatcagcaggatggagccctctatgattatgagacaggggagatatttaaccgagatgaatggaatgaacgttatggaaaacagattccaagaccgtgggatgcattccgtgatgaactagacgttcatttgggaacagatccgaaaacattcttggaaacgcatccggacgttacaacaaagattgattatccggaggaaatttttgaaaatttacatccgatttttgtctcacgtatgccaaatcataaggtaacaggggcagcacacgcagatacaattcgcagtaacaagtaccatgaggacggaggtttcgttgttactaagacggcattgacagacattaagttgaataaagatggagaaatcgacggctatttcaatccagaaagcgatatggtactttatgaagctttaaaacgccaattgaagttatatggaaatgattccaagaaagcgtttgcagaaccattccataagccaaaagctgatggaacggaaggtcctgttgtacgcaaggtgaaaattcagaaaaagttatcattgggtgttcctgtgaataatggaaacggaattgcagaaaacggttccatggtaagaatcgatgtatttcgagagaatggaaagtattattttgttccaatttatacggcagatgttgtgaaaaagcggttgccaaatagggcggcgacggctcataagccatatgaagaatggaaagagatgaaagatgagaattttatttttagcttgtattctagagatttgattcatgtagtgagtaggaaagagatgaagttaaatcacgtagaacaaggaaatatcgtaacaaaagaaatgtatgtgtattatactgcctcagatatagcaacagccagtatatcaggaattgctcacgatagtagtttcaaatttagaggtctaggaatacaaagcttagaagtattcgaaaaatgtcaggttgatgtgttaggcaacatttctgctgtacgaaaagaaaaacgtatgggtttcaactagagagaaggtgaaacatggggtatcgcaatatcaagattgacagtaatgtgaaacttcatattaagaatcagcaattagagattgagatgggagagtgtgtaagtattccattggaagacattaactgtattctaattgagaatcagaccgtatcattatcaagttatttgctacaaaagttgtcgcagtatggaattgcgctttatgtgtgtgacgaaaagcatttgccgaatgcggtattgcttcccatggttcgccatagcaggcattttaaaatcttgaaatgccagatgaacatctcaaaacctttgcaaaaacgtttatggcagcaggtggttgttcagaagataaaaaatcaggcattatgtctgaaattgcttgaacgggatggagcagaagaattaatgaagatggcaaaggaagtccaatcgggagaccggacacatgtggaagcaaaggcggcagccttttactttaaaagtttgtttggtttcggattttcgagaggagatgaccatattattaattctgcattgaactatggatatgcaattatccgtgggctgatagcaaggtcaattgtttgctatgggttagaaccttccattggtatttttcatagtagtgaattgaatagttataatcttgcggatgatatgattgaaccgtttcgaccgttggttgatgtatatgtagcacagcattttgatatttcggaggttgacagtggactgacaccagagataaagaagggcttatttggaatcatcaattatgatatgttagtgaaaggcgaaaaacgaatcatcagtaacagtattgatatgttggcagcaagttatagcagcgcattgcagggcaatcgtacagggcttgacttgccagaactgatgccgttacaggtgcatagttatgaataagtttatgagattattagtattttttgatttgccggttgtgtcaccaagtgaaaagaaggcagcggcaaaatttcgcaggtttttattaaaagatggttatcatatgatacagtggtcagtatattctcgtatttgcaatggaactgacgcaattgcaatgcatgaatcacgattgaaacaaaatttacccaaacgaggttctgttcgtgtacttacccttacagaaaagcaatatgaatccattgaagtgttgttaggagaaaagacatttgatgatgattcagattcaacagaattgctaaatattttttgaaaaacagtataattaacttagttttgaacatgaaaatagtcttttgaaatgtgaagaaccccactcaatccattggattttgtggggttcttccggccctattataacataccaagcaataaccgggacttacaacgttgaaagtgtcaacagttcctagtatttaattataacataccaagcaataaccgggacttacaacctatacagtgtaattgtaaattattacaatattataacataccaagcaataaccgggacttacaactacgaaaggaaaaaagaaatgaaatatattattataacataccaagcaataaccgggacttacaactgttcagctcagtacattgcacttaatacaattataacataccaagcaataaccgggacttacaactaaagaaattgacttcctcaaggtagcacaattataacataccaagcaataaccgggacttacaaccaatcttgtcaacctctttttgcaaaaaatattataacataccaagcaataaccgggacttacaaccaaagatggcgaagatgttatgcgaattgaattataacataccaagcaataaccgggacttacaacgtacgaccgtggagataatatcaatgtaatattataacataccaagcaataaccgggacttacaactagtttttttaattttcgctcaatatcaatattataacataccaagcaataaccgggacttacaacaatgaaagcgaagcaggtttttactttgaattataacataccaagcaataaccgggacttacaactagggtttccctactcaactacctttcttgattataacataccaagcaataaccgggacttacaacgatgctgtgagatatattgcacagatgttaattataacataccaagcaataaccgggacttacaactagctatttgctctaactcttcttggacttattataacataccaagcaataaccgggacttacaacgttgataaagtcaatttctttcatgccgtaattataacataccaagcaataaccgggacttacaacaacctatgtagttcctgtcgcagaacaggtattataacataccaagcaataaccgggacttacaactgtaaggaatttttcagagagtacattgacattataacataccaagcaataaccgggacttacaacaatcgttcaaaaacacatatatcttcattaattataacataccaagcaataaccgggacttacaactagacacgcgaatatatatcgcaccaagctattataacataccaagcaataaccgggacttacaacgtacggagtattcaacagaatccgtgcagaattataacataccaagcaataaccgggacttacaactccatatatagatgggtctaatggtatttcattataacataccaagcaataaccgggacttacaacaagcgttcaaaagtgcatatatcttcattaattataacataccaagcaataaccgggacttacaacggaatgaacctttaatctgtatgaatggtaattataacataccaagcaataaccgggacttacaactccatatatagatgggtctaatggtatttcattataacataccaagcaataaccgggacttacaaccaatatgcaccgccttaatgttatcagtttattataacataccaagcaataaccgggacttacaacagaaaaattaattccagggtcagttgataaattataacataccaagcaataaccgggacttacaacatgatggaaaattgtgtgtttcaaagcacaattataacataccaagcaataaccgggacttacaactgaatcgtaaccttagatttttgagccaatattataacataccaagcaataaccgggacttacaacttgtttaataccttgtaaactatgcaaccaattataacataccaagcaataaccgggacttacaacccctgctatacttatgtcgtattgccatatattataacataccaagcaataaccgggacttacaactttttgccaccccctctacgtcataaatctattataacataccaagcaataaccgggacttacaacgtcagcaacttccccaccttttaaaaggttattataacataccaagcaataaccgggacttacaacaggaacagtttacaacggcaacttaaaaagattataacataccaagcaataaccgggacttacaacgtaaattatgtaaagttttttcaaatttaattataacataccaagcaataaccgggacttacaactaaggaaaaagcgcacaaccaacatgacggattataacataccaagcaataaccgggacttacaaccacacaacacgaccctatgcgttatactttattataacataccaagcaataaccgggacttacaacaatcttctttactcattgtttacttcctctattataacataccaagcaataaccgggacttacaacaactacaaattcctcaactggaattttatattataacataccaagcaataaccgggacttacaactagaaacagccgctttttcggctgtttctgattataacataccaagcaataaccgggacttacaacaatcgttccaattgatcgtgttcctccattattataacataccaagcaataaccgggacttacaactcttcggttgtttgcttgtaaatgtttcttattataacataccaagcaataaccgaaatctgtaactatgagcaataaagtgtaatgtaaatataacttggatatatagacggatgggaatatttgagataatatgctattattaaactgtcaaaattaatcagaaatataattggtgttaaatagcaaaaatacataataattatacttagtaataacagagatttacaatgtccctgttgttggatgccaagtagccccgatataatatataaagtaataaccgggacctacaacattttttgttcccgtaacatttataggagaattataacataccaagtaataaccgggacctacaactactcagcataatgtattatgtaatcatcaataatataacaaataactttacaaaatacaatgattattatattatgctgagtataagctaatataaacacgcaaagacgcggaaagcaaattaatatgaaaggggaaaaatcaatttgtgcaaagaaattattctataccatgggagtaaagagattgttgaattcccagaaatcagaattcaaagattccacaaggatttttattttggcttttattgtactatgtatccagaacaggcgattcgatgggcaacaagatttgatgggataggatatttaaatgagtacagatatatgccgaatgataagttaaatataaaaaagtttccacagatgacggaggagtggcttgattttattgcagcatgcagatctggtagaccacatgagtatgatattgttgagggaccaatggccgacgatacaatattcaactatgttcagaattttattgatggaaaaattagtcgagaagcattttgggatttggctaaatttaaaaagccaactcaccagattagttttcatactgtaaaagctttaacaacattgacatttttaaaaggagccaaagtaaaagatgaagaatgacagtgcattattttttacctgcagtctaattgaatttattggtcgacagcaaaaacaacgccggtctgcggttgtaaaatatcttggaaaagatacaatccgaagaatatacagttatgcggatgtatttcattgtgaaccaattgaaaaagttgcggatgactttatcaccaggacaaagataccaacggggacatatgataatgttgcaaagtgcagatatcttgtaccagattattggacaattggagaggtatatgaacgcttgattgaggacttggaagaacaggcggaaaagagcgtggaggaatggattgttgaggtatacacatcgtggatagatgctgcgatatcaaactataatacagatttttattatcaaccacgacaatatattgttgaatgttataaagaaggaaaagtatgtgcataaaaggaggcctccaaatgtcaaaaagcaccctaatcaaagacaccaccaaagcagagcgaatcgccctgattaaaagctggattccagacgatgacggtttagaggactgtgacatcgatctttgggagatgtaccgggattacattaatggagaaaaagagattgtggaaattaatgccgcatttcaagcggattatatcagtgacgaggagtagcagatggtatttatagcaattgcggcagcagtatttggcattgatttcggaatcaaaaagtttgtcgaaaagaaatatcaaagaaaagtcaggcattcgaaattacataatacaattgtgattgaaaaatattataataacggagcggcactaaatctgcttgcaaaaagaccgaaggtgatgcgggtgcttcacacgattgtgatgcttgctgttttgcttgtggacgggatgctgctaaagacgccggataagacatggacgaagaccggacttgcgctgttgacaggtggtggtctgaataatttatacgaccgttacacgaaggagcatgtggtagattatatccggtttaatatcggaccaaaatggtttcgcgacattattttcaacgtgtccgattttttcgtgttcttaggagcaatttttgtggtagcgggcagtgatgccgtttaaaacaggaggaacaatttcgtgacaaaagagcagtaccggaagctgacagagtttttgaggaaggatgacaaaaagaaaaacgcggttgtcttgctcaatcgaattttaactacaattgtatttgtgacatatccgctgtatcttcttttcctattatggaaaaaagaggtctggctggcacgggcaatcattgttccactcgattcttttttggtagtaagctttgtacggtatttaatcaatgcaaaacgtccctatgaaaaatttgacctgcctccggttttggaaaaagataccaaaggaaaatcctttccaagccgtcatgtgttttcggtgtttatcattgcaatgaccgtgttttatacattcccatgggcgggaattgtcttgatggtgataggcgttttacttggcgcaatccgtgtggttggcggtgtacatgaaccaaaagatgtggcagcaggcgcacttgttggagttctgtgcggacttataggatattattggatataaaaaacggatgggtacctccatgaaaaatcgttcaggaggcagcctatccgtttttgatttttacgattaaagcgtgtattttttgcggtacgcgcttggcgtcatttcaaatcttttcttgaaaatacggttaaaataagaaagattgtcaaatcctacttctgcggcaatatctaagatagaagattcggaagaaagcaaaagcctcgaagccatcgtaagccggtattcgttcaggtagtcaatgaaggaagttcccatcgtatttttaaaatatttcataaaatgggactggcttaaatgaacctcatttgccatgtcttccaccgtgattttttccatataattgttttcgatatattttaaaatcgttttcattttctccagcgacttgtaatcctttttcggggcctcttttaagcaacatttattaaagagcgtgaaaaagaaaagataaagctggcttttgatgaaaagctggtatccctgcggatttgttttacaaatctcatcattggcgtcgatgcaggcagagatttccttataatacggatcttctggacggtagaacatcggcacagcaacattgccgtggagcaggggctctatgtactcggtgttgcaggagtccgtcttttttgaaagcagaatatttgggtgaaaaataatattttcatattccatcgattcattctcaaactgttcaatcgaatgaagctgaccgggcaaaatcaacgcaatcattccggcactgacctggtattgtttcaattccactgtaatgataccgcgtcctttcttaatatatacaatttcgatttcatcgtgccagtgtaccggcacataggaaaaatcgagcggaatcgaacacaaataggtaatatacggaaaaagcgggtttccatgtaaaattttttcgtgataattttcatactctaagatattcatgatgatagtattgtaccactttttggtgaaatattacaagaaaaaagaaaaaaatgacgatatactaatctcataagaaacccgatttacgaaaatttacgaaaatcaattttaaaaatggaggatttttatgaagttacaggaaatcgtaaccaacagatacaacaaaagtatcgcagattgtacaaacgaagaaatctactttgctttacttgaaatgacaaaaggaatggcaaaggcaaaagagagcaacgaaggaaaacgtaaattatactacatttccgcagagttcttaattggtaagttattatccaacaacttaattaacttaggaatctacgatgacgtgaaaaagcttcttgctgaaaacggaaagaacttatgtgaaatcgaagaggttgagccagaaccatctttaggaaatggtggacttggacgtcttgctgcatgtttccttgattctatcgcaactcttggattaaacggtgacggtgttggtcttaactaccactacggattattcaaacaggtatttgagaacaatcttcagcatgagacaccaaacccatggattgaaaaagaaagctggttaacaaaaacagacgttacttacccaatccagttcggcggattcacattacagtccagattatatgatattgatgtaacaggttacgataaccgtacaacaaaacttcacttattcgacgttgagacagttgacgaaggattagttggagacggaatcgatttcgataaagaaaacattgcaaagaacttaacacttttcttatatccagatgattctgatgatgcaggacgtattttacgtgtatatcagcagtacttcatggtaagcaacgctgcaagactcatcattgatgaagcaattgcaagaggatctaacttacatgatttacatgaatatgcagtgatccagattaacgatacacatccaagtatggtaattccagaattaatccgtttattaatggaacgtggaattcttatggatgaagcaatcgaaatcgtaactaagacatgtgcatacacaaaccacacaatcttagcagaagctttggaaaaatggccaatcagcttcttagagaaagcagtacctcagttacttccgatcatctacgaattaaacagccgtgttgcaaagaaattcgacgacaagtctgttgcaatcatcgatgatgaaaaccgtgtacacatggcacacatggatatccactacggatacagcgtaaacggtgttgcataccttcatacagaaatcttaaaagatacagagttgaacaacttctacaagatttacccagagaagttcaacaacaagacaaacggtatcacattccgtcgttggttattacactgtaacccagaattaacacagttcttcgaatctttaattggacctggattcaagaaagatgcaacagaattagaaaaattaggacagttcgtggatgacgaagctgtacttcagaaattattagatgtaaaagctggaaagaaagcagaattaaagaattaccttgcaaaaacacagggcatcgaattagatgagaattctatctacgatatccagattaagagacttcatgagtacaagagacagcagatgaacgctctctatgtgattcataaatattttgaaatcaaagctggtaagaaacctgcaagaccaatcactgtattatttggtgcaaaagcagctcctgcttacatcattgcaaaagatatcattcatttaatcctttgcttacaggaactcatcagcaaagacccagaagtttctccatacttaaaagttgttatggtagaaaactacaatgtaacattagctgagaaattaatcccggcagcagatatccatgagcagatttcccttgcttccaaagaggcatccggtacctctaacatgaagttcatgttaaacggtgcagttgcaatcggaacaatggatggagcgaacgtagaaatgcaccagttcgttggtgatgataacatctacatcttcggagaatcttctgaagcagttatcgagcactacgcaaaagctgattacgtttccaaaaaatactatgagaacgacgaaaacatcaagaaagcaatcgacttcatcgtaagcgatgagttaatggcaatcggatgtaaagagaacttagagcgtctctacaacgaattattaaacaaagactggttcatgacattaccagacttcgaggaatacgttgcaacaaaagaacgtatctacgctgattacgaagaccgtatggcatgggctaagaagatgttaatcaacatcagcaaagcaggattcttctcatctgacagaacaattgctcagtacaacgaagatatctggcatttataagaagtgtagcatcgttcccccgacgatgagacatagatatatctttatatataattcttcctttataaaaggagctgtgtacaggatacacggctccttttttgctttataggaaatttctcaaac

SEQ ID NO: 3880 - DNA, 23077 bp, synthetic construct
  source 1..23077: mol_type = other DNA
  misc_feature 1..23077: note = Synthetic
accggacagctattacagcgaggcagtcaagaagatagagcagtggaaggacagctttccggatgcgtacagtaattttgtgggagagcttcaaaaaaacggatgtaatgagagaacaatgcagcttggtcttgagaagaaccaaaaagaggctcttgatttatttcgcaggatatatcctatagtaaccaacggaagtgaatttaatcctattattgtgcttgagactgtgagaatatacgagcagattaaggatacactggcacgcgattatgggtatgcaggaatatatgtcatatttgatgagttcagcaaatacatagagggtcacgaagcggatacattttccaaggacatgaaggtgcttcaggatatgtgtgagctgtccgagagaagctctgaggggcagatgtttataacctttgttgcacataagagcattaaagagtacggcgctaagcttccggtggatatgagaaatgcattccgcggtgtggagggcaggataaaagaggttctgtttgtcgtctcctcacagaataactatgagcttattggaaatgtgttaaaaaaggatgaagccgcattgcgtgagcttcctaagatagggagatactatgaaaatgctcttaattcttatcgattttcatgtttttcaggactgtttgatgaagctgattttaaaaaatatgtggttgagggctgctttcctctcatgccgtttactgcgtatatgctgcttcatataagcgggaaggtggctcagaacgagaggagcatattcacctatctttcgcacgacgaaaagggaagcgtgtgcagaataattgaggattatggcgaagatattgcagactgcggaataactgcggatacagtctacgattattttaaaaatcttttcagggaggaagcctcggatacggttattcacaatgaatggcttaaagttgagtatgcactttcacgtacagtggataagctggagaaaaagcttataaaggttatcgccctgataaatattatagatatcccggatgagctgacggcggatgtgccacagctatcatgtgcgcttaatatttcggaggatgagtgcaggacagtggtggagcgtctggtggaaaagagaattattatataccgttcgcgcagacattcgtacagcttttacaataatgtcggtgttgacatacagaaggagatttcactgaaggcagcgaaattgccggcagattcggatatactcggaaccttgaaggagatttcagagtacgattatgtgcttcctaagaaatataatcagatatattcgatgaccagatattatgagtatgtatttatgtcaccggagcagatagaaaagcttccgtcaccggagattctgtttgaacagcacttttccgacggaaaaatagtggctgtggtgagcgataacaggacagattatagcaaagagctgtctgagcggcttaaggatgacagaatagttgtgcttgtgacaaaagcagcttttgataagggcggaagcataagaaaatacattgctgcgaagagtcttatgagtgacaggtcattcatagaggacaatattgtgctggagcaggagcttgtaaactactgcgatgacatttcatacgaggtgaataagtttcttaaggaagcgtacaaccccgaaagcggtgcctgtgcggtataccacaacggtgaagcattccggtcgggttttaggaacggcttctccttcaatatgtttttgagcagcataatgacggagtattacaataatgcgccggttgtaaataacgagctgattaatagacagaacatatcggctcagaacaagaaggctcgaaataagattgtagatatgctgctaagttctgaggattgttcgtcatttgagaagggaacctcacctgaggcaaccatatacagggcggttcttgtaaatacaggtattctcggcaatggcggtgaggacaggggctgtgcatatgtcctgtcggagattgagcggttcatagctatgtgcgattcaaataaatactccttcaagctgctgtatgaccgtctgatgggcagcggatatggtgtgcgaaagggaattattcctatttatgtggcattatgcctgtccaggcttcaggataaaccgattgtaagcttcaaagaaaaagaggtaaatatagacgctgttattcttggaaatatcaacgattcgccatcggactattatctgtatgttgagcatgagagcatagaaaaacagaattatattgtggggcttatgaagttatttggagtttcagccagagctgctggggttgcaggtgacagagaagttttagatggaatcctgagatggtacagggcgcttccgcaggcggcagcgaacataggtcgcgttgtcgatgtgagtgagaacatggcagcggcgttaaagcggctgtgtatggcgctgaggcatcaggagtataaccctcatgagttcctttttaaggagcttgtcgatatagcaggcagaattggcgacagtgaaaaatactccgcagatggagctgtggtaaagagttccttgacagaatctccggtgactaatgcttcgccggaagcaggttcattagccggtgtactgcataatataacacttttaaaggcatatcttgatagttatcttctgaagctttcaggtaatgtcgcggcaattgtaaaaaaacgctgtaaggcagacgatggtgacagccttaggtcggtgcttgaggagcattattccgagcacggaaagagacttgaaaagctggtgactaagagccggacatcggcaatattgtcatatatatcggatatacctacctatgacgaaggagagattgtgtcgaagctgtcgaagcttgtcacggatatatacattgatgactggcgtgacggaatgctggagaagttcagagctggctgggatgaattctgtgatgaggctgagaacaccgtaaacagcgagagcgcacttaacagcattattctaaagggagaaggcggaagcctgcttgaaaggagctatgccgatgtggaggatgacagcacagggtattttcttaaaaatgcgataaaggatgcactggatgaattcggcgacagtctggagactaatgcgaaagtagcagtgcttgcacaggttcttgctgagcttgtggcaggggagagcagataattgcagtaaggatatatgaaacagaactaagagaaaaaatgaggattacttatgagcatgatttattttgacaatgcagctaccacatacccgaaaccggaatgtgtgtatgaacagatggatagggtcaatcgcagcctgtcattcaatgccgggcgtggttcctatgctctggcgcagcagtctgcccagataatcgataatctcagaaaagaattactccgcattgtgaatgcgtcagatgtagcagaggtcgtactgtcggcctctgctacatttgcattgaatcagataataggcggcctgaaaataaaaaaagaagattacatatatatatcgccgtacgagcacaatgcagtggtgaggacactctataaccagagggtgtttagagatgataacaagatggctgacagtgaagcggggagaattaaaaagcatattattgtgatgccgtttaaagatgacggcaacattgatataggtagacttaagtatgagttcagcgtccatgccccggcatttgtatttatgacacatgtgagcaatgtcacgggctgcatactgccgatagaacagattgctgcagcggctaaggaatatggtgcgatagtggttgtcgacggttcgcagtcgcttgggcttgtgccatttgacatgtcgcagtcgcttgttgatttctacgtctttgcgggacataagacgccgtacggtccattcggaataggcggattttttatcagaaacggtgtgaggcttgatacatttatcgcaggaggaaccggaagcgattcgctcaatgtccacatgcctgaagccggcagcagccgatacgagccggcaagcccgaatgtcattgcggcagcagggcttctggcagcaataaaggatgtcgatggtgaggagataaaaaggcggctagacaaggaaatgtcgctcacgcgctacatagttgataaattacgccggctatacaatgtgaagctgtatctgcccccggcggacaggcatgtcggaatagtggcattgaatataaaaggttatcagtcatcagatgtcggaatgattcttgatgccgattatgacatcgctgtgcgcacaggctaccactgtgcaccgctcatacatgaatatcttgacgacaaggaataccttggagttgtcagggtgagcataagcatgtttacaacaacggatgagattgacgcgctttgcggggcgttgggggagatttaggaggaaaaattatggatttaagatttgcggagataagaaatctgggacaattgtgcaatatagaaaataaaggcaataagaaggagaatgttccgcttaatgtagttatcccatattatcaaagaccgtataaatgggacagtacaagaataggcaatctgattaccgattttcataacaacgaagaaggagaggatgaagagggtgagggatattttgccggttcggtggttatggttgaggggcgtaatggggaatttgaggtcgttgacggacagcagagaataacaacactttttctaacgaattatttgagatttgtgcttgtcagaagctatatagaattaatgataaacatgaaaagaatttctaaaattcctattcttatgaatgaattgattgatacagcggtgaatatttttgatagggataaggttgaacaattaaaaaatgtcaaggagggagttgataattttataagcatggttgaggagcagagtgcagacgatatagaaaaagcgtgggatgatatgcttgaatattatcagtctaatatgtggcttccaaagaagaatttttctaacatggatatttataagaaagagtattttaacctgaacagaaagctgctctcaaatgtcagtctggctctaagatatagtagaaacggttataatgaaaagctcaaagaagcactcagcagaattatgataattatgcccgaatcaagcaatccctgttttgaaacgctgtcattcgataaaaattcagaagcaaaaaatccggttacagagcaatatataaatgcggcaaaatatatttatgatggtattgttgattcatatatcagcggacaggaaaagccgattgagtacataaaggcaaccgacagcgctatgaaaaaaatattgaataacattaatttctgcgtagttgtgactggaaaagagaaggacgcgtacacactttttgaggtcttgaatgacaggaattttccggttgaggatttggagcttatcaagaacctgttttataaatggtattgtaagcacaatgaggacgatgccggtgcagattattatattgagaaggcggataaaaaatgggtggaggaaatattccctatatcaaccaaaggaaaggagcgttccaagcttatttcgtatcttgcggcacagtatttcacagccgacagcagattaaaatataacgataatgaaaaatacagggaagtgattgaaaaagaatatctgaataagaaaaacgtatatgagggcgaagatttattgaatgatatccgtatttatgaaatgcttggaataatactggatgaatttgatttccggtatcagaagaaagctgagaatgtaataaaggcggagagggagagcgcaaaatccataacctacaaagcattaaatttgataaacgcactcacattgtacggtgtaattccggctataaccaatgtgataatcaagaaatttctggacaagcacccatttgatgaatgtaacggagacgcacagataatgaagttcagggaatttgtccaggggataataaaggatagtgcgaataataatgcagaatatattgatatccacaatgtttcatatagcttctggcgttatgcactgctggcacagaactcggacagagtcagaggcattgcaaaggattatattcttaagaataattcatttagcacggattatgtgttgaaggtggatagtcaggacatagacatgttgaatgaggagttcagacggtggataaatgcatggaaatatggtaatgaaaagtcgcagcttaaggtgaaggtattgtttataaatcttttttataccaacagagttgaaaataagcttattttcaacaagaccggaacaaaatttccgacagataatatccagcttgaccatttagagccggataaaattaattcaactgccatggaaaaatattttgagccttcttctaagaacgcaagggaggattatacggacagccttggcaactttatgattatggatgcggacagcaatgttgataaaagtacactgccgcttcaggacgcactcaagatatatgataaaatgggagaacattggctgataagggaaatccatgatgtgtttgaggaagatagctgtggaacgaacagaaatatagacaacaagatttacagagttccgaacgaagagttttttaacaggagaaaacagaggttaatcacttatttcaaggcaattttaaacaagagacttggcgatgacagcgtggaaattccggatatttagattatagatttgggggtaaatggcatgaaccagtacaatgaaaaacaaataaaatccgttatattcgaaatccttcacattgaacgaaagaaccttagaagcaaggctttcacggatttaaagatggcggatgagattgggaagattatatcggagagcagtaagcttagcaaataacaggaggcggggaaggtacagatgaaatttaaaacactgagaatgaagaatttcatgcgatacaagggtctgaatgagattaattttagctgtgacgaggagcataatgtcacggtggtattgggggataacactgtgggaaaaaccacgatagcgcaggcgttcaggtggtgcttgtatggcgcaatcatggttgaacgcggcaagaaggatacagactaccagctattgaataatgatgttctttcaaaaatggatgccaacggcagggctcctgttttcgttgagataatggcggtggatagcgagcatgtgtacactatccacagggaggttgagtatatgcgagcctaccctaagtttatcgcgaaagaatcctataaaaccgtaaaaatgtttgttgcagacatcgacagtccagacataaagcgtgaagttgagccggggccgaactataacaagataaatgagcttataaatgagctttttccgcgaaatctatcacattatttcctgtttgacggagaaaggtggagcgattttgcaataaacggcgttcgcgagaatataaaggaatctgtgcacatattgaccggactttccgcatataaatcggcgatgtaccatctcaaggatatgggggataattcggtaataaaaaaattcaagaagaatattcagggaaaaggcaatgtctatgatgattacgagcgcgaccagacaaggcttgagcgcgaagtggaaaagtgccagaagcagatagagagccttgacgcgagtatcaacctctgcaacaaaaaatgtgaggaaatagaaaattatcttgaggaaaataagaataccgaacagcttcagatggagtacaggcagacacagagaatgttgagggcacagggggagcgttatctggcgaattataaagctttcatttcagattacaattcttctgcgttcagactgtttgcaaagccgcttattgaagcttcattaaagatggtcaaatcagtggcaggcgagcgccgcgatataccacacatgaagcaggcgagcatagattttataatcagaagcggcaggtgtatatgtggaacccctgtaacgaaggattcctatgcccttgaatgcctgcttgaacagagaaattatctgccgcctgctgatatcggttcgctgcttggcgagtttgaaaagacagctaaccgctggaacagggtagaggatgagctttcttcggacgctgcgcgggtggatgatagtgccagagattgcgatgagacctttatacagcttcagaaaatggagaacaggatgaatgataacatagatttcgcagagaagagggctcagcttaaaagatataaggatgaagccgccaaggcagccgaaaggaagggggagataaagggacttatagcctcataccgtagcagaatccagagcatagaagtgcagatgaaaaatcaggaagcaaaaaatgcggaaaatgaaaagtggagaaagcgtttagggcttgccgaggcggtatatgaaaaattgtttgcggatttttccgagagggagaagaagatttttagcgaattaaacgatgaaattcaggttaatttttatcacatgttcaatgcaaaggataaaaaaatacgtttatcggaaaattatgagatacagatgtgctataagacagatttgggttatcaggaggaaaagaatctgtccgaaggtgaaaaggttgccagaaattttgcgtttatcgtgacaataatggattacagcaggcggaagaagctggaatatagcagagctgacggcagcagcgaagccacaggctttgaggagggcaatgacactctgccaatcgtccttgatggaccgttttccaagcttggcgcggagaatatatcgttggtggcgggcgttcttccacaggtatctgagcaggtaattgtgttcatgctcaggaaggactgggcgtacacaggacttgacaagtatgtaggcgcagagtactcaattgacaaaaatcctgatgagagctttgcttcgataagaaaggtggacagatgataaatggctgattttgaattttttaaaaagcagtttgaattcaagggcaaacattcgcggatggtgacggaattgtgcgttgccaatgattttgaacatacattttttaaaagagttattgacgtgtacatattcgcggcgataataggcatacgccttgacaggaaggctagagaggactattcgcctgtcgagactaaaagcattttccctgagcagatgatcaatgcgaaggaggatttggattttataatgcagatgatgataatgcttgattctgattccggtgcaactgatgaggacagggtgcgcgaggcatttaggggagctcagagcaaggaagagtatgacaggcttcttggaaccttcaacgattatgtgagaggcggtgtggaggagctgtatgaaaggctggttatcagaaagcgcgactccgaggacagattctatgatgacaggacagcgaatctcatggcactgtatgacagattaatgccgaaggaagaatagaatatgactttggtaatcgttagtattattggcattgttagggttttaacaaaaatgcttagcttgtgattgttacttaaaatgttattggatacttaaattgttgttgaatatttataaaaaagaaatttgaaactgaaaaaaattaataaaaatcacaaaatttttctttacttttttagatatgtggggtataataagcttacgttatatcgtaccaagcggtaaacggttacaacaataaggtcccgccgctggcggtgtacctcaaagctctaatcccacttaaagtgaatactttaggtgggattatctattttaaacagaatttattattaaagcgaacagaataataaagtccaatcccttctatgattaaatcagatattgcaaggcggaagttcatagctattccggtaaatggtaaaattaaatatcgcttggtgttatatgatgtgctgatttgggctattgataaggttttggaggaaaggaatatattatggaggaaatgaagcagttaaacaagaaaacggaagtgcagaagccgactgatttgaactacagaatcgggcttgatatcggtattgcttctgtaggctgggcggtacttgagaataataccaatgatgagccgttcagaattattgatttgggtgtaaggatattcgacacagcggagcagcctaagaccggagcatcgcttgcactgccaaggagagaggcgcgctcagcacggagaaggttaagaaggcgaagagacaggatagagcgcatcaagaaattatttcagtcggaaggtcttatagatattgaggagtttgaggcgcgctataaaaaggcggggcttccggatgtatataagctcagatatgaagggcttgatagggtgcttaccgatgatgagctggctcaggttctgttacatatagcaaaacatagaggttttaagtcgaccagcaaggcagcggatggagctgattccgaggcgggtgaggtcaagaagagcataagtgcgaataaggcgcttatgcaggagaagggctatcgcacggtaggagagatgatttatctggatgagaatttccgtacagattgtccttggaatgaggatggttatatactcacaccgcgcaataaagcaggtgattataagcatacggttttaagggatatgcttgccgatgaagtgagggagatatttaacttccagagagaattagggaataatcgggcttcggagaagctggagaaggcttatcttgacataatgctcagccagcgttcgtttgacatgggtcccagtgcgccaagcccgtattctatggatggatttgaggacagagtagggctatgcacctttgagggaaagaacggagagaaacgcgcggcaaaggcggcatacacttcagaactttttgtggcgttggagaagataaatcatactaagattgtaggtgatgacggaataacaagatttttgacgccggatgagcgcaatataattatttcgcttatgcataagcagcagactgtaaagtataccgcagtgcgtaaggctataggcttatctgaagatgagagcttctataacctgaactacagcactaaaaaagctgagaataaaaaagatgttgataataaaaaaagtaccgaaaatacagattttgtaaagctggagaattatcacaagatacgaaaagcgctcaatgatgacgtggtatcggagcatttgcagccggacaagataaagctgtatgacagtatagcaacaatacttacattgtacaaaaatgatgatagcagggttaagagattcattgagctgggaattgacaatgattgctttgatgagctcctctcattgtcgccgagcaaatttcataatctttctttgaaggctatggcaaaaataattccatttttgcttgaagggaatacttatgacaaggcgtgtgagcttgcgggatatgattttagggcgaatgacaagggcgagaagtcgcttttgttaaaaggcaagaatatcacggatatcgtaaatgacattaccaatccggttgtaaggcgttccgtatcacagacgataaaggttataaatgccattatacttgagtacggaagtccacaggctgtcaacattgagcttgcaagagagatgtccaagaactttgatgaaaggcgcaagctcaagtacgacatggattcaagggagaaggagaatgaccgattcctaaagcgcgtcagagagtacaagcagaatccgacagggcaggatatagtgaaatttcgtctctgggaggaacagggaggaagatgtctgtattctggtgaaatgattgatataaatgaccttttttctaacggcggaggatatgatgtcgaccatatacttccgtacagtatcacattcgatgatacataccgcaacaaagtgcttgtaaaggcgtccgagaacagacagaagggaaacagaacgccgtatgagtattttatggctgaaaaaggtgagaatgcatggaacaaatatgagattcttgtcagagatactgctaaggattacaagaaacagcttaagttgcttaagaaacacataacagaggacgagaagagccagttcaaggagcgcaatattacagatacgaagtatataaccagaattatctataacatgatacgtcaaaatcttgtgctaaaaccgtatctcaaccttgaaagagagcgcaaaaaacaggttgtagctgtgaatggctcaataacccattatctcagtaaaagatgggggcttgagagtaaggacagacgcactgatacgcaccacgctcaggatgcggtagttatagcctgcacaactgatggaatgataaataaaatatcacggtattccaagggaagagagctgctctattcaaggggcttccagtttgtcgatgaggaaacaggagaaatcctgaaccgcgacaattttttcagggaagaatgggacgaaaggtatggtgtgagagtgcctatgccttgggaacatttcagggatgaacttgatattagaatgtcaagatataatgaggcaggagacaaccagatggcggggacatcaccaagagattttattctgtcacacagggatgttttcaactggcttgattatccggagtggatgcttgttaaaggcagaccgggacgcagaggagtgcttgacggaatatttgtttcaaggatgcctaaccataaggttagcggacaggcgcatgaggagacagtgcgttcagcgaaatattattgtgacggtggaagcatatttgagaccggcggatatgttgtcaccaagaagccaattcaggatatcaagttaaaggatggtgagataaaggagtttttcaatcctgatagtgacaggctgctttataatgcgctggtggaaagacttaataagtttgaaaatgacccccaaaaagcttttgcagagccgttttataagccgaaagcggatggaacaccgggaccgatagtcaagaaaatcaaagtatttgaaaagcagacttcaggagtaatagtcagggatggaaatggtattgccgcaaatggggctatggtacgaattgatgtgttctgtgaggaagataaggggaagaaaaagtactattttgttccgatttacacggcggatgtggtgaaaaagaaattgccgaataaggccgcaacagcaaacaagatgttatcagagtggcgcgaaatgaaagaggaaaactttatttttagcttgtattcaagagacttgatttatattgagagtgataaaggtatacagattaaaaatatagatgacataacaagtaaggaagaaaaaatttatgcatattatactggtgccgatacagccaccgcaagcattgcaggaaagttgcaagatagtagcgcagtgtttagaagtattggtattcaaggattaagaaaatttgaaaaatgtcaagttgatgtgcttggaaatatcacatttgtaaaaaaagagaaacgcatgacatttaattaggctttgggggtatgtatgggatatcgcaatataaagattgatagttctttagggttacacattaaaaatgaccagttagttataggtgataaagaaatcagttttccgcttgaggatatcaattgtgttttgatagaaaatcaatctgtcacggtatcagcatatatgcttcaaaatttcgcaagtcaagggattgccctgtatgtgtgcgatgaaagacatctacctaatgctgtgcttttgcctatggttaagcacagcagacatttcaaaatgctcacaaaacagatggaagtcggaaagccgctgattaagcggctttggcagcaaattattatattcaagataaaaaatcaggcgctatgtcttaaaaacatgggcttttcctctgaatatgaaaaattactttccatgacaaaagaggtgcaatcgggagataagacacatgttgaggcaaaggcggcggcatattatttccgtattttgtacggcgaaggctttacaagagcagatgaatgtattgttaattctgcaatgaattatgcttacgccataataaggggtctgattgcaaggtcgattgtgtgctatggtttagaaccgtcgattggaatgtttcatcatagcgagctgaatagctttaatctggcggatgaccttattgaagtgtttagaccattggttgatttatatgttgcaagtcattttgatatgtctgaggtggatgcagatttaacaccgcagataaaaagagatttgtttaatataattaactatgatatgtcactgaaaggagagaagcgcatcataagcaattgtattgatatccttgtttatagttacaatggagcgattcaaggcaacagaacggacttagaacttcctgaattaatacctttgcaggtgcatagctatgaataaatttatgagacttatggtattttttgacttgccggttgtgaaggatagagacagaaaagcagcagctaaatttcgcagattcctattaaaagatggctatgtaatggtgcaatggtcggtgtattcaagactttgcaacggttcggattcaatagagacacataagcaacgtcttaaacaaaatcttcctcaaaaaggttcggttcgttgccttatattgtctgaaaagcaatattcatctatagatattctattagggacatcaacatttcatgatttggatgaatcgacggacttgataaatattttttgaaaaaagagtattataagagagatagagtgcaattttctaagatttttttagatggaaaatccccgtgaacatatataaacacggggatttttcgttccctattatatcataccaagcgataactgggaacaacaacctacagtgatgtagcgtaggatggcaacctattatatcataccaagcgataactgggaacaacaactccggaacagcacaagtctggaagatggcaattatatcataccaagcgataactgggaacaacaacagtaccgtccaagaggttagaaaggcattaattatatcataccaagcgataactgggaacaacaactgaaaagggcgttcatatcgagggcatctaattatatcataccaagcgataactgggaacaacaacttttttgttgacaaaaccgcagcgccttaaattatatcataccaagcgataactgggaacaacaactgaaaataaatataaatatggttatgttaaattatatcataccaagcgataactgggaacaacaacaacagtttcttgaccgcacaagaaaacatattatatcataccaagcgataactgggaacaacaacggtaaaagatgtatttgattactgtattatattatatcataccaagcgataactgggaacaacaactcgcaagtttatgtcaaagaagggaacaccattatatcataccaagcgataactgggaacaacaaccattgtgtcagaagatggtacaaaggaagtattatatcataccaagcgataactgggaacaacaacttcttgcttatagtcaacatatccgttctcattatatcataccaagcgataactgggaacaacaacatatgtggatataaagatatttgacggaagattatatcataccaagcgataactgggaacaacaacccttacagaggacgaggacaatcatttcaattatatcataccaagcgataactgggaacaacaaccccccagcttgctctggctcccaacacaccattatatcataccaagcgataactgggaacaacaaccactggtagtcaatgcctctgttccgttgtattatatcataccaagcgataactgggaacaacaacagtttttgttgtcataatgtcggttttttattatatcataccaagcgataactgggaacaacaacatacttgttatatgtacactcaatccggtcattatatcataccaagcgataactgggaacaacaacgtacttcttgtaatgattacctactctttattatatcataccaagcgataactgggaacaacaactggtctttataaagaagtaacttgttttttattatatcataccaagcgataactgggaacaacaacttatacaacgcacctgctaaacaggtgtgtattatatcataccaagcgataactgggaacaacaacgtcgttcctgtgaagttaagattgatataattatatcataccaagcgataactgggaacaacaactaagggtataccagaagtggtggtgcctatattatatcataccaagcgataactgggaacaacaacaaataaagaaccccagcaaggctgctgcctattatatcataccaagcgataactgggaacaacaaccccggaacagcataagagtggacgttggcaattatatcataccaagcgataactgggaacaacaacttgagtgggtataaagttttagctcacataattatatcataccaagcgataactgggaacaacaactatatgcctgtcgcgtgaagagcttgaagaattatatcataccaagcgataactgggaacaacaacggaaagcctacagcgattagtaaaaaattattatatcataccaagcgataactgggaacaacaactaaaattgtggtagatactaataccagaatattatatcataccaagcgataactgggaacaacaacagaaagcgggtacagatgggacgcaagctgattatatcataccaagcgataactgggaacaacaacccacagggctgaaagtcagagccggaaagaattatatcataccaagcgataactgggaacaacaacggttcggtataaccaaatcaaatcataccaattatatcataccaagcgataactgggaacaacaacggctggtataaatagacagacgttgtatgaattatatcataccaagcgaaaactgggaacaacaacaagaataacacctgcataaagcggtgaaccattatatcataccaagcgataactgggaacaacaaccttttttcttgcacattgagggaaattatcattatatcataccaagcgataactgggaacaacaacaaatgtgacggactaatcaccgtgaggaagattatatcataccaagcgataactgggaacaacaactcctcggtgtgtaatcccgaatcaaaaaaattatatcataccaagcgataactgggaacaacaactaccgatgttgaggacgatgttgaaaaaaattatatcataccaagcgataactgggaacaacaaccaagacgggtaaggaagagtggggagcagaattatatcataccaagcgataactgggaacaacaacaagggatattaaatagtcccatgtttccaattatatcataccaagcgataactgggaacaacaacttttccgtaaacaggattctaaccacgctcattatatcataccaagcgataactgggaacaacaacatttgaggagctgtaacatgggagaatttattatatcataccaagcgataactgggaacaacaacaccctttttaccttcatcattaacaggtgcattatatcataccaagcgataactgggaacaacaactgttgttggcgcgcttttcggtattcacgaattatatcataccaagcgataactgggaacaacaactgagaacgattaccagtatcttagcaagtattatatcataccaagcgataactgggaacaacaacttgaacaaggtccaaatctccaacatttgattatatcataccaagcgataactgggaacaacaacctgcttgatggtatacttgatggtttaaaattatatcataccaagcgataactgggaacaacaacacaccatggtttttccgcaaaggaaaaatattatatcataccaagcgataactgggaacaacaacttgatggtaaaaagtattatgatttgtgcgattatatcataccaagcgataactgggaacaacaacgggcgcaggttcttattatgccttgccgcaattatatcataccaagcgataactgggaacaacaacacaaagactataaaaaacgaatgtccatgcattatatcataccaagcgataactgggaacaacaaccttcgttgctttcaatcctgtgtgcgttgtattatatcataccaagcgataactgggaacaacaacttcatacacaccattattaaaatgatgtgattatatcataccaagcgataactgggaacaacaaccagtagcaagccttataatcaaagctatcattatatcataccaagcgataactgggaacaacaacgttggcgcttccggggttcaattccccggcattatatcataccaagcgataactgggaacaacaacgggcgaagccaatgacagaacatcagccatattatatcataccaagcgataactgggaacaacaacatacatatcatcagattgtccaattaaccaattatatcataccaagcgataactgggaacaacaacgattagacaaggtaagattaatgagaatgtattatatcataccaagcgataactgggaacaacaaccttaggcggaaaattagcaaggaatagaaattatatcataccaagcgataactgggaacaacaacaacatacttgacacgtttggcatcccatatattatatcataccaagcgataactgggaacaacaacagagcaggctccacttgcgcagcgagtaggattatatcataccaagcgataactgggaacaacaaccctctgctgcagatgaagaatctgagtctaattatatcataccaagcgataactgggaacaacaactcggcgcatagtttgaaactcaacattcaattatatcataccaagcgataaccattaacaacataaggaaattctcagttgacattatatcataccaaacgccaactatgaacaacaaccttatccacaaaagataaaccttctaaaaaatgaatactaccatacatgccatctgatataatacttataaaactattcaattaattaatgacttgaatttcacaattacctcctcccatgcttcggaggactcaaaataagcaatataccgcagattgagaaaaatactactaaaattggaacaatgtgaagcaccagaaatactgcggcggcaatcaaggcaataaggattaaaataataatcaagataatcatttgtcgggtctccttgagagtgaaaaaagtgattttatgattctttttgattatatatcattgcgctgtgagtgtgaacagtatttttgcaaaaaataacaattaagttatcattggattttcgggaaggttggatttactcattcaaaatgctacatcggagaaacttattcaatagttgaaccaagctattgactaagcccaatcagttgtctacaatatatagtgaaaatcagaggaaatgcttgaagataaaaaacacataacagtttcttaaagtaaagtaataaaactgtttgaatagaaaagtcttgaatagaagcaagtcttgaatataaacaagtcttgtattgtatagaaataagcttttaaaaaagaaaaatccttaaagatagacataaattttaatttttaaacggagtatctatttagactaattgcttatttaaattaactgtctatttaaatgaatataaaaggaggcaaactttatgaaaaaaatccgcttgacctacaatgccccggttacactcacatttgtgttgctgtgttttgcggcaacgctgctaaattatatgacacaaggggcgagcaatgcgcttttgtttatgacgtatcattcgtcgctcaccaatccactgacgtatctgcggttcttcacgcatgtgcttggacatagcgggtgggtgcattttataggaaatgcctcatatctgctattgcttggacctatgcttgaggagaagcatggtggggacaatattttgaagatcattcttgtcacagcgcttgtgacgggacttataaattatatattttttccgcgggttgcactctgcggtgcgagtggagtggtgttcgcgtttatattgttgacatcgtttacgagctttagggagggagaaattcctatcagttttgtgcttgtagcaatgatttaccttggtcagcaggtgtatgatggtatatttctggatgacaatatatctaatatggcacatatcgccgggggaattgtaggttcaatcacaggatacaaatttaacaagagaagttaacaatagcgtttgcaattaaagacaaatgtctgcgaagcagagattagtgcttgcagctataacagatgtgcttataatgcttatagtctaagaacctgcgtttttactataaacgctaatgcctgcaaaaccagttatgttcctgcgtaacaatcgtcagtgaccacaatgcaattattacagttgcagcagcctcagcttaaaaacgtacacaacaagccggattggtattatttgtgtcaggacagcccgaaggcggaattgtaaaatatttgtgaacaatgagcaatggcactgcaaatttcttgaaaaacgaaaaaaactgtattacaataatcacgtatgttatgaataggagaataaaagaataaaagaaacgaggacgtggttatggatgctgtatcggtaacgttattatttctgggactgtttagtggcatcgcacttttcctgtatggtatgagtgtgatgggagatggtcttaagaaggttgcgggaaataagcttgagacgcttttatatgggctgacaagtactccgcttaagggaattttgttgggagcgggggttacagctattatacagtcatcctcagcaacatctgttatggtagtcggatttgtaaattccggtatgatgaaggttgtacagggaattggtatcataatgggtgctaatataggaacgagtatcacagggtggattctatgtctgtcggatattcaaggggcaggtggcgtcgcggcacttctgtcatcatcaagtattgccgctattgttgcgatagtcggtctttttgtgagaaacctttcaaagaaggagactcacaaggctataggtgatattatgtttggatttaccattcttatgattggtatgtcaacgatgaaggatgctatggctccgcttcaggataatccgttttttatgggaatgctcacgaagttttccaacccttttcttggaatacttctgggtattattattactgctgtgctgcagagtgcgtccgcgtctgtgggtattctgcagtctgttgccatgtcgggatatcttccgttttcagcggcgctgcctatagttatgggtattggtgtcggtgcagcatgtcctgtccttatgagtggaatgagctctaataaaaatggaaagagaacagcgcttgtatatctttttaatgatctggcaggtatggttatctgcggaacacttttttacgcaatacaggctgtggtgactcgtggtggacagtttgcatttatggatttagagatgaaatctgtatcaattgcacttctcaacaccatataccgaacagttactatcattattctggcaccttttattaagcagattaacaagcttatgttctggataatcaaggattcaccggatgatgttgaagaccaggcggattttgatttgcttgaggagcgtttccttaggaaccctgagcttgctcttacacaggtcggaacagtcatgaatggtatggcgagaaaagcacagaagaatgttatgagagcatttgacctgatggaaaattattctgttgaacagtacaatcttattcaggagaaagaaactgtaattgataagtacgaggataagcttgatacatacatgatgaagataactgctataggtcttaacaaaaatcagaccagacagaactctaagtatcttcatacagtgagtgattttgagcgaattgccgaccatgcctgcggaatatcgcgtgcggcgagggagatagtggagaaaaagattaagttctcggatgatgccaacagggaactggctattttatataatgctgttaaggaagagcttgatatgaccgtgaagtcatttaccgaggataatatagatatggctcgacaggtagaacccttaaggataacagtgcgcatgctctgtgcggagcttaagagaaatcatatcgtgagacttcagagcggtaattgtgatgctatcaatggctttgtttttaatgaccttttgacaaatcttgagcgtattgtggcacactgttctaacatagctgttgcgatgatggaatttgagtccgatgatttcaatacgcaccagtatcttaaggatatgagaaattccgaggtatccgatatggcgaaggacgttaattactattcggagaaatattcaattgaaatgactgcacagaaagctgtgcagggcagatagtcgtgcagggcagatagtaccacggcaaaggacaagctattagcgtatatttataaagccccatctgacaggtaaagctgtgagatggggctttattattattttttactgcgattaaggcgtgtgaactcacgggcgattaccagaatggattcattgtattcgagaggaagtgttgacatcatggaaacaacatctttttgcatgtcatcttcggcatcttttccaaaaactattgtgtccagtgaaacctgaagaccttttgaaagcttgattagggtgtccacggacatggattttcgtccgttctcgatttctgataagaatgttacagatattccgactttttctgcgagctcctgttgcgtcatgttaatggaacgcctaagctggtaaatcttattacctatgatacgattagtatcatgggaagtacaattcatataaaacctcctgtacattatttattgttaaagtaaaaattttgattatcccgaaaaacccttgaaatacaagcacattcgcaggattt

SEQ ID NO: 3881 - DNA, 23006 bp, synthetic construct
  source 1..23006: mol_type = other DNA
  misc_feature 1..23006: note = Synthetic
ggagaaacgtttgaaatcgaaggaaaacgtttctttgcattcggtggagctagtagccatgatgtcagtgatgggattcttgattacgaagatccggaatggagagatcaagcaaaagaattggatcatcaaggtaagtacatgtaccgggtgaagggtttaacctggtggtctgaagagttgccaaatgaaacagaaatgcagcatggtttggagataattaagaaatacgacaataaggttgattatattctcacgcacagtccgtcaacatccgaactgtatttgatgggtggtaaaggattgtatgaaccggatgtgttaacgaattatttggaagaaatcaaggtatccgtcgattataagaggcatttgtttggtcatatgcatctgaataaagcaatcaatgatcgggatatctgtttgtatgagcaaattgttcgtattttataatgaatttctgacgaaattgccaaaatgtaagccttattgtttgtgtaaaaatgtaatggagattaaattatggaacagaaaataaggacaatcattgccggatgtcgtaattttaatattatcgagatcgtcgagatggtaatgttaaacagatttgataatgattatagtgagatcgaactagttggcggcggagcaaagggtgctgatgcattagggaaacagttcgcgagagaacatggtattccgtataaagagtttccagcagactggggcacctatcataatgccgccggaccaatccgaaatcgtcagatggcacaatatgcgatcaaagggaaaggttccggaattttgattgcgttttgggatggaagatcaagaggaaccaagcatatgatcgaaacagctacagatttcggaatggaagtaatcattgtgtatgtttgatatcgtatcttcggttcaaactgcgaagctttcattgtttccattcgaacccatatttagtgtaataaaaataattgtaagctaaaaaggaggaaacgaaatgacagcaggtgaatgcatcaaagactggttaggattagacaaaacaaaaagtttagcagattggttgggattgaatgaagaatcccaaaatgaatctgaaaatgaataggaggacacggctatgactgttcgagaattcatcaagaaaaatggatggcaagcagagtgcgatacatctaaagccaaaagaatgagtatcgatatcgatttcttaaatccgaacaaagaggaagacgaaacgcagttcgatatcgctgctttcgacgtcaaggaattagcaaccctttttgcagacttctgtaaagagaacaaattcgcgttgaatactgtcacaaatgtagtcattgttgcggttgacgatgaaatggacgtcgatttctaaaaacagaaaagaaagatctattgctttgcagcagtgggtcttttctttatgatttctgacgagttttcgtatttgtgagccttgttgttaatagaaacaaagaaatggaggataatgaagggctgtatgaaaaagcataagacggaattagaaacgaaatgtacggaaaacacatatgaagggaactcgttcaattgcaatgcgtatgattctggatattgctacgttttgggacgagcgttaacagaggaagaagacgcgttatgtgaagatcattgcattttgtgtaagtgaaaagagagaattaatatatttcatagaaaaaactagcaggtgtatgatagaattaagtgcgtaaaacgaaaaggaaaaacaatatgagtggtagaattataagaggttactggtcttgtaagtattgcagaactgctgacattgatggactggtagatgtttgcccgaattgtgggaaacagaaatcatcagacgtaaagtattatatgaaacaaggaattgcggaagaagtaacggatactgaattacagaaagcgaagatcaagaaagaggagtgtgacggcaaacacaaagactggatatgtccatattgtaatcagttgaataattatgcagatggtgtttgcgtagcgtgtggtgccgaaaaatcggaagcagagtttgaatacggagaaacgaagatggataaatcggaaacaaaaacagatgtattcgaaaatacgcttccgaatgaaacagcaccgaaagatgacgaaaacgatactttggttgacagagaagatgtaaactcaaacgagatagttgaaaagtcgcctattaatctgcgtgatcgaattatgagtaaaatacgcggcaacaagaatatgctcaagattagtggtattattgccgcagtgttcgcggttattggattgctatttttcttgttccaaccaatcacgaagtcagaaacggttgtcggattttcctgggaacgaactatcacaatcgaagaggagcgaacagtagaagaaagcgattggtatgtgccatctggtggtcgagtctatgacgagaggcaagagataaggagttataagtcggttcttgaccattatgagacaagaacagaaacaaaaagcagacaagttttcgaccataatgagtcatatacaacatattcggataacggaaacggaactttcacagagcaagtgcatgaaaatcctgtataccgtacagagtactatactgagacatacgaagaaccagtatacagacaggaaccagtatatgacaccaagtattattatgagattgaacgatggtttccaattgatacttacagttccaaagacgacgataaagagccatattggaatacggaatatacattaacagagaagcagcgtgacacaaagcgtgatgaactttattatgtgcattacgatgatggtcagaatgtcgtaaaagatgagacagactatgatacctggttagaaaccaagattggtgacggatatgaagtaacgtataaccgacttggaatgacgtataagagagaagcaattaaataggaaaaactgacaacgaactccatcattttcggtggagttttgttttgtagaaaacattatgacacatatttatgtttgacaataacaatcaggaatctttataatgaaatcagaaagagaggaaacgaatatgtatttgcttatgaacaaagacaaagagataatgcagtttaatactttggcaggacctcttggaaattcatatgaaattatttcgcaaaatgaagatcagttgccatatggttttacaaatattgcggaatggatttcaaccagaaaaggtagcaaacataatgcacacttgaaacagatcatgaaagattgtggatgcgaagatgatcttggttatattcgtgttacgcatgctgcatcgctaaatgatacgtactggataaaaaatgaactggaatctgttacgtggaatgatgtttctttctatcggaacgaatttgatgaacagatttccaagcttgcatttgaaggtgtcggcttatatgggataaaactgagtagtacgtctccagaattatgtacagaaggcagttttcgcaaatgctggaagcgagaagacggtgaaatttatctgtacaagagagggacatccggagctatgaatgctggacttgaaccatattgcgaaatgatggcatccgaaattgcagctcagatatgtgataatgcaatttcttatcaaaaagtaacattacatggtgaaatcgcatcaaaatgccacttatttacaacggaatcagttgggtatgttccgtatgcaaaattaaaagaagatacgactgcaaatgcaatgctagatttttatgcatcaatcggtagcgaggataaatttcgacagatgcttgttttagatgcacttacttttaatgttgaccggcatgcaggaaaccatggagtgagtatcaataatgatacaaaacagattcttggcatggctccgatttttgacttaaatttatctctactgccatatgtattgccggatgaatttgaaaatataggtaacaaaatgttggagtacggtccacgcattggtgacgacttcacaagaatcggacagatggcattaacatcggaaatccgtgcaaaacttatcaatttaaaaggatttgagttttctttcagaggcaatgaaacattttcgaaagaacgtgtgcattttttggaacagatgattgagagacaaataactggacttctatcgaaagaacagttgtatacgaaagacgtttttgttccagaacaagcaaaagaaatacagcctgttaatagcgatgtaggattaaactcagctgctgatgaccttgctgataatctacaagacgttcttccggatgcattggtgtcagaaatgaatgattcttctgatgattttgttatcgtatcgttaaacgaagctgtagagatctatatttcggtttcagatttttcggttgaaatctatgttggaggacaattagcagacgaatcaagtttaacagaagaagaacgaatggactatacaaaaatatgtcaagctgtggatgattttgaacttgaatacgctaactttgatgacttggcacgataatcaatatgttaatattctacttatgcaaagagactgactttgaagttggtctctttctttttgtttccgtatgttttgtgtgcgtcagttttatcccatatttaggataataaacaaatacacatattaaaaggaggaaacgaaaagatgggagagatattggatttctacaaagaacacaaagtagatggtatcaatatgaacgttatacggttcattgatgaggtttcaagttttccagaccgagatggaatacctggagaacatattgatcatttgttttgtgccggatattgctattattttgctcatatgttagaaatggcatttggtggcaaagtatgttgggttcaggatagaggacatattgcatgggctgattgcgacaaagattgcacattagaacaattacaaaacgcaattgtatatgatattactggaattgcagatgattacgaaagagtatggccaatagaatatcttggaaatacaatcgtaaattacatgcataatggaaaagaatttcatctcagtcagaatttcaaagattggtgcgatttctgtaaagttgaagaaatattcgcgattaatgtaatctggggatgcatgccgattgatgaaatcatgaatgattacaaaaatagacttgattatgttcagactgcataccagtattggatagagcatagcacggaatttcaggagttgtttcgattcattaagaaaaagaaccagttcctgtatccagatcatcttggtataacagaaacacttatcaaatctgaaaactaaaatgagaaaaggaagtcagctatattggttgactttctttttgtttccgtatgttttgtgtgcatcagttttatcccatatttaggataacgaacaaattgcacacataaaaaaggaggaaacgaaaagatgggaagttggaacgaaacatgtatgttaagtcatttacagattatgtatggagattctgtaaaagtaattattttggtaaacaacaaggcagatgcaaatgaatctactcgtgtttactacaatgaaacctattctccattgatattacctttcgatgcggaatatgacgattatggtggcgttaaaaacgagaaaattcctgaatacacagacagtctgttacatgagttagaattcgagcaaaaagatggaacgaaatatgaatataacaacatggcagattttattcaggatattaatgagacggatggcttgtacctaaaaggtttctatctcaatggtccgaaaaaacttgaatgtgtttttattcatgccgagctctatgatattttagcttcagaaatgagaaacagaataccatataaccaaaagaagaccctgtatgaattatacaatgaacggaaccaggaagtgaaagaactatggatcaagtacaatagtaattctgatgagtatgataaatcatgcatattgtaccacgaaatcatgccaaaacttttcaaaacgtctgcatatggatatgagttttctatcatgattttagaaaaatcattaaccgaaaacaattttgatggtttctttgaagaatttacaaaatacatcctgtttgcaagagcattacaaactggtagatatggatatataacaagatgtggagctggtggacaagatcttgactgttctatacaaacggctgttgctaattttgttttgaaattttcaaagagaaccgatggagatggtgatcgcatttattgtgacgaggaaactattttttggtattaaaagctgcaatgaaaagattagagactgacgattttgtcggtctctatttctattcctagtttgtaatcagttaatattcaacagcatttgtattcattaatcggaacaaaaaaagtatcaaaacctcttattaatgtctttttcgtatcccttctttgtgtgcgattaactcggcacatatttagtgtatcaaaataattcacacattaaaggaggatacaaaagtatgaacaaagaagatgtaacaaaacagatgcaggacattatcaatcagatgaatgaggcatcagctgtctacggaaaagatgcaatcatgactgatcataaatgggatgacctttataatcagttaacagacttggaagaggaatccggtattattcttccagaaagcccgactcagagtgtaggagcagaagaggaagaagatattccgggtgaaaaagtagaacatgagttttcggcactgtctcttgcgaaaaacaaggatattaagaaacatatcaaatgggcccagggtcgtaaatgtttcgtttcttggaaggaagacgggatgaccttggtggttacatatgataatggaaatcttactcgtattgtaacaagaggtgacggatatgttggtacagatatcacgcgtttgaaagatgttatcaaaggaatcttaccaaagatcgactacaaaggacatctggttgtaagaggagaatgcgttatttcttatccggatttcaagcgtgtaaatgaatcactgccagcaggtgtaaaactgtatgataatactcgtaatcttgtaagtggtactttgaagctttcagatgaggaggttatcaaagaccgtaatccacagtttattgcgtttactttgcggtatctggatgatgaatccgtattagatgcagttggacttcgaaattcatgggaaacaaggcagttattcttaaagaaacttgggttcaacattgtttcttacaaacctgttgaacatccggaaaccgatttacagtctgttattgatgaatttacagccgaagttgagcagtacgaaatgcctgttgatggtcttgtactctgctatgaagactgggattattcgttaacaggtggcgttaccggacatcacgcaaccagagcaggttatgcctttaaatggccggacgaagcagtagaaacaaaagtggttgacattgaatggtccgactcaagaacgggcttatttaatccggttgctatctttgaaccagttcgtctttgtggaacaacggtaacccgtgcttcgttatcaaatctttccaccgtaaagaaaaaagacatcaaaatcggagatagaatcaccgtttataaagcaaacatgattattccgtgcgtagaagataataaggatgccgatgttcaggatacggatgattggaatttcatttgcgaacgtcataatatccctaaaatctgtccacattgcggaagacctcttactgttaaaacatcacaaaatgcagaacttgttatctgcttgaatccagactgttctgcaaaactgattggaagtatggctcatttttgtgaacgtgattgcatgaacatcatgggtgtttctgaaaagaagttgcagcagcttattgatcttggtgttgttgagagtatttccgatcttgtagatctcccaatgagataccatgcgagcggaaacaatctgatcttcgttgatgaattcggtgatgactgtaatttggcaaaccagacaggatggggcgaaggatctgtgttaaatcttgtaaccgggattgagacagcatgtaaaaatgcgacctttataaagtttcttcatgctatgggtattcctaattttggtcgcggacaggcgaaactgttagctcctgtggttacgaaatggatgaaacaaaatgaagatgccacggatatgttatttgcatctaaaacggacatgttatatgcgcttggctgtatggtagagaacggatatgacttcacaacagtagatggatttggtgatgttattgctagttcgttaactacttgggttcagaaaaatctggtgccttatgttgatggtgttatgaatgaaatcggacgtattttacagtgtcttacatttacagacaaaccggaagattacattaaggaaacatcaggatcaccagtcgatggtaagacttttgtagtcaccggagatgttcacatctttaagaaccgtaaagacgtggaaacaaagattgaggaacttggtggtaagttatcaggctccgtttccaaaaagacagattatctgatcaataacgacattgagagtacgagcagcaagaaccagaaagcaaaaacgctggggatcccgattattacagaagaacagttttgtgaaatgatcggaatgcagtactaattaacagaaagagagaccgtttacctttattggtggcggtttcttttattttgtattcctttgtaaattggtcacccatatttaggataacaacaaaagaaagaaaaacatgatcacttccggatttgtaaattatggttggttccgggttgcgtataccagaaatagttctggactacaagcgtaaacagttatagaccctggtagcgtataccctaacaatcatgcatttcgtatgtcgttgagttatagaccctggttatttccgggttgcgtataccaaaagagatggatatattagggtttcccaggttatagaccctggttgtttccaggttgtgtataccttaagcggtggaacaaacggtactgcatcggttatagaccctggttgtttccaggttgtgtataccatttcttcgtgaacttccattttttgaattgttatagaccctggttgtttccaggttgtgtatacctgagattagaaaaccagtctctataataaagtttgatactgaatatagtatctatactgtgaagtttaaaacccttactcgtttattcgggtaagggttatcttcgttttatggtacaaaacggagatcatacacctgcagtgtccaaatctcagtttttatacaaaaacagcagatttgaactcggttcctcaagagtgtaagtgagttctattgtttttgaaaattaatcgtattttctgacgagttttccatattgtgagccttgttgcaggtgttattacgaaaacaagaacaagcagaaaggacgaaaactttatggaaaatggatttacatatcgattaggattagacattggtatcgcttctgttggtgctgccgttgtacagacaaacagttttgataacccatgtcatcttacggaaccggatgttcggaaatttactgctgcagagtgcagagagaatgggaaaaataatgggaaatcagcggcagtaccaagaagagaatgcagatatacccgtagacgcattagaagaaaacagcttcgaatgaattgcatcaaacaggcattgcagaaggcagatcttattgatattgatgagtttatgaaacggtattctgatggaacacttccaaacgtataccagttacgatacgagggattagatcgcctgttgacagatgatgaatttgctcagattcttattcatattgcaaagcactgagggttcctgtcaacaagacgggctgacaagaaagacaaagaatccggagctatcctcgcagcgacgtccgcaaaccagaaacttatgatggaaaaaggatatcgaaccgttggcgaaatgatgtatctggatgagagttttcatacaccgtgttccaataatgagcagggatttattgtaactccaagaaacaaagcgaaagactacaaacatacaatctatcggtcaatgttggttgatgaggttcatgcactttttgatgcccagcgtaagcttggaaacacaaaggcaaccgaaacattagaatccgaatatcttgagatcatgacgagacagagaagttatgatttaggtccagggttgcaggctgatggaaccaaaagtccgtttgcgatggatgggtacaagagtaatgccggagaatgcactttttataagaatgagacacgtgcagcaaaaggtacgtatacagcagaattatccatgacattacagaagatcaataatctgaaacttgttgaccgatatggagacggtcggtttcttacggatgaagagaagcagaagattcttgagtatataagtaaacacaaaaccatgaaatacaagacggttaaaacattgctgggcattgatccgatgattcgtttcaatcttttgaattatggcaaaaagaagaaaacgaaaaaggaatcagaagacaaaacaaaagacgactccacgaagaaaaagggtaccaagaagtcaaaaacaaaagcagaaaccggtgagaaaaccgacaaagattccaataaagatgaaacagagttagaacgtattaatcgaatcgaagatactgttttcgtttctatggaatttacgctttcttatacagactgcctgaaaactcggattaaaacgttatcggaaaccgaaaagagagatttgtttgatgaagttggagaacttcttacgtcatacaaaacagatgcagccagaatcgagaagctttcgaatcttggtttaacgtcagaagaaattgatcacttgcttgatctaaacccaaaaggttatgccagattgtcacacaaagcgatgaaagagatcgagacgtatttggtacaaggtcttacttatgataaagcgtgtgctgcagccggtctcgattttcaggtaacctatactggagagaaaatgaagtatctcaaaggtcctgagatcaataatatcatcaataatattcagagcccggtagtaagacgttccgtagcccagacggtcagaattatcaatgcaatcattcgtaaatatggaagcccgcaagctgttaatgtcgagttatcgagagagatgtcaaaatcattcttggaacgaaagaaagcagaaacagcgatggaattaagacataaggaaaacgtgaaattctgtgaagagatcaagaaacttggtataaacagtccgaatggagaagatatcacgagatatcggttatggaaagatcaaaacggtatctgtctgtattccggcgaaaagattccggcaagaactatgttttttaaagaatatgagatcgatcatatcattccgtatagcatttctcttgatgatcgttatcagaataaagtattggtaaaagcaaaagagaatcagacaaaaggaaaccgtttaccatacgagtatttcggtcatgataaaacaagatgggctgcctacgaaaacagagttgaatctttaatcaagagtgatggtaaaaagacgcatctgttgaagaagaattacacaaaggaagaccagagagagtttaccgaaagaaacttaaacgacacaagatatgcaacaactgttgtttacaatatgatcttgcagtatctctatttggagccttataactgtgacagaaaaacgaagcaggtatatgccgtgaacggtgctgttaccgcttatttgagaaaacgctgggggctcaataagaaagacagaacgaatgacagacaccatgctatggacgccgtagtaattgcctgctgtacagatgaaatgattgctaaggttacgaaatatatgcaggatagagaaacggcgtatagtaagaacttccgtattgccgatgaggaaaccggagaaatcttaaccagatcgaatttcacaagagaacaatacgatgaagcctatggagtccgtttcccagtaccatgggagacattcagagaagaaattgatcttcgtatattcaatgacgatccgtttggttatcttatgaaagaccgaaatttacagatcaagatcgattatcctgattggatgtatggggaagaagaaagtccggttgcgaaaggaaaatacatcaattatattcgacctatgtttgtttctgtagcatgcagtcataaagcgacaggacgggctcatgaggaaacgatccgaagtgcaaaatatcatgattccgacagtcttgtaatctctaagagagctttaaaagatctgaaattgaacaaagataacgaaatcaaggactattacaacaaggaatgtgatcctctactctatgaagcgcttagaaaccgattattggaatacggcggagacggaaagaaagcgtttgctgaagaatttcataaaccaaaagcagacggaacagatggaccggttgtcaaaagtgtaaaagttattgagaaaaagacgacgggagttcaaattaatcatggtcttgctggaaacggaaatatggtacgcgttgacttataccaaaaagagggtaaatattatgccgtcccgatttatatttctgatatggtgaaaaaagagatcccaagaaaagcggcgacaggcggaaaacagtacaaagattggcgtgtaatgaatcctgatgattttctgtttagtgtatatccgagagatttacttcatttaaagaaagggaaacctttcaacgatggactttcgaatgatatctatatgtattttgcgggactagatccagcttctgctagttttgcagttaccgctcatgacagcagtatcagtttacgaggtattggaattcaaaacctggaactgattgaaaaatgtcaggttgatatgcttggagagatccacgtttgccgtcaatagggaaaacaagaaaccggttatcattcaattatggtagccggtttatctcatgctggtttattccatatttaagataacgaaataattcaataattaaaggaggactcaaaaatgagtaaacaagttaatacggattacttgattaaacttttcaccgaaaggagttatgccgtatcgcgtgatggtatcgatgctttgaatcttggcatgacgttgtcggatatgattcaagtgatctcagaagcgtctggagtcgtttatgctacagcatcacagaaactcaagaaggcgaagtctgcaaacacaaagaaagccagactggttctcggagttacagagcaggttgcagaagaccagtgggaacgtcatatgaaaacggttgatgttgacgttccgatttcggttgatctgaatccaaaaagcgctgacattattggcggacattggttgaaaagcgaaaaggaatgaaaacgaaaagagaccgttaccttaattggtagcggttttcttatattttctcacattgatacttggtgttctaataacagtataaataattttaaatacacttatgtatttgatattgaaaataatagagatgatcgtattttatataatcggttatgcgaaaaagatagggctgatgtgttagaagaaagatttattaaggagaatgaagaaatgaagtgaactactcggtcattgaatggccgaggattccatcttagttatcctaaactacgatttacgtcttctttttgtatcttcctgacgagtttccaaattcttgagccttattgtaaatgtaaaacaagaaacaatatgtgaaaggatggcatataatatgacaatacagacaatttcgaaagaagataaaaacgtaaccgtagagttaagtgcagatgatttggttatgatttgcaacgcattgtacttgcattcgaaagagcaggatttgcagtcgaaagagcagaaaacgaatgatcatttcttgcagctatacagcgacatgatgatggctcgggatctgtgtcaatacggtcatgtggataatttctgtctacgaaatgtcgtagcatgccgcaacgatatcggaaaagggatcggtgtcgtgttgtcagaagaggactaactactttcagtaaggcgtttgcagcagtctttgtttcaagtaattacagagtattgtagatcagataggagtataattatatgattttatttattttactagccattggattcgcattgtatactattttttcagatagtgggctaattgatagtatcaaaaatattgaagaaacaaataaagaagtttatggaagtgtgccaaaaattatttttcagtggttcttacttaatattttctttaatgtaattaatttcatatttgtttttataatatccgcgattgttgttctatgttgtcctaaagcagaatcttattatacattcaatattaactcattaaaagacaatctagttacaagcggagaaattcatggcggtgctttttgtgtcagagggactattgacggagatattagttatttcttttcaagaacaacagataaaggagaaaccattggacatataccagcggataaatcttatataaaatatgacgataataaaaagccttgtattgaagttcatcagaaaaattataagataccagaaattatagaaaagctattatttacaaaatggtttaacaacaagagtgtagattattatgtaattattgctcctgatggaacaatatcaacaactggaacatatgagatagatatggactgacaacatccggactgcctgaaaggaaacatttactggtcagacttgatatgatggttttgaagaagaagggttcgatccggcgaattaaaaataattcaaattggtacttgacttttcattctatctcggatatattctaaacacgaagaaggaagtgcctatcctttgtattctgtatatctgcatctcacccggatccaatatatggaatacattatgattgcacttcctctttttataaaaaaaagaaacaaattatcaaaaatgtgacgagatttccaaaaagtgagccttatatatattgtaaacaacagaaaaccaaacatagggcactcgccaagcggtaaggcacgggattttgattcccgcattcgctggttcaaatccagtgtgccctgttaagggaacgatggattgtagcgtaagcgttatgtccagcgtgccctgtcaaaggatcttattataagcgttagatccagtatttcctgcaaaactctgcaactaacgattaatgttgcaaatatccgccgcaagagttataccatccttcgggacatagaacggtctgattatcaatgcagactgtaatggagcagcaaacatcataagaaaggcagtgccagatgcatggaaaggaacagaaagtttcgaattccttgcactaccagaagtgtcaggattccacgaactgaatcccaaaagtaattccgtaagaggaatagatgctgtgtgaacagcatgtgcaggtacggacatctgttttcggacagatcgaaagacgtaagtgtcacgaccacacgaaaaccacaacctggtaccaatatcttaggaagataccacctccataagatatgtaaatgccgcatgggcgtggttattcattgtacttatggggaatttggagtggcggtattgaaaagaattcaaaaatgtattcctttgtaaattactcgcacatatttagttatgtagcaaggaaaacaaaaatatcgcgggatagagcagtggtagctcaccgggttcataacccggaggtcgggggttcgaatccctctcccgctactctgtaactgatgaggattgggaatgattctcgatcttgggaatgattctcgatcggcaaaaagaatctctgtaaatgcgcagagcattagttacaaacaaaataactggtgctaggcatgtgccttcccgcttaaatcctggtcagggcaccgggagccagttataaaataatatgcgtagtgacataataattgaaatcgtacgacatatctgcaaacggaatcctacttctgaatgcaaatatgttcgattatgggtatgtctgaagagttccggatggtaagtataagtatttgttctgataatatatgtgtgtggtaggaaacagacagaaaactgaacagagaaagtgctgagagtaaggatattagcttggttcgaatccgagcctacgcactcactgatctcaatcagtaaaaacaataattcagaaaggatgtaaaccattatgttaagatcatttagttttaaaaacgaaaacacatttaagacagaacaaacatatgcggatgggtatatgtttaaaaatgatgcttacaaatatggaaaacgttcagtatattcaaataatcgagccaaaaacaagataacacaaaagcattcagactaatgaatgtatcgcgaccggacattaggagccagctgcttgtgtatcgaaattttggtgcacgagttgttaggctcctattttattggtcgcaaatatcagtgataacaatcataatatatgcatcattcgtatagaggtcattacgccggtcttccaaaccggatacgtcggttcaattccgacatggtgctctcatctgtggcggcacatacccacggtgaacaaaaacaaaatagaaacgaggattggaaataggcacttccttcctcgactgtacctgtagctcagttggtagagcaaccggcctttaaccggtaggtcgtgagttcgagtctcactaggtgcacttatgctttgttagcacaattggtagtgcgactgccttgtaagcagtaggttctgggttcgagtccctgacaaagctttcatgcctcgttagctcagatggtagagcatccggctgaagaccggtacgtcgcaagcccgaaacttgcatgaggcacttttggtacatagtcattattgtacctatttatgcttgtgtcgcctaaaggtatggcatccgcctcttaagcggaaacaattcttggttcgagtccaagtacaagcattctcggtaggtagcctagaggcgaaggcagctgacatgcaagttgtatcagccacatcagaaacatcgtaggttcgatccctaccctgccgcctaatgatcgtgtacagcaacgacaagatcattttatgaaaaaaaagttgcaaaaagctgacgaggtttccaaaaagtgagccttatagtgtatgtaaataatcaatgtgcctttgaggacaaacagcagagtcgccaccctgtcacggtggagatagcggggtcagcacccgtcggaggcgttctggttgcaaagagttttgcgatctgcagtagcaaaagtcaatcatatgttggccgcatatgatagcaacagagcgatttgtagctcaacaggatagagcgccataataattggagtatgtgggttcgaagcccgccaaatcgtttcctacaatttgaaaaaaagttgtagaaaactgacgaggtttacgaaaaatgagccttataatgtatgaacaagttatttttcataacagttaactttatctgtttctttagttcggttgccggaaagtcgagtgctgcttgacgtaatcatgtgctgactacatatgattggcaactggattagtgaaaatagaaatcatggggacatagctcagttgggagagcattcgccttgcaagcgaaaggtcgtgggttcaaatcccactggctccattcaagttataccgaggatggtggctagtttaatggttaaaacgctatggtgacatagagatgtagttcgaatctgctgttgccaaaaaggtataacttacaaatttggggagatatcccgtagaggtagcggtgcagactgtaaatctgttgacttcggtttcggttggttcgactccatctctccccactttccggctccttagtctaaaggtttatgacacggtcctttcaagactgaaatgctcggttcgaatccggcaggagtcatatttccgtacaggttgtgtgcagctttggaattgttctgtgttgcaggatatgaacaaagcgaatcgcacctcggaatacaacatattctcctatagctcagttggtagagcgtctggctgttaaccagaatgtcacaggttcgagtcctgttgggagagctcgcctgaaagcgaatctaaaaaaaaagacataaaaattaagaccattagaaatcagtttttcatatgtcattttgaaaatgtaacaaaaaataagttacaattttaaaacaaatgattatatgaaaggctacttgaaaaacataatggtctttctttttgtattccgcatttttgtttgcgcttataacgttttcattaaatttacgatgtcgctcgttgtgatcggagcttctcctaatcttttcgacatcataaaacgcgtaaacgaagacgagcaaacacaacagttgcctttgtgtctggataattcagccatacatgatcgtttgagaagatacgggttcgttcgataccgtttttgacactccataatgttaatcatgatcatccacctcgcattcgtaaacactttgtgacgttttccttgttatcttaaatatgtgttttatgttacacttttgtgacgagttttcgagattgtgagccttatcatttgtgtaacgagaaaacatatacacaaaaggagaattcaatatgaatcagtggcaggaaatatattgcaacgagtattataacggaaagaaaccaagatcaaaagctggaaagagtgaatacgaactgcttagtgtgataaagaattgtgtcgttgtagagtttccggaaaatggttctactccagctcatacggaaacctatacagtgacaccggatgaatgtgatatcccaaatgggaaaatatccgtatgtgttcttgtcagtaacctccgtttgtggttagatagaggatacaaggttagtactaagtaaggagtcagtatatgattcctttgtaattaactcacacatatttataattgagccagctcgtgaagggtgagagcttggttcctgaatgggagtaggtgttaataacacttagaatcctatgctcctgtggctggctaacaaaacaaaaaaagtataccacgcgtatactacacaaatacagaaaaccatgatattatataaacagaaagaaacaagaaaggaaagaaaaacgatgtttacagcaaataaaactaactgttcacaattgcatagtagtcgaccttggcatctcagttcgttaagtttacagagaagccttattcgtatgcctgtgcagtttgtaactggttagcgttgtaacatcataacgcatacaataacaccgtttaccactgcacacacaaaatgcactttaagtagcatttgcagtcgtaggcggtgtctttgtttccagtatatagaaactgctaaacatttagacgccgtacagacagaacacaaaaagatgttccaatgtatttggcgtctttttgattacagtcgaaacagaaaggaaacaaaaattatgcctacaatagatatgtatgcgaccggacaaaatataaagtctatggtcaagaaacagaaaataaccgtaaacaagatgcaggaagcttttggttttaatacaccacaggcaatctataaatggtaccggggtgatgcgatgccaacaattgataatttcatcatcctggcagcagtcttgaatacgacaattgataatatcatagtaacaacaactgctgcgtaaatgtagcagtgacctcggagtgtagcacaatttggcagtgcgcgtggtttgggaccatgaggttcagggttcgaatccctgtactccgactgtgtgtgtagctcaattggtggagcagtggattgtggatccacaggttgccggttcgaatccggtcatgcacctaagctaaggataaggatgaggataaggataagaggaagtttgtctcatagttgtctcatagtatctcttagtgttattcaatgtattatttcgcacctgtagcccaacggcagaggcatccggtttaagcccggttcagtgtgagttcgaatctcaccaggtgtacttatgtgtggaaatggcgaaaatggtagacgcagctggctcaaacccagttggattcaatccatccgagttcgaatctcggtttccgcatttacgccggattactcgaaaggcacagaggcgatacttaggatatcatgacgataagtttgtgggttcgaatcccacatccggtactatgtagtagtggctcaataggtacagcaacggattgctactccgtcatccgcttatgcggtctgcaggttcgattcctgtctactacgctctaaacgtccatagtttaaaggtaaaacatcagtctccaaaactgtgaactctgggttcgaatcctagtgggcgtgttcatgtgttgtttacgaacacatgtaaaaaatatgccgtgtgtccgggtggtgagggagcggtcttgaaaaccgttggtccgaaaggacttgcaggttcgaatcctgtgcacggcgtttacgctagattaattcaatggtagaaacttcgtctgatacgcgaagagtcaatggtccgattccattatctagcacttataggcgactcgtatattggttagtacatctggctctgaaccagaaaggtgaggttcgattcctcagttgcctgtttttggcgtagtagtgaaatggttaacaccgcggtctgcaacaccgttcgaggaacaactgttcttgttggttcgaatccaacctacgtctcttgttttgttcctataagttaactggatagactatgcggctacgaaccgcacaatgagagttcgaatctccctgggaacatttagactcctgtagctcaatggaaaagagcaggatccttctaaggtcttagttgtcagttcgaatctggtcaggagtattcagtttgtattcttttgaaccatatttataataatcaattcgatgagacaacgaaaggagaacttataatatgtggatcaaacgaaaagattacgacaaaatggtagtaaggattgaattcttagaaaatcagctttgtccaaacggagttcatgattttaaagaaatcgattcgtatctaactggaggaaccggaaatggagacgaacagcggattactatctgtaagtgcaccaaatgtggaaaaataaaagagatttagttgaaaataagagctgtgacatatgttgcagcttttgtttttgcttccatcctattcgatatcgcaactctgggttctaacgccgaagctttatactattgaacgttagcagttcaatagtctttgtttcgagagaacccttcgttgtctatcaagcacactccggatctttatactattgaacgttagtagttcaatagtcatggatccgtgtgcacttgatatcgcaatttcatatggttcctgacgagttttccaaattgtgaaccttattaataggagataaacgaattatcaattatatgtggttcggtatgatggaaaacgaaaatactttgaacgtaaacatatcttgaagaacacatatttaattatagttcaatacaattcaaggaggcaattggaatgagtaaaaaatatattataattacagacccagaagattcgtgttatggattgattggagaagtggttggagaagatactcgatacataagcatgatccgttatcatgttaatttcaaaggatatgataattgtatcaaagttggttatactccggaatttattaagaatcatcatcttgatacacttggtttttaccggatcatcagtaattcgaagaaattcagaatgatatcagatgatgaaattcaagaattagtttcgaagacaaacccgatacaaaagacgacggctatcgacaaggtaaaggaacttattaacaagttatctatgcttccgacagatgttgatacgatcgtcctggcacaaacatatgaggacgaagcattggagttactggatgagattgaaaaaaatgttatcgcagtttaacgaggaggcaacattacgaaataattcgtaaaagaaataaggagtcagaattatctggctccctatttttatatctgcatgtttacacgtaaacgaaggtttgtcatatgttgcagcattttcttgtattcttcacaaccatatttaagacaacaaatgaaaaaaataaagaagggagagtacgtatgttagattgtaaaaatcaatcatttccagcagttttgaatcaattaccacacagggtgaaactaaacaagaaagcaaaaatttcagagcagaagaagtttttagcaaaagaagcgggaattttaggtcttggaggaagtatccggacaatatatgcggacaaaacaacgattgcaaaattatatgaaatcgcaactcattttcagatcaggattctcaaatcgctaaacacatctttggatgaagaagaaatgtctttcattttgaatccggaaaataccgttgcattttgtgattattgtaaatatcttggatttgatttctcaattgatgatgaaaacaggaaaccgtatgaaacaccaaatctttgcgaattatacaaagactttggtcctgttagttggattgttgtgaattatttgaaaactaacatatcgcggagtcaagtaaaatccgcatttggaattgctgttcattgtggaacacgtcgtgagtatgaaaaatatattcatgataactcaaatgatgacacggttattacggattgtgttgatggttatctgcaatatactggctatacaatattaggattcgaacctagtaaaacagctattgatttcctgctgaattccgcagttcctgatcgagataaagctcatgtatcagatctggcacaaagcagtacacaagatatgtta

SEQ ID NO: 3882 - DNA, 22997 bp, synthetic construct
  source 1..22997: mol_type = other DNA
  misc_feature 1..22997: note = Synthetic
tactttagatacaggggatatggcattagtaaaccgctatatcccgacacgttcctccgtatccattttaaaacagtatctgacaaatattgtgcggggacagggcgaacatgcaacaatactgattggtccttatggaaaaggaaaatcgcatcttttgctggtgttgctggcattactgtgtaaaagcaaagacgagacagcagaaatacagaaaaaaatcatagaagccgacaattcaacaaagttgctttttatggagcttgccgaagtgggaagaccgtttttgccggtgatcgtctcttcttttcagggagatttaaacgaatcatttatttttgcattacaggaggcattaaaaaagaccggtatcagagatctgccgcttccgagtgagtacagtgaagccgtccgtacgatggagagttggaaggaatcctatcccgacacctatcagcggtttgaaaaaatgttagaagagagaggatgtaccgcctctttatttaaggaacgtttaaaaaaacaaaaagaagctgcactcttagaattcaaagaattttacccggtactgacatccggaagtgttttcaatccaatggtgcaaaaagaagcacttcgggtctatgaagaggtcaaccgtgtgctttgtgcaaagtacggatatgccggcatttatatcatctttgatgaattcagtaagtatatagaaggacatgaagcaaagaattttgcaaaggatatgaagattttgcaggatatgtgcgaattggcagacagccggaaagaagagcagatgtatctgacctttgtggcgcataagagtatccatgagtatgtcaaaagtattgattcggaaatgatccaggcgttccgcggggtagaagggcggctgaaagagatacggtttgtagtttcttcccagaacaattatgaactgatcgagcatgcactgcataaaaaagagggattttatactccggaaatacaggaaagggcagaagagtcttatcagcttgcctgtttttcacatctttttgaaaaagaggattttaatcagatcgtggcaaaaggctgctatccgctgactccggtatgtgcatatgcactgctgaatatcagtgaaaaaatcggacagaacgaaagaacggtttttacatttttagcgggaaacgaaccgggcagtctgaaccgcattatggagggcaggaacagagaaaatctgatcggtgtagaatatgtctatgattatttcaaaaatctgtttcgggagactgtggatgagacctatatccataacgaatggttaaaagcagagtatgctttaacgaaagcggatacggagattgaaaaaaggatcattaaggcaatggcgatcatccgtatgatacgccgcccggaagagttagcggtactgaataagccgatctgtctggcgttgaatatcgaaaaagaagagtgtgacaaggcaatgcgtgagctgatgaaaaaagaggtggtctttttccgctcaagtcttggtacctatgcatttaagaacaatatcggtattaatatcgaggaggcgattgaaaaagaaatccggcggctgcgtcatagcatcaatacctgtaaagtgttaaacgagatttccgaactgacctatgccgttccaaaacagtacaatcaggaccgtgcaatgacaagatatttccgatatgaattcattgaatatgaagacttcctttccattggcagtgcaaaggtctttttcgagcaccgtttttccgatggatatatcttagcgatcgtgacagcagacaaggtagaaaaggaaaaagtgctgcgtcatctgagggaattaggagatgaacgtattatcgtattactgccgaaagaagagtttgtatcggagtgggcgcttttgcgtcttgcagcagtcagaagccttgcacaggatgagcattttattgaagaaaataaagcactccgtcaggaattagacctctatgaggaagatatccgatatgaagtgaacgagagattaaaaagagattttatgccggaaaacggtggctgttatgtacttcatacaagcaggaaagagccgcatatccggaccggaatggaatttaaccggtatttaagccagatctgtgaagactactattcgttagcaccaaggatcaaccatgagcttttgaatatccagaatgtgcagggacagtacttaaaggcaagaaatgatgtggtaagagccattttagatggaaaagatttagaggaatatgagcggggcagcagtcctcaggcaatggtgtatcgtgcggcatttcttcggacaggacttgccggagaagatttcccgttagacggcggctgtcgaaagatcatggaggagatcgaggacttttttgtgaaagcaagtggaaagcgggtatcttttcagatgctctatgaacgcttgcagggcaaagattatggagtgcgaaaaggtgtgcttccgctgtttcttgcgtggaaattttatctgctagaaggcatgccggtgctgtaccttggaaataaggaactgctgatcacggtagaagtgctgaacaatatcaaccagtttccggaaagctatgatctttatatagaaaagaaagatatggaaaaagagctttatttacaggaaatggaggatatcttttgtgatgcgcagacggaaaagatcatacgttccaaccgactttccgtcattatggaaaatatgcagaaatggtaccgttccttgccgcagtatacaagggtcagtgagcgttatccgcaggaactgctcgatgccgtcagaaatttcagaagattgttaaagcagaccgagttaaatccgagagagttcctgtttgaacagcttccgaatgccatgaatgcttcaaaggatcggatgacaggatgtttggtacaagaaatgaagcagagtatggatacgcattttgaaaatgcgatagaagatacggcaaaggagatcaaaaaaatatttggtgcaaaagaaagcgacagtctcaaggcctgtctgcaggactggtatggcagacagcaaaaccgttccaaacgctatgtattgaacaaaaagattaagagctttatggaatatgtgggagagctgaacaccaacgatgagcgggagattgttgccgtattatccaaacgtctggaagatatctatattgaggactggaatgacagattacaggaaaaatttctgcgtgacattacaaagatacgccagaagacagaggcggcaaaggaagatgccggtttagaaaacggacaaaaagagattttcctaaagacggcggatggagcggagatccacaaatattatgatgcggacgtaaaagacagcaccagtgaatttttgaaaaatatgatcgaagaggcactggataattttggcgacagcttagagacgaatcagaaggttgctgttttagcggaggcgttagaaaaactattacagtagaggaaacatcatggaagaatacatttatctggacaatgcagcgacaacctttccgaaaccggaggcggtgtatcaggcattagaccgggcaaaccggaatgcagcagtcaatgccgggcgtggcagttatgcattggcagaacaggcaaaacagttaatagaagataccagagagctgcttctgaccattgcaaaggcaaaaccggaagcgaaggtcgtatttacaccttctgctacctttgcatgcaaccagattttcggtggactgccatggagcaaagaggatgttgtttatgtttcgccttacgaacataatgccgtcatgcgtaccctgcattttttacagaaacgctatggttttgaaatagaggaattgtcggtggatgcaaagacgttagaacccgacttagaaaagattcgttatcagtttattcaaaagccgccgacggttcttgccatgacccatgtgagcaacgtaacaggatatattcttcctattgaagagattgcagctttggcagatgcggcaaagaccaccgtaatcgtagatggttcccaggcattgggacttgtgcctgtctgtctggaaaaaagcggcattgactactatatttttgcaggtcataagacactttacggaccatttggtgtgggcggatatatcgcacaatccgcaggaaaagcggaaaaattaggacttgtgattgcaggaggaaccggaagtaattcgctgaatttagagatgccacagcttcttcccgaccgttatgagccggggagtccgaatgtaccggcaatagcagggttaaaggcagccatagaagagcttggaaatcattatgaagagatgaagcagagtatggaaacgcattatcacggagaacttgaacttttggaaatgttagagacagagcttcaaaaaatacagggaatccatacttattttccacaggataaggaaaaaaggagcggcatctgttcctttacgatcgaaggatattcttcggatgatgtaggaatgttgctcgatgaagattatcatatcgcagtccggtgcggctatcactgtgcaccgctgatccataaatacttaaaggatgaaccatacgggggaacggtgcgtgtgggcatcggacagtttaatacaaaagaagacatcaggcaactcatacacgcagtggaagaaatcgcaagggggtaacaaaagtgaacgacgatttaaaacgggtaaatttaagagacattgtagacaggatttcggagaatacgatcgtactgccggattttcagagaggttttacatggaaggaaaacaatcggcagaaagcgctgttagcatctgtcctgactaagctgcccataggaacggtcttatttttaaatgtaaaaacagaggactatggatacaagaaaataggaaagaatgaaagaaacattgacaatttagagggaaagcaggaagtaaaggcactgttagacggtcagcagaggatcacggtcttaacggcattcctttctacgaaacttcaaagagaaaatattgacgatctcgtatcaccgacactggagcggcggtatttcttgaatcttccaagttttcaaagtgtgatagatagcaaaaaagaagatctttttggtggaacgatcttaagttttccaaattcttttcggggaaattatccggaaatttccagtgaggagatgaaggaacggatcacttttgttcacgatcgaaagaaagcatttttatatgaaaaagcagaaacgaaggatacccgcgaaattcgtgaatattgcagaaatatcgacaacagtgaagatggtgatgcttatctgctgccgttgttctatctgctggatgcctgtgaaccggggtcatcgggtgcggttattcttgaggatgtagtcaaagaaatcggggcagagtatgagaaatccattagatcatggcttcaggcagaggaatatccaatagaagaaaaggaacagtatttagaaaaattcggacttgaagatgcacaaagagaggctgttttagaagagatcaaggcaggaacactttttatatcaaaagaagaaagagaagataatttttctgaccgtttaaaggaacggaaaatgcagtggggaatgcatctttgtgaatatctgagaaaatgtatcgaggatatccggctttatgagattgcaatttccgttaatgacaagaagcgcgccattgatatttatgaaaatctgaacctgggaggaaaatccttaagtgtctttgatctgatcttagcaaaggcatccagacatacgcaggagaagggaaatctctttacacagatcgtagatgacatagagcgtgaccacagggaggaatatacctcatttgtagaaaaatgctcaacgggtcagaagaacagttataaaaatcacattgcagacagcgacaaaccatattcggcagtgggacggatcggctgctgggataaatctcaaaaagagctttctgctacctatataaaggcattgatgaacctcttgggtattattgactatttttcagaaggagatccgggatttagtctgcgtgatgctgagaagatccaaaacctgaacgtgaaagtcacaaaaagagaatatctgttgcagattccatcagaaaaaatatacggttatgtggaggtggcatgtcagggcttagaccgcgcagccttatttttacagatgcggtgtggaatccgaaagcttggtgaaatacattacaatctgatgtgggttatcttaggaacggtatttttagatgaagcatggtttgaggacagtgaagtcttagattatatggaagtctggtattggagtgcgattttatcgggagagttcaagatagagcagaaccgggcatttatccggaatcttcagaatgttttatcagagattcaaaacatcaaagaatctgataagaaattcacaaaagccctttgcaataacgtactgacagataaaaaatttgcagaccgtgacattgttttaatgaaaaatccatccgtatatccggaggaggtaattgggaataccatctgtcaattttatttatcagagacatattcggatattttaaaaccgcttccggagaaaaacgactatcagccacaaacactgagtgcattaaacaattccgtgaagctgcaaaaacatcacattatgccgatcggaagtcttagcgtaaagtataaggatgccaataaaacgacagaaagccggagaaaagacaacagcagtccgtataattcaccgttgaatttcctgctgatatcggaaaaagcgaatgggctgatccaaaacagtacactgaaggaatactttgaattttgcgatcagaccgcattaaataatgtagacatcaaagaccatacatttaccgatatgtcaaagcaggaaatcgggtaccggatcggtgatgaagcattgcagctttttttggaaaaaagatatgatgattttaagagccgtattacgtcgaagtgtcggaatttattgaattgttcagacatttgctgcggagagggaggaaactgatatggaaaagaatcgggacagcatgatgcagacattgaagtttgaagttttgcatatggaaaagaagaatctgcgaagcaaggcaaagacagatcagcggatgtcagaggaattgcagaaaatcatcaaggaatatgcaagagggataacggaatagggggacaggtatatgaagtttgaaagtattaccatggaaaatttcatgcggtataagggaaggaatcatatagaatttagctgtgatgatgtaaaaaatgtaacggtagttttaggagacaatacggttggaaaaacgacgatagcgcaggcattccgctggggactgtatggtgcgttaatggcaaacgggacaaaaagtgccggagattttcagcttttaaatacggatatcttagaaatgatggatgcaaacagccgtgcgaaggtaaaagtagagattgcagcagttgacgaagaaaaacgttatatcatcacaagagagacaacctataccagagcatttccaaagttagagagccgggagttccaaaagaaatgtgcgatgcggattaccgagttagaggacatggaaagttatgtcgaggtaagcagcaacgagatagagacattgatcaatgaactgtttccaaagaacttgtcccactattttttgtttgatggagaacgctggaatgatgtcagtgtaggaggtgtccgggaaaatatcaaagaatcggtacatattttaacgggattatctgcatatcgcgaggcgaagaaccatttaaaagatatgggaagcaattccgttatcaaaaaattccgttcagagatcaagggatcgggtgcagtctatgataatttagaagcagaacgaaaaaaattagagcgtgatatcgaaaagctccgggatgagattgaggtattggaagtcaatatccggaattatgagaaaaagaatgaagatatcgaacgtttcttagcagaaaaccacaatacggaagaattgcaaaggaaaaagaagcatttagagttattgtgtgagtcccagagaaagcaaagtctttattcttacaagacattggtaaatgccatcagcgataaagcctatatggtatttgcccggtcaatgctccgtgcaagtatggaactattaaaaagtgcgaaaatggaacgacgtgatatcccacatatgcgtcaggcaacaatagattacatcattaagaacaaacggtgtatctgcggtcatgagattaaaaaagacagcagtgagtattttgcactgatggagcagcgaaattatctgccgccggcagatgtcggttccataataggggactttgagagaactgcaaaccgctggtaccgcaaaggtgatgagctgttagaagagattgatgattatgcaaaagaagtagacgagaatgtccgggaatatcatgattcctgtaaccgttatgaaaaactgcaaaagcagttagatgaacatattgattttgcagagaaaaggaagacacagcgtttctataaatcggagatccagcgtttttctaaggaaaagggagaaaaagaaggacggatcgaagcctgtaaaaagagaatagaaaccacagaaaaagagatgcaaagcctagaagcaagaaatgagaggaatcggatctggcggcaacgcttagagatagcagaggaattgtaccggcagctggataaagaattttctgagcaggaaaataagatttttctggagttaaaccggcagatacaggagaatttcagcaaaatgtttaacgcaaaggataaaaagattgaactgacaccgaagtatgagattcagatgctttaccgtacgcagcagggatatcgggaagagaaaaatctgtccgaaggcgagaaaatagcaaggaactttgcgtttattgtaacgatcatggatttcagcagaagaaagaaacaggaaaagaccgggcatgagacagcagacagtgacacccttccgatcgtattggacggaccgttttctaagctgggagatgaaaatatcgaattgatcgcaaaggtgctgccacaggtttcggaacaggtcattatctttatgttgaaaaaagactgggagtatacaaagttagatccttacgttggaagcagatattacattgataaaaaaccggaagaatcatttgcaacgatcaaaccggcaggggaggagacagtttaatggaaaattataaattttttaacgacccttataaattttcaggtaagcatgcccgtatggtaagcgaactatggtcattaaatgactatgaacatagttattttaagcgattgatagatatctatatcgtagccgcgattctgggattcagaattgacagaaaagccaaaagagattatgcaccggtagaacagagaaccgtatttggggagcagatgagacaagcatcagaagatttggagttcatcctgcagatgatgctgttattagagccggcagggcagggaatccatgaagagtgtatccggcgggcgtttaaaggtgttgaaacagaagaagagttcaaacgctataatgaactgtttgaatcttatatgcttggtggagtagaagaactgtatgaaagactggtacttcaaaaagaagaaatagatacagactacagtgatgataagacggcaaatctgatgatgttatttgaacggtttgctccgaagaaaaatttctaaaatttttataaaatctcagaattgcttaaaaaataagtttacaaaatatgggaaaaaaggtataataaaaaatatattatactataccaagaaataatcggttattacagtaagagtaaaaaaccaaaaagccctaatcccattcttcggaatgggattatcttttatatggattttataggaatagtaaaaaagacaaatttttagtacacaaaatgttccgcacaggcggttctgggaggagaaaaatttatgggagaaatgagtaagacaaacatggacaggcacaggagttaccggatcggactggatatcggtattgcatctgtaggatgggcagtacttgaaaataacagtcaggatgaaccaatccgtattctggatttgggagttcgtatttttgaggcagcagaggttccaaaaacaggagctgcattagcggcagaacgaagagatgccagaactgccagaagaaggatccgcagaagacgtcatcgtttagaaaggattaagtggctgtttgaaaaagaaggactgatccaaatagattcttttatggaaaggtatcattcaccgaatctgccggatgtctatggacttcgttatgaaggtttagaacggaagctgagcaatgaggaatttgcacaggtactgttacatattgcaaaacatcgtggtttccgttccacaagaaaggcggagttaaaagaaggggacaatggaaaagtcttaaaagcaacagaagagaaccgcaaacgtatggaagagcatggctaccgtaccgttggcgaaatgatatataaagatgcctattttcatactgagtgtgcgtgggcagacaatggatatctgttaacacctagaaataaagcagatgattattcccacacaatgctccgggcgctgttagaagaggaggttcatatcctttttgacagtcagaggaagtttggaaatgaaaaggcgactgaaacattagagcaggaatatttagaaattatgttgtcacagcgttcttttgatatgggaccgggacagcaggcagacggaacgccgagtccttatgcaatggagggatttggaaataaggtcggatactgtacattagaaagagaatccggcgaacgtcgtgcggcaaaagcaacctatacggcagagttatttgttgcactgcagaagatcacacatatgaaattggtacatatggatggtacatccagattttttacggaagaggagcggaacattttattagaaatgctttcgtccaaaaaagagattaaatatgcagcagtccgtaaaaagctgaatctgccgttagaagaaaagttcaatacattgaattataatatgaagcgtaaaggaaaagacaataaagaggaagaaattgatgaagctgccataattgctgcaacggaaaaggcaacttttatcagtatgtccaattgttatgaataccgcaaaagaatcggagaatatttagagaccctgccggaagaagaacaacaggatctattagatgaaattggaacgattctgacctgttataagaacgatgacagccgtatgaaccgtttgacggaggcaggtctgtcgaaggaactggcggattctttgctagagctgacacctgcgaagttccagcacctttctataaaagcaatgaaaaaaatcatgccttatatgaaagaaggtatggtatatgataaagcatgtgaagcagcgggctatgattttaaaaatgataatcatggaaagaaaatgaagctgctaaaaggcgaaaatattacagaaaccattaatgagattacgaacccggttgtaaagcgttccgtttcgcaaacggtaaaagtcatcaatgcgatcattttaaaatacggaagtccacaggcggtaagtattgagcttgcccgcgaaatgtctaagaattttgaagagcgaaaaaaagcagagaaacagatagaggaaaaccgtaaaaagaatgaaatggcaaaaaaggaaatccaggaactgggcaaactttcgccgaacggtcaggatattttgaagtatcggttatggcatgatcagcagggaatatgtctttataccggtaaaaagataccgttagaagaactgttccagccgggatatgatattgatcacattcttccttatagtatcacctttgatgacagctatcggaataaggtgcttgttacttcacaggcaaaccgtgagaaaggaaaccgcaccccatatgagtattttggtcaggatgaggtccgttggagtgcctatgaagcaagagttaatcattttatcaaggactataagaagcgtcgcaatttgttaaaacagggatttacaaaagaagaccgcagggaattcaaagagcgtaatttaaatgatacaaagtatattacacgcgtgatctataatatgatccgtcagaatttagagatggagcctttgaatcgggaagacaggaagaaacaggtctttgctgtcaatggttccataacagcttatttaagaaaaagatggggactgatgcaaaaagaccgttctaccgacacgcatcatgcaatggatgctgtagtagtagcctgttgtacagatggtatgattcaaaaaatttccagaagtacacagtatcgtgagatcttatacaaaggacagagtcacccggattatgagattgtggatgtggagaccggcgaaatcatttctttagaagacctttcaagagaagagtgggacgagcgttacggagcacaggtaccgccgccatgggaacattttaaggaagagttagaagttcgtatgggaagtgatccgaagaatgatctggatacacatccggatatgtaccagttgttccgttatccggaagatgtatataacaatatccggccgatctttgtgtcaaggatgccaaatcacaaggtgaccggcgcagcacatgcagatacgatacgaagtccgagacattataatgatggcggtgaaatctttgatgacagtggttatgtattgtcacggacaaacattgaagatttaaagctggataaagatggtgaaattaaagactactacaataaagacagtgacaggctgctatatgaagcattaaaggcacgattagtagaatatgagggtgatggaaaaaaggcatttgccgaagagttttataagccaaaagcagatggtacacagggtcctattgtaaaaaaagtgaaaacctataaaaaatgtctcttggtgtagaaatcaataaggatgaagccggagttggacgcggaattgccgaaaatgcaaatggcggtatgattcgtgtggacgttttccgggaaaatggaaagtattattttgttccaatctacattgcggatgcattgaagaagagattgcccaataaagcatcagtggcaaataaaccatatagtgaatggaaagagatgaaggatgagaactttttgtttagtctgtattcgagggatttgatagggtttaagaatccaaaaggtaagaaagcaaagtgtaaggatggaaaggaaattgtattgacaaatgaaatagtatactatgtcggtgcaaatataaatacagcgagtatttcttgtaaggcgcatgataatcaatatgagtttggaagttttgggattcaatctctacaagaactaaagaaatatcaggtggatgttcttggaaatgtaacagaagttcgtcaggaaaagagaagagggtttcagtaaatgggataccggaatataaaaattgaaacatcccagcagctaaacattaaaaatagtcagcttttgataggttcatccggtgaagtgcagattcctttagaggatatcaacagtattctcatagaaagtcagtcggtgacgctgtccagttattttttgcagaaaatggcagaaatggggattgcagtgtatgtttgcgatgagaagcatttgccaaatgcagtgcttctccctatggtacgccatagccgtcattttaaactgttaaaatgccagatgaatcttggaaagccaaaacaaaaaaggctttggcagcagattgtgatcaggaaaattgaaaatcaatcagcctgtcttagattcttaaatttagagggtgccgaagagcttttaaaaatgtcaaaacaggtacaatccggtgataaaacaaatgttgaagcaaaggcagcagctttttattttcgcaggttatatggtttgggattttccagaggtgatgatcatatcattaactcagcgttaaattacggatatgcaattgtgcgtggaatgattgcgcgttctatcatttgttatggattagagccttctttgggattatttcatagtagcgaattaaatagttataacttagcagatgattttattgaggtatttcgtccggttgtagatttgcatgtttccggtcgttttgacatatcagaggttaatcgggcattaacgcctgaaataaaaagagaattatatggaatagtaaattatgatatgttagtaagaggagagaagcatatactgagtaattgcattgacaaagtagttgcaagttatagcagtgcattgcagggaaaccgagaagaattggaacttccggttttaatggagttacaggtacatcgttatgagtaagtttatgagaatgattgtgttttttgatttgccggttggaacggcaagagaacgaaaagcggcaacaaagtttcgcaattttttaattaaagatggataccatatggtgcaatattcggtatactccagaatctgcaatggaaatgatgcagttgaaatgcatgaaacacggctaaaacagcatctaccgtcaagaggctctatacgattattaactattacagaaaagcaatacgaatctattcatattttgttgggagaagctgtctttgacgatacaagcgaagcgacagaactgattaatattttttaaaagatagaaattttttgaaaaaatagtaaaaatatgagttttttaaaagagaaaccccgcataatccctatggttatgcggggttgttgctgtcctattataccataccaagaaataatagggaactacagccaatcttttcaattagattaaagttatcagattataccataccaagaaataatagggaactatagctgtcaagggtggtatgggatattggaatcattatccataccccaaaataaaaaaataccgttgcttagaattatataaattgtataatacactattttatccaactatacctgcggtataaataattaaaattgcaaaaattcacaagcatttacttgaaaatcatttcacagctcgctttcagaaaagtcccacaccaccatttacaaaaactttccctagattttacaagcatctgatagcaacaaaaaacatgaatttgctacattagaaataagaataaaagacagatgtgaaatggagagcagaatgaagggaaaaaagacactggtatgggcacaccggggagccagcaaatatgcaccggaaaatacactgccggcattccaaaaggcaatagaaatgggagcagatggaatcgagctggatgttcagatgacaaaagacaaccaatgtgtagtcattcatgatgaaacgataaaacgtgtcagcaatggaaatgttcaagtcaaagacagtaccgtagaagaattgcgggaatttgattttggcaaaggatttacggaatacggaaaagtgcagataccgacactggaagaggtactgcagctggtagtaccatccggtctgaccatcaatatagaattaaaaacaggaaagatctgttataaaaatatagtggatgaagtgctgcggctggtctatcagtatggatatcaggaaaaagtgatcttatcctctttcaaccactacaccttgcaggaggtccgtaaaaaagataagcacattcagacaggacttctctatcgggacgggattgtcaatgtatgtgaatatgcctatcgggaaataggaacgaatgcgttgcacccggcgctgtataataccggatatgaggaattttatcagcaggcggaaaagttttgtcagaaaatacatgtgtggacggtagataaagaatcggatatcagagaaatgtgccgcaatcaggtagatgcaatcattacaaacgatccggtgctggcaagaaaaacagtggatgaatacgagaatggtagtctggttccggagctggtaaagaagatgaaaaagttataaaaaagaaagaaaaacgcccattggtttttagaaaattcaaaaatcaatgggttatttttaaatacgacaaaaatatgccagaaaaatataaaaaaagaattaaaagaattgaaaagatagaacaaaatgatataattaaaacaatagtcagaaccatagggggaaaactataatgtttctgaaaggaagggagaaggcatatggtacagtacttaaagaaaatttttagaacagaaaagatcaaaaagaaaattatgacatcgtttattgttgtcatcgtattgatgtcaataggaacaacattgggggcaattacgttgttctatacgacaaggcagtataatgcagcattggaaaactatggatttgcacagggcgatatcggaaaagcaatgatttccttcgcagacatgcgaagtgcgaccagagctgccatcggagaagatgatacagaactgatagcagagagtgtgaaagagcatgatgctcaggcggaagaatgttctaaaaacatgaaagtcatcaaagaatgtttaagttcaaaagaagaaaaagcaatttataaaaaaatagaaacgaccatgagagaatattacacaatagaagcagaagtgcttgagcttggaactacgaaagatctgagcaaaagtgtgcaggcacagaaaatggcagcagagaaattagaccctgcttatgatcaagtgtatgacaatatgaaagatttattagaccttaaggaaaaagaaggtaatgccttaaagagtttattgttaaaagcaatcaatatcgcagtgatcatattaattgttgtattaatcatcagtatcagcatttctaatgttttagcaagaaccgtatcaaacgcgatcgcaacaccattgcaggagcttgcagagcggctgaaagcatttgcaaaaggagatttaagcagcgagttcccggttattgatacacaggatgaggttgcggatattgaaaacgttgctcgtgagatggcgcagaatctggacgtgatcatcgaagacatcaaatattgtatgggtgaaatgggaaatggtaactataccgtaagaaccagtgcagaagaaaagtatacaggagattttgaggcacttttattatccattcgtcagatgcatagaaatatgaacgataccttacaccagatagatgattcttccattcaggtacttgcaggttccgagaatttagcacaggcggcacagaatcttgcagaaggtgcaacggaacaggcgggagcagtggaagaattgttagcaacttttagtgatattacatccggcgtggaaaagacggtgcagcatgtaggcgacgcaggaagcatgtcacgccagtatgcggaagatgcgaaaaagagcagtgaagaaatgaaagacatgatggcggtcatggcacatatgagtgagacatcacaaaaaattggcagcatcatagatgagatagaagagatcgcatcccagacaaacctgctttcactgaatgcaagtattgaggcagcaagagcaggcgaagcaggaaaaggctttgcggttgtagcgagccagatcggaaaacttgcagacgagagcgctcagtcagcagtcaacaccagaaatatgatcatgaccgtcattaatgaggtagagagcggaacaaatacggcacaaagaacagcagagacactggaagaagtagtacagggagtcggacagattgcagacgtaacagaagaggcagaagagctggcaaagactcaggcagaagcaatgcggcaggcagaagcggcattgaatcagatatccgaggtcgtacagtcgaactcagcaacagcagaagaatcctcagcaacaagcgaagagctttccgcacagtccgaaggactgaaagatttagttggtaagttccagctggatgcagtataaagacaaaaaacagaataatagaaaaaaggagagtttttttaaaaagccccttaagaaaatccaaatacatccgataacttatataagaaaccagtaaaaaaggtttttgcacctgattttcaaggaagaaaggagatgccgttatgcgtatagatgcatataatcagatagcacaactgtatcaaactggaaaaagcatcagaacgaacaaggcaaatagcaccgcttctgttcgcgatgaggtacagatttcccagacagctcgtgattatcagatcgcaaaacaggcagttgcaggggcttcagatgttagggaagataaggtggcacagctaaaagcaagtatgagttctggtaattacagcgtagaaacggatagcttcgcaaataagttattagagaaatacaaggctgcaatgatgtaagtgaggacagaaattggctagtttgatgaacgaacttttggaagttctggaaaatgaagaagcgggttaccgcgaattggtagaggcatccaccagaaaaaaggaagtcattattaaagcggatatcagagctttggaagaaattactgcagaggaacaggagattgccggaaagatcaagaacattgagaataagcgaatttccattatggaagatattgccaatgttttaaatcgtaagccggaggacttaacggtagatgccctgttagaaatattagcgaatcagccaaaggagcaggaacaattagccaagatccgcttacagttaaaagataccctgacagaaatgaagaatatcaatgaacagaatcagacattagtgaaccaggcaatggaactggtggagtttgatatggcattgttaaagagcatgagacaggctcctgaaactgccaactataacagacaggcatacaataccggagagcttttaggaagtggcggttttgatgcgaaacagtaagatggcaggaggaacatgtaatggcaaacggaatgggtacgctatacatagcatcatctggactgcgtaacagccagaatgcgttgaatacaactgcgaataatcttgctaacgtagatacggaagggtatgtacgtcagcaagttttattttcagacaaagaatataatacatttggtacggctgcagtcagtaagcagcaggcaggtcttggccttgacattggcgacgtggttcatgccagagattattttttagataaggcatatcgtgcagagtccggaagacaggcattttatgaatcctgttttaccgcagtagacgagatacagacctattttcaggaaatggaaggaaagaccttccagtcggcattggaagatttcaaaaaagcatttcaggaacttgcaaaagatccgtcagattccgtaagacagaatctggttgttcagaaagcaggtttattcctgtcgcgctcccaaagtgtatatgaaggtttgaaatcctatcagtccaatatcaatacaaaggtatcccaggatatagacaaaataaataaacttggtcacaagatacatgaattaaaccaacagatcagtaagatagaagccggcggtatagaaacggcaatggatctgcgtgatgaaagagatttagcgcttgatcagttaggagcgcttgcgaagatttcatataaagaagattacaagggcgttgtaacggtaaagttagaggatgaatactttgtcgatgaacttcacacatatgaaatcggtaaaaagacagataaactgacaggctttatcacaccatattggccacaactttcagataccgacagggatatctatgtgaacgtgtttgacttcaatgtagacatcagtacagcattaaacagtgatgttggagaattaaaggcactgatcatgtcaagaggtgaccattgggcagactattcagatattgaaggaaaaggcgagcaggagtatctggatacaacgaacctttccgttattattgatatgcaggcaaagttagaccagatggttcataacatgatcacagcgatcaacgatcagctttgcccgaatgtgacaggtccggtcggcgttacctatcaggatgccaacggcaataccgtaaacctcagtgatgcaaaagtacttgatacagagaactgtgcaaggggaagtgatggagaacttccaccgcgtgaactgtttgtcagagcagggatcgagcgctatacagaagtgaccggaagtgatggtaaaacctattatgtatataatgaagaggataccagtgatacttcctatatgtatagtttaacgagctgcggagtaaatgaagagctgaaaaaaatcgaaacgttattccctcatttgaaacagaacggagaagtagaccagcagcttggagaaaggttagaggcactttggaataaggacttagtcggacttgatccgacagatccggatgaatgtaacatagaagaatactatcagaaaatgataggaggtcttgcaacggtaggaaatgtttaccagaagaaagcagaaaaccttgcaggaagtgttctgacaatagaaaataaccgtcagcaggtcatcggagtgtcttctgatgaggagcttcagaacatgataaaattccagaatgcatacaatgcatccagtcgttttatgacagtgatcagtgacatgatagaacatatcgttaccagattaggaaatggttaaggagggataagaaatgccatctacattttatggattgaccattgcgggttcgggattaaattcctttcagactgcagtgaatacaaccgcaaataatatcgcaaatgtgcagacggaaggatatacccgtcaggtagcaaatcgtaaacaggcagaatctctccgtgtatatgcacgatatggaacaaccggaagtggtgttaccacaacttccataacacagatcagagatgcttattacgatgtgaaatattgggaaaataattccagccttggtctgtatgagaaaaagttatattacatgaaccagatagaggaatattttaaagatgatgacagctcgaaaggttttacaacgattttaaacagtatgtttaataatttagagtctcttgcaggtgcaccgggagatttagacagaagaaaaacctttatcagcagttgccaggattttgcaacctacttcaacagtgtatccatcggattgaatcagattcagaccgatgcaaacttagaagtgaggagcacagtggataatatcaatgcgatcgcacaaaaaatcgcactcctgaacaatcagatcaatgtgatcgagatgcagggtggtcatgcaaatgagttgcgcgatgaacgtgcactgttgatcgatgagttgtccaatatcgttcctacggaaacgcaggaaacagaagtaatgaacaccaatgacgagtattatacaggttgtaccgaattcagagtaaagatcaacggacagcttttagtagacaccagagaataccgtacactggaatgtaagacaagagatacaaaagtaaatcagtcagatgtggatgggctttatgatattgtctggtcagataccggcaatacctttaacgcaacatcaaagtacatgtcaggaaccttgaaagcactgttagatacgcgtgacggaaataacgaggagaactttaagggaaccgtggactacctctatggaacgaagctggtgattacgaacacgacacagaacagcgtggaaaaaatgaccatggcagaagaaggagtcatcacgatcgataataagaaatttgaatacagcaactttaccgtagactatgatgcggcaggcaatgcaacctatacctttgcattaaaagagccggcaggtgacggagcggatctgcttgcaggacatcaggcacagatcggaaccagcattgatgcaatgggagttccgtattatcaggcacagatgaatgagtttttaagagcattctgtatgaagtttaacgatatagagatgcagggacaggatttgaatggagatcctatgaaagcattctttgtggcaagagatctggttacaggagagcaggaagatttaaataaatccgatacctatacacagatcacatctgcaatgtccagttattataagctgacggcgggaagttttgaagtggcaaaagcaagtgtgaaagatccaaacatcttcagtaccacagcagatattgtcaatggaccggataaggcagaaatattagaactgttaaagccattaaaagaacaggaaaaattatatcgtggaagtggtgcaaacggatttttgcagtgtatgttatcagatatcagtgtagataccaatgaagcaaaactgttttatgagaaccacaaaaatatctcacacacgattacaaaccagagattatccatttcaggtgtagatgaagatgatgaagcgcttgatctggtaaaattccagaatgcatacaatttagcatcaaaaatgatctctaccatggcagaaatgtacgatcagttaatattaaatacagcagtataagggggcagacagaatgcgtattacaaacagtatgataagaaataatacatccaataacatgagtacgaataaaggttatgtggataccttgaatacacagatgtcaacacagaaaaagattgaccgtccatcggatgacccggttattgcgatccgtgcattgcgtctccgcagcagtttgagcgagataaaccagtattatgagaaaaatataccggatgcagaatcatggcttgaggtaacagagacagcattaaaaaatatggaaagcatcctgaccgatgtatacagacagtgtgtcaatggtgcgacagatcatttgaacgaatcggacagaaatacgattttaaccaatctgcagaaacttcgtgagcaggtatatgccgagggaaatgccgattatgcgggaagaaccgtttttaccggatataagacaaataaatcccttacatttggcgaggatacatcagacaccagttataatattacccagaagctgaaatttgaagatattacccagaagacatattattccggattgtcttccgttccga

SEQ ID NO: 3883 - DNA, 22913 bp, synthetic construct
  misc_feature 1..22913: note = Synthetic
  source 1..22913: mol_type = other DNA
tgggaaaaaggattgaccggggaaatgatcgtaaaaaattattacgaaagataaagacatataggagttgccggaatggaacaatggagaaacttaatacatatcaaccgtaatttccaaaaagcagtcaatttgcagcttgatataggagatcatggaagaattgaacattatataccgacacggtcatccatgttgatattgcgcagatatttaaaagctgtgacgggagaggcaaaagaacatgcaactgttttaatcggtccgtatggaaagggaaaatcccatttattactggtattgctttcaattctttcctgtgacctgccacagagtgtttttgaaaaaataaagatcacagatccggagtcagcggatttagtcacgcagatccggaaggagaataaaaaatatttaccggtattggtttcttctgtaccggggttttccatgaatcagattttattattcgcactgcgcgaggcattagagaaaaatggtttgtcggatattgcaccggagactgcattcacagaagcacttagaatccttgaaaagtgggaaaaggaatattcggatgtgtatgccagattttgtgagtatctgacggaacatcagacagatgtgcaggatttgaaaaagaatctgaaaagaaaacataaacagtcattggaattatttaaagaattatatccgatgctgacggcaggaagcacttttatgccattgatgcagtctgagaccatacggtcatatcagcagattataagaagtctgacagaagaatgtggttatgagggcatctttattatttttgatgaattcagtaaatatatagaaggacatgagaaatccggttttgcagaggatatgaaaacgctgcaggatatgtgcgaattggcggaaagttccgatcagaaattattttttacaatggtggcacataaaagtattcatgagtataccaggagtatagacacttccatgaaaaatgcgtttcgcggagtagaaggaagaatttcagagatatctttcgtcgtatccgcacaaaataattatgaattgatcgccaattcaatccggaaggaagaacctgcgttttcgaaacaatatgaaaaagagattgtgaaaaatgagcaggggaagctccagaagttatcctatcagcttccatgttttcagaaattattttcagagcaggactttgaacggatcgttgccaaaggatgtttcccgctgacaccgcttgctgcgtatgcattacttcatatcagtgaacgtgttgcacagaatgagagaacaatatttacatttttagcagatgatggacagggaagtttatcatggctgttagagcggaatgaagaaaactgggtaggcgttgataaaatttatgattattttaaatcaatgttccgtgaaaccgaagatgtaccgatgatccattcagagtggctgaaggcagagtatgcgttgggaaaagcggaaacggaagatgagaaagctgtcataaaagcaatcgcagtaatccgtatgttacatagagaggatgaacttcctgcacaggatcaggcaatctgtcttgcattagggatggacccggaaaagaagtatcgtcctgcaatggaaaaattaaaaaaagatgggattttaatgttccgcagcagtgtcggagtatatgcattccgcagcaatgcaggcgttgatgtggaaaaagaaatcacgaagaagatggatgagcaaaaagggcactgtaatttttgccagattctgtcagaggctgcagacacagagtatgaactgccaaagcagtataatcaggaatatgcgatgacacgctattttcagtatgagtatatgttttcagaagagttttttgccctggaaaatacaagatatctgtttgatgaaaagttttcagacggaaaaattatagtgatgccggaaaaagaaaaaccccaaacagatgagatacaaaagcagttagataaactggcggataaaagaattcttgtgttagtgtccgaccaacgttttgacaaagaggaattattacttcgctatcaggcggttatgacgttaaaaggggacaaacgctttattgaagaaaatgaagtgctgctgcaggaacttgaattatgtgttgaggatatccggtttgaaattaatatctatctggaagagcattatctgccggagagcggaaaggtaatagttctccagacgcaaaagaaaaaagaaaagtgtacaacggccgcagaatttaatcagatattaagtgatgtctgcagagaatattatggctacgcgccgcgtgtaaaccatgaactgttaaatattgaacacatcggcaagcagtatttaagagcgcgcaatcaggtgatcgataaaatgttagggcatgaggatctgtctgtgtaccaaaaaggaaccatgccggaggctatggtatatcgtgctgcatttgtgcataccagaggggataagggctgtcagaaagttagtttagagatagatcgtttttttgcggaatgtgcaggtgaaaaaaagtcttttcagatattataccagcgattgcagggaaaatgttttggcgcaaggcgaggagtgattccattgtttctggcaaaaaaattatctgaaattgaaggaacagcggtcatttatattggggagaaagagctggaaattacttcggataacctgaatcatgtgaatgattttccagaaaactatgcattgtatctggagctggaaaccgttgaaaaagaaaaatatttaaaaaaattggaaaagatttttgaatgtgatacggagaagtttcctggacagagcagattcgcacagattgctgcctgcatgcagaaatggtatcgatcacttccccagtacacgatgataacactaaatcttccggaaaatcaaagtggatcgataaagaaacttaggaatctgttgagaagagcagaaatcaatccaagagaattgttatttgaaaaaattccggcatgctatggagaacctggttttgagcaaacggcacaggatttaaaagaaagtaaaaaaatattagatgatgtatttattacattaaaaaaacaggtcgcaggaaacataaagcgcgaatttggaaaaacgcagaatgtgagtctgaaagcatgtttacacgaatggtatctggcacagaattattcatcaagaaatcatgtactggcaacggcagagagtgaatttttgaattatttagagaaactttctaccaatgatgagggagaaattgtatcagcgttgtcttatattttatcaggggtatatttagaggactggaatgatacaaactttgtagaatttcaggagaaattgcacgcggtaaaagctgaagttgaaaaacttgaggaacatggtaaagatgcaggtggcagcagtcgtatcctgttgacagaccagaatggaaatgccatagaaaagtattataatgcggatatttcggatacaacgagcctttacttaaagaatatgttagaagaggcattggaggactttgggaatacgctcgaaacaaatcagaaggttgcagtgctggtgcggactttagagggattattacagtaagagaagaggagattggttatggaagaaatttatcttgataatgcagcgacgacatttccaaaaccagaatgtgtatatcaggcaatggatgaaattgcgcggaccggtgctgtcaatgcaggcaggggttcttatgcgctggcgcggcaggcatccgggttgattgagagtacaagaaaacagatcaaagaacttgcaagagcagatgatgtagcagaggttgtgtttacagcctctgctacgcttgcatgtaacgtgattttagggggactcgaatggaaacagacggatatcgtatatgtttcaccttttgagcacaatgcaatgatgagagtgttgtatcattaccagaaacaatatggatttaaaattatcgaacttgcattaaacagggagtcgttagaattagatttgtcacagatcaggtttcagttcaccagagaacatccaacagtcgttgttatgagtcatgtcagcaatgtgacaggttacattctgccaatcaatgaggtggcagagtcagcaaaacaatatggagcagttgtggcggtggatggttcacaggcgcttgggcttgtgccggtaaaattgaaagagagtggaatcgatttttatgtttttgcggggcataaaacactctatggtccgtttggagttggaggatttatcagtgagggggatatttctttaaaaccgtttcttgtgggtggaacaggcagtgattccttaaaccctgatatgccaggacaaatgccgggaatcttagaaccgggaagccccaatatagttgcgattgcaggattacatgcagccttagaagcgtgctgtgacatggaaaggcaactttcacaagaaagaaaatttgcagaatatctgattgaaaagctaaaaagaatagacggagttttactgtatctgccttgggatgaaatgaaacgaaccggaattgtttctttttccatagagggttaccgtgcggatgaagtggggatgctgctcgatgaagattatcatatagcggtcagaacagggtatcaatgtgtaccgctgatccataaatatttaaaagatgaaaaatatggcggcgtgatccgggtggggatcggacgttttacaaagcagagtgagttggaaatattaatcaatgcgatagaagaaattgcagaagggtgaaggaaaaatggaaaatcaacgtttggattttggagagattgtcagaaaaattgcagaggataaaatgctgctgccggattttcagagaggatttgtctggaaggatgaagaacagagaaagatcgtagcatcagttctggcaaaaatgccgatagggagtattttactgttgaaatcaaagccggatgagtatgcatcgaagtcaatcggtatgaaagaaaaaaatacatatcaaagccaggatggtgaggtcgaatttctactggatggacagcagcgtatgacagcgcttacgaatgttttttcaaatgtgatttatgaaaaatgtaaaatgttttcaaaattgagttcacgggcattacagcgaagattttttttaagaattccaaagtgggagaactgtaaagaagaggcagatctgtttggagtccataatttgacttttcccatatcagattctgcggaaccggattttctgacagcggatattttaccgtttattaaatgtgccgcattttttaatcaggatggagagccgtataatccacagcagtctttgtcgacccgtctggatgatttttgtctgacaaatgagaatggatatttagtaccgctgtatttgatggtggcaccggaaaatataaaaaaggcgcagataatgctgcgctataatacgatcacctctgatattgcaggtaaaatcggagatgagatcagacagcattttacagatttgccggatgaaaataagaatgattttatagcagagatttttcgaaatgatgaaaactgtaatgaaataaaagaagatcattctaagttcggtgaaaaagtgcaagaaaaacaaatggtgtggaaagtctgtctgacaaattatctggattcctgtgtaaagaatatggcgttgaataagattgaggtatcgggggaacagcgtgacagggcgatcgatatctatgagaatttaaatcgtggaggaatcagtttaaatacttttgatctggttatggcgagagttgcaaaagtaagtacagataatttttatcgtcgtctggtcaggtatattcaggaagaaaaaagttatgacaaacaggtcttaccggatcagattgttcccctgattgggaaaaaaatacaaaataatcaatacaatgcatccatcagtacgggatgttataacgaggaaaagaatgacatagcaggaaagtatattgatgtttttttagatgtgctgtgtctgtattgcaataacaagttatttgaaccggataaattcaaattagattatataaagaagaagcagattctgatgttagcaccaacggatattaatgataatgcgaaaaaggtttgtgatgccatagacagggcaatgtttttctttcagagcagatgcggaatccggaatatccaggaaataaattattctttgatgattgtcttagtggcagttatatttttaaaggatgagtggtttaacgataaaactgttcacgatattttagaagcgtggtattggtcatcattattttccggcgagtatgataaagatcagaatataaagatgatcgcgcatcttcagaccatggtaaagacaatgcaggcatccagccgaaaagagaatgttgactggattgcaaatatcaaaaattatgtgttggaagcacagaatttttcggatgaaaagtttttactgatggaaaaggcggatgaagaccgtatcccgaaaaaagtgatgcgcatgtttatgtgtcagtatctgctgtcaaagacatataaggatatgtttgacgaaaataaaattttaagtgcatattccgatgaaacagaaagatttgaggcacatcatattataccgcttggaacagtaaaaaaggtaggggaatctacgaaaaaacttcgtgatgatgaaaaaaatatctgcaactcgcctttaaattttgtgtacataacgaaaaaagcaaataaggaaatatccgatgaatccttaaaagattatgtacagaagatcaacgcggaagcaaaagcaaaactgcatattacggcttatacaaattcggatataccacaagatcaggtaaaacagattttaagggaacggtatgatttcctgaagggggatatcagggagcggatcagtactttattaagttaaatacggcttggaaagtgcagataaagatattgttttacaaaagaacaatgcaggatggaggtattttatgaaagaggtcagtgaaaaagtaatgcggaatatgatttttgaggttcttcatgtggagcgtaaaaatttgcggagcaaggcaaaaacagatcagaggatggcggaggaacttgcaaagatcatagttgattatgcgaagatgtcagtgtagcagacttagggggagaatagcatgaaattccagagcattacaatgaataattttatgaggtataaggggcagaatgtaatcgagttcagctgcgatgaaaaaagaaatgttactgtcgtgctgggagataatacggttggaaagacaacaattgcgcaggcgttccgctgggtactttatggtgcggtgctgacagaacgtggaaagcagcaggaagactaccagctgttaaacaatgatattctggcaatgatggatgcgaacagtaaagcggatgttacggtggaactggttgctgttgatgatgaaaaaagataccggatcaagcgtgaaatccattatacgcgtgcatatccacagttgatcgcaaaagaattttataagaaagtttcactggaaatatcagaaaaggatgatccaaatgccggtatttctgtggaaacggaaaaaatagaagaggtaatccgtgaattatttcccaaaaatctgtcacattattttttgtttgatggagagagatggaatgatgtaactgttaacggtgtgcgtgaaaatatcaaagagtctgtacatacactgaccggattatctgcgtatcaggctgcaatctggcatttgaaggatatgggaagtcattccgttattaaaaagttcaaaggaaagatatcaggttccggtaatatgtatgataatctggaaaaagaccggaatcgtatggaacatgagatagagcagtgtaaagataagataaaaaatatcgaaatcaatatacaaaacaataatgaaaaaatagaggaggtgcagcagtatcttcttgaaaataagaatacggaaattttgcaggcaaaatataaccagttattagtagtaagaagaacgcaggcggaaagaggagttgctgcatataaaagtctggtaaatttattcagtgataaagcttatatgttgtttgcgaaaccgatgatagaggcatctgtgaaaatggtaaaatctgttgcaggagagcggcgtgacataccgcatatgcatcaggcaagtattgactatattataaaaacaggcagatgtatctgtggaactccgattttaccggattctaaggaattagaatgtctgatggaacagagaaattttcttccgccggcagatattggttcattgctgggtgagtttgaacggacaggacagcgctggaaccggcaaagcaattctgtttatgatgatttaagagaagatgcgcaaaatgtggatcagagcatccgggcttacgaggaaacctgtaatcagttagccgggatggaacagcagatggacaggcagacagactttgccgaaaaaagaaaaatgctgaaatattatcagagtgaaaacagtaaattaggggtggaaaagggaacactgcagggacagatcttaaattttgagcggcagatcgaacgaacagaagctgagatgaagagtcaggaagtcagaagcgaagaaaataaaaaatggcgagagcgtgtagatttggcagaagcattatatacaagattaaaaaatgattttgaggtaaaaaagaataagacatttctggaattaaacggacagatccaaaaaaattttgagcgtatgttcaatgcgaaagataaaagaatacagttgacggaaaattatgagatccagatgttatatcagacggatttgggtttccgcgaagagaagaatctgtcagagggcgaaaaaatcgcacgcaattttgcatttatcgttacaatcatggaatacagcagaaataaaaaggctgagcatcttggagtggaaagtggaggagatacactgccgattgttttagacggaccgttttctaaactgggggataaaaatatcagtctgattgcaaaagttttgccggaagtatcagaacaggtaattatttttatgctggacaaggactggaagtacacaggactcgatgaatatgtcggtgcgtcttattatattgaaaaaacagctgacgaggcatatgcgtccatacggaaagtagaatctgatcagtagcggaaggggatacaaaagatggggaattatgaattttttaagaaggagtttgaatttcatggaaagcatgccaggatggcaggtgaattgtgggtaaaaggtgactatgagcatacctgtttccggagactgatcgatctgtatatggtggcagcagtggtgggatttcgcgtagaccgtaaagcaaaggaagatttctcgccgtttgggacaaagagcattttagccgagcaggtcataaatgcaaaagaagaattagattttattatgcagatgatgatcatgctggatgcgaaagaaagcatgccggctgaggaagcagtaaaaaaagcatttcggggtgcggagacggaggaagaatttcaggcttatcagtccatgtttcatgattatgtcagaggcggggtagaggaactgtatgagagactgatcattcaaaaagcagaaccggacagtgaattttatgataataaaacagcaaatctgatgtctgtgttagaaagatttggttatggtttacaggatatggaggagtaataattttacatgatttttgaaggaaaaatgtaaaaaaatcaaaaacaggtatttacaatcgtcgaaaacaggggtataatttaagagaattatatcataccaagtgataattaggttattacaataaggtaagaaacctaaaagctctaatcccattcttcggaatgggattatcttttatacagaagtttattcatgacaatgaccggtatgcggatcattgttgaagcgcgcagaataaaacagttgtcccgtttgctggtatgagagagaacggttcagatgagaggagaaggaacatggacgaaaaaatggattatcgtattgggttggatattggtattgcatccgtcggctgggcggtattacagaacaacagtgatgacgagccggttcgtatcgtagaccttggggtaaggatatttgatacagcagaaatcccgaaaacaggtgaatctttggcgggaccaaggagagctgcacgaacgacaagaaggcggcttagaagaagaaaacatcgtttagacagaatcaaatggctctttgagaatcagggtctgataaatattgatgactttctgaaacgatataacatggcagggttaccggatgtttatcagcttcgctatgaggcattagaccggaaactgacggatgaagaattagcacaggtgttgcttcatattgcaaaacaccgtggatttcgttcgactagaaaggcagagacggctgcaaaggaaaatggtgcagttttaaaagcgacggatgaaaatcaaaagcggatgcaggaaaagggatatcgtacggtcggggagatgatttatttagatgaagcatttcgaatcggatgttcctggtcagaaaagggatatattctcaccccacgcaataaagcagaaaattatcagcacaccatgttaagggcaatgcttgtggaagaagtcaaagaaattttctccagccagagacgtcttggaaatgaaaaagcgacggaagaattagaagaaaaatatttggaaatcatgacaagtcagagatcttttgatttaggaccaggcatgcagccggatggaaagccaagtccatatgcgatggaaggtttttcagacagagttggaaaatgtacatttcttggagatcagggggagctgcgcggcgcaaagggaacttatacggcagaatattttgtggcactgcagaaaataaatcatacaaaactggttaaccaggatggagagaccagaaactttacagaagaggaacgacgggcactgactttgctgttattcacacagaaggaagtgaagtacgcagcagttcgcaagaagttaggtttgccggaggatattcttttttataatttaaattataaaaaagctgccacgaaagaagaacagcaaaaagaaaatcaaaatacggaaaaagcaaaatttattgggatgccatactaccatgattacaagaaatgtttggaagaacgggtgaaatatctgacagaaaatgaagtcagggatctgtttgatgagattggtatgatcctgacctgttataagaatgatgacagtcgtacggagcggctggctaagctgggacttgtaccgatagagatggaagggttattggcgtatacaccgacgaagtttcagcatctttcgatgaaagcgatgcggaatattatcccgtttttggaaaaaggcatgacttatgataaagcatgtgaggaagcaggatatgattttaaggcggattctaaggggactaagcagaagttattaacaggagaaaatgtgaatcagaccattaatgagatcacgaatccggtagtaaagcgttctgtatcacagactgtcaaagtgattaatgcgatcatccgtacatatggaagtccgcaggcaatcaatattgagcttgcaagagaaatgtcaaagacttttgaagaacgccggaaaataaaaggtgatatggaaaaacgccagaagaataacgaagatgtgaaaaagcagattcaggaattgggaaaattatcaccaaccggacaggatattttaaagtatcgcctgtggcaggaacagcagggaatctgtatgtattccggtaagactattccattggaagaactgtttaaaccgggatatgatattgatcatattttgccatacagtattacatttgatgacagttttcggaataaggtacttgtcacttctcaggaaaaccgccaaaagggaaacaggacaccttatgaatacatgggaaatgatgagcagcgttggaatgagtttgaaactcgtgtgaagacgacgatacgggattataaaaaacagcagaaacttttgaaaaaacatttttcagaggaagagcgtagtgaatttaaagagcgtaacttaacggatacaaaatatattacaaccgttatttataatatgatccgtcagaaccttgaaatggcaccgttaaaccgtccggaaaagaaaaaacaggtacgcgcggtaaatggagcaattacggcgtacttaagaaaacgctggggattacctcagaaaaatcgtgagacagatacacatcatgcgatggatgcggttgtcatcgcctgctgtacggatggcatgatccagaaaatatcgcgttatacaaaagtaagggagagatgttactcaaaaggtacagagtttgtggatgcggagacaggagaaatctttcgaccggaagattacagcagggcagaatgggatgagatatttggtgttcatattccaaaaccgtgggagttatttcggacagaactggatgtgagaatgggggatgatccgaagggatttttagatacacactctgatgttgctttggagttggattatccagagtatgattatgaaaatcttcgtccgatttttgtctcaagaatgccaaatcataaggtaacaggggctgcacatgcagatacgatccgcagtccgagacattttaaggatgaaggaatcgtattgactaagacggctttgacagatctgaagttggataaagatggagaaatcgacggctactataacccacaaagtgaccttttattatacgaggcattgaaaaaacagttgttgttatatggaaacgatgcaaaaaggcatttgctcaggattttcataagccgaaagcagacggtacagaaggtccggtagtacggaaagtcaagatacagaagaaacagacgatgggggtatttgtggattccggaaatggaattgcagaaaatggcggtatggtcagaatcgatgtatttcatgtgaatggaaagtattattttgtaccggtgtatacggcggatgtggtgaagaaggtgctgccgaatagggctgcgacagcacataagccatatggagaatggaaagttatggaggataaggactttttattcagtttgtattcgagggatttaatacatataaagagtaaaaaagatatacctataaaaatggtaaatggtgggatggagggtataaaagaaacgtatgcatactatataggcgcagatatttcggctgctaatatacaaggaattgcacatgacagccgttataagtttagaggcttaggtatacaaagtctggatgtgcttgaaaaatgtcagatagatgttttaggtcatgtttcagtagtaagaagtgaaaaacgaatggggttttcttgataaaaacatgggggataaatgggatttcgaaatattaagatagacagtcatgtaaagctgtctatcaaaaatcagcagctaaatattgaaacagacatagcaagacagattccactggaggatatcaactgtatcattatagaaaatcagaccgtaactgtctcagcttatttacttcaaaaaatggcagatatgggaatcgcggtttatgtctgtgatgagaaacatcttccgaatgcagtattgcttcccatggtaaggcacagtcgccattttaaaattctgaaatatcagatagaggcaggaaagcccttacagaaaagactctggcagcagatcgtggttcagaaaataagaaaccaggcattgtgtttagcctaccttgaactggatggatcagaagaactgatgaaaatgtgtaaagaagtccagtcaggcgatcgaacacatgtggaggcgaaagcagcagctttttattttaaaagtctgtatggattaggattttcacgcggtaatgatcatatcattaacgcggcgttaaattatggttatgctattgtaagaggtctgatcgcccgctccattgtctgttatggattagaaccttcgattggagtgttccatcatagtgagctgaataattttaatttggcggatgatatgatcgagccatttcgtccgttagttgacctgtatgtagcccaaaattatgatatagcagaaattgacagcgatcttacgccagaaagaaaacgtggtatttttggtattataaattatgatatggatatgaaaggagaaaaacgtattatcagtaattgtattgatatgctggtggcaagttacagtagtgctttgcagggaaaaagatcagatttggagttgccggaactgatgcaattacaggtacatagctatgaataggtttatgagaatgttagtattttttgatctgccagtagtaactgcaaaagagaaaaaggatgccgcaaaatttcgtaagtttttattgaaagatggctacaatatggtgcagtggtctgtatattccaggatatgcaatggtatggatgcagttgcaatgcataaacagcgtttaaaacaaaatctgcccttaaaaggatcagtacgtgcgctggttttaacagaaaagcagtatgaatctatggaaattatgttaggaacgaaaacgttcgatgacaccccggaatcaatagaattaatggatgttttttgaaaaaagaagattttcgatagaatttaacttccaaattaaagattttttttagatgaaatccccacgaatccctgtagttcgtggggatttgtgctccctattataccataccaagtgataacagggaattacaactttacatttctttcatttaaaaattcttttattataccataccaagtgataacagggaattacaactctgtaatagtttttccaaaaaattttttcattataccataccaagtgataacagggaattacaacattattcaaaacattaaaagacaaacacgaattataccataccaagtgataacagggaattacaacaagaatagtgcatagttagaagggcagacaattataccataccaagtgataacagggaattacaactaatactgcaaggcagattttagcagattaattataccataccaagtgataacagggaattacaacgagtgtttgcggtcaatatttagagggttcattataccataccaagtgataacagggaattacaacacgctaaacacaacggcaaaaccgaggaagattataccataccaagtgataacagggaattacaacgcattctgatgatgatacggaagaaaaattattataccataccaagtgataacagggaattacaacaatgttttttgaatagtgcgttaggcttgtattataccataccaagtgataacagggaattacaacatgatcatgttcatacttaagaagataccgattataccataccaagtgataacagggaattacaacacaaggatgccaaaagcgaacaccgcaaagattataccataccaagtgataacagggaattacaacgcacattggaaaagtatactttacaaaattattataccataccaagtgataacagggaattacaactatcactagattgtttcgttccggtatcaaattataccataccaagtgataacagggaattacaaccacagaactgttcgtcatcaagcagtatgattataccataccaagtgataacagggaattacaacaggcgattgcatcagaggaattgatggaaattataccataccaagtgataacagggaattacaaccagcaggacactatcatgtgcgatgtatgattataccataccaagtgataacagggaattacaactgtaccgggaaaacacaaaattgaaaagagattataccataccaagtgataacagggaattacaacgcgctgctatgaaaaagccatgtcacagcaattataccataccaagtgataacagggaattacaacccctgccacgcatataatttacatccatctattataccataccaagtgataacagggaattacaacgtaagtcattgttatcgtgatgatgataatattataccataccaagtgataacagggaattacaacccaccacgacgagccttggcacgtgcataaattataccataccaagtgataacagggaattacaacactacccgaattaatagtgccagaatctgtattataccataccaagtgataacagggaattacaactaacgacggcgtatcttatcagttgcccgcattataccataccaagtgataacagggaattacaacggacttggaataaaagtaactgattttttaattataccataccaagtgataacagggaattacaacaataattcgttacaattcagttcggcttgcattataccataccaagtgataacagggaattacaaccgataaaggcgaaccatgcagaaaggatagattataccataccaagtgataacagggaattacaacaagcggggcgccccttccggggcggcgctaattataccataccaagtgataacagggaattacaacgcaaagctacgaccacaacgtcgggcaccaattataccataccaagtgataacagggaattacaacggacgaagaagggaatgtgaccgatgaggtattataccataccaagtgataacagggaattacaactgcaagacggggagagcggccgctgtcctgattataccataccaagtgataacagggaattacaactgtcggaaaactccggtcacagtcttttagattataccataccaagtgataacagggaattacaacgacagtataaaactattacaggcacaacaaattataccataccaagtgataacagggaattacaacaaaacagtatgtagaaaactacgaacaaaaattataccataccaagtgataacagggaattacaacatgcgacctcaaaagttgtcaagagtatacattataccataccaagtgataacagggaattacaacagaacacctgtgcactgcagaacaccatgaattataccataccaagtgataacagggaattacaacgtagcaatcataaagcaccggcgaatgaaaattataccgtaccaagtgataatgaggaaaatcagaaaagtatattgaaattacggaaaaaccgtaatcaacctttacactacaacaaaaaacaggaaaccttgcaaatcaaggtttcctgttctcaacagaagagcgcgagacgggactcgaacccgcggccccgaccttggcaaggtcgtgctccaccaactgagccactcgcgcatatatgaaattgtattgtagcttttaaagagcgcgagacgggactcgaacccgcggccccgaccttggcaaggtcgtgctccaccaactgagccactcgcgcatatgtaaattgttttgtatctgtctgccagacacatttgatatcatactatgggaaaagtaatttgtcaacaattttttgaaaaaatttaacagaaaaatttaacagaaattttggataccgaaatagaaatgtgagtgcggatctacggcgaaaaaaaagaaaaacagaatgaaaacgatactttttaggggtagaactcataaatgaagagtgttataataaaggatatgggaaaatggtcacagaaatttagaatatcactttggaaggccaaaggggtggcagaatgtacaaaaaaatgcgaagatttgtactgtagcagttttatgtgcaatattgttaattttaggaatagcattatttggatgttttgggcagatacggggcagtttacagcagcagttgatgagcagcattgaggggatggcagaacagaatgtaatattggtagagaaagaagtaagcacgcgttttagactgctttctggtcttgcgagagagtcaggcggggacgaaaaaattatcgttaataaattacagggatttgtagagacgtatcagtttaaacggataggatatattgcggcagatggtacagcagaaacgacggatggctatcggctaaatatgtctgacagagatttttttcaacagtcgatgcggggaaaaaactttttgacggatgcatttgaagacaggattgatacttcacatgaaaccataaatgtattcagtgtgccggtatatgaaaaagaacggaaaacggtaaaaggagttttatttgcaacctgcaaagatgaaatgcttgaggggtgcctgaagaatgagatatttgaaggacaggcttttaattacatcataaaaatagacggtacgattgttgcaacttccggaaacagtaaagaatggggaatcgggagaaatatttttaatacggatgtttctgaggatgaaagagatgattatgccggagacctgatgctcagtaacatgaaagagggaaaaagtggctatggattggatccaaaacggaaagaagtctcactttattactatatgccacttaaaatagaagagagcggtgaaccatggtatgtggtcactgcagtagaggatagcgttttaacaagccgtatgcaggtggtcatggatgcgatcaacagtctgatggtgatcattctggttgtcatatcggtcagcgtcggggtgtatatttactcctggcgccaaagtaaaaaagaacttatgtcgcttgcatatcaggatcctgtcacattaggagataattttgcagcttttaagaaaaaggcaaaaagcaaaaaagatggtgtaggatggctgattgctatggatgtgacagattttaagctgatcaacagcacctgtggagtcaaaaaaggtgatgaggtgctgcgtgtcatatgggagatttttgaaaccgaaacgggagaaaatgaactggcagcgcatgtcaatgccgaccggtttatattgttctggatggatgaaaatcaggaaaacatcaaacaaagactggaacatgtaataagaaagatagaagagataccggaacgtctggaaataccaaatctttttccggtgtttggaatttttcatacgatcgtattagatgagatcgatcctttatacggaaatgcagtgcaggcaaagcatcagatcaaaggaaggcgtgacaggcattatatattttatgatgagctgaaccatgagagtattcaggaaaaccgtgaattagaagaacattttgaaacagcgcttgaaaacgaagagtttgaaatctggtatcagccaaaatacagtgcacattcgagaaagcttgtgggagcggaggctcttgtgcgatggcgcagggcggatggagcactgattccgccgcttaagtttattccattgtttgaacggaatggaaatatcatccggctcgatgagtatgtattccgagctgtgtgcaggcagcagaaagagtggcagaaacagggacagaagatgcttcctgtttcggtaaacatttcgcgtgtcagcctctattattcaagtgtcgttgaaaaatatgaaagtattatccggtcgtttgaccttgattcgaaatacattcagctggaaattacagaaagtgcaacgattgataataatgaaatatttaatctgttagagcagtttcacacggcaggatttaagatacttctggacgatttcggaagtggatattaatcccttgcagctttaaaccgtatgcattttgatacgatcaagctggataaaagtcttgtcgattacataggggacgataacggagagaaattgttaaattcaattacaaagctggcacagagttttggcatggaaattacggcagagggtgttgagacggtagagcagctgatgtttttgtgcaatctggactgtgatgatattcagggatactatttttcgcgtccactgccggtaaaagaatatgaagaatgtttaaaagaagcgtgcatgtaatatgcttcgcgctcatacaatataacaatcgataccatggaggtacagggtgagcgcaaagacgaggatcgtggtccttcatatgaaggaggttatctatacagcgatatttgtcggacttgggatcgtactggtcatattgctgcttttcatgtttttaccaaaaaaacagaagggcgatgcagagccaacgatgcagtatacggcaggcgtatacacttcgtcggtaatgatgggcagccagtcagccgatgtacaggtcattgtagatgaaaaccgtatacaatccatttccctggtcagtctggatgaaacagtggcgacaatgtatccgcttatggagccggcattggaaaatgtcagtgaacaggtgataaaacagcagtcgacggaagggattacatatcatacggataatcagtatacatcgatcgtacttttaaatgcgattgaaaatgcgcttgcgaaagcggagatcgcagagggagaggcagattaacacagtttaaaatcaaagaatgagaggtttgagaactgtgtgttgtcaagaatcaaaaaaggttccggatgtaccggaacctttttgtgtaaaaaagttattcttctgtgttgagcgtatccatgtaattattgatagcgtcaagatcagcatagatcgttttgatcggtctgctcttttcgtaagcgttataaccggagtatcctgcccatccgacgataagtaatgcaattaaccatccacagatggtgcctgcgatacgttttcttttttcttttgcaagaatctttttgcggtttgctttctcttctttatagcggtcaacttttgcctgactcataatcatcctccgttttattattcacatgcccagcatggataaaaatcaaataaacataatgataatataccccattctgttagaaaaagcaatagaaatacaccttgtcattttcgtggaaattgggtaaaatgagagtttgagagagaagaaactgtgcgcgggataagagcatgatgcttgaaaagcagtgcagtgatcagaatggagaatcgtgtgaaaaaaagatttttcacacggctatttgtttctgagcaaaaacaaatagctttgatggcaaggcataaaaaaacatgcctccgagaatttaagattctcgtcgcctcttcgcaataagttgctcagaaatgaggatttttatgaatttaattgtagcggcagatgaaaactgggcgatcggtaataaaaatgaattgctggtgcggattccggcagatcagaagtttttccgtgagacgacgatgggcaaagtggttgtgatgggacgaaagacattggagacatttccaaatggactgcctttaatgggacggacgaatattgtgctgacacatgataaaaagttccgggttccgggaacactgatcgtgcatgatatggaagaattacatgaagagttagaaaagtataacagcgaagatatttatgtgatcggcggggaatctgtttatcgccagctcatcgatgaatgtgatgtggcgcatgtcacaaaaatcgattttgcatacgatgcggatgcacatttcccggatctggatgcagatccggcatgggagataacggcagacagtgaggaacagacatattttgatcttgagtattatttttaccggtatgagagagtcagaaaataagtaaacgtaaacagaaagcagtgcagcaaagatggaaaattttatttacagtatcaatgtgacgtttccgatttttttagtgatggtcatcggttattttttaaaacagatcggtatgttaaacgacaattttgtcacggtggcaaaccgttttaattttaaggtaacactgccgtttatgctgttccgtgatattgcgggcgtggatatcagggcagtattcgatttaaaatatgtattgttttgtgcgcttgtcagtaccgcgtgtttctggctgatctggggtggcgtgaagctgtttttaaaggatcagactatgcggggagcttttgtgcaggcatcgttccgcagcagtgcggcggtgatgggacttgcctttatccagaatatctatggaacctcggcgatggggccgcttatgatcgtcagtgcggtgccgctttataatattttttccgtgatcgtgctgacctttgagggagaaaatgcaagcggggtggatggaaaacaaaaaatcaaagaggcatgtatcggaatcgctaaaaacccgatcattcttggcattttagcaggattgatcgtcggacttttaggaatcgaaattccaacgattatcaataagacggtcaacagtgtggcgcagatggctacaccgcttgcactgatcacgatcggagccggatttgagggcagaaaggcacttgcgaagatcaagccgacgatcgcggcatctctgatcaagttagtgatccagccgctcattttccttccggtcgcagtctggatgggatttggtggggagaaaatgatcgcaattctgatcatgcttgcatccccgacaacgccgagctgttatatcatggcaaagagcatgaacaacgacggtgtgctgacggcgagtgtgatcgtgacgacaacgttattagcggcatttacgctgaccggatggatctttatcttaaaatcagtcgggttgattggataaataaaatcattgcatttcccagtgagatgggatatagttttttgaaagaaaaaataccttggtttttgggaggacgatatggatataacaggcagaaaattatttgtaaaagcgctgcaggaagagggcgtggataccattttcggttatccgggcggtactgtgacggatcttttcgatgaattatataaacaggatagtattgacgtcgtcctgccaagacatgaacagggactgatccatgcggcagaaggatacgcgaaatctaccggaaaagtcggcg

SEQ ID NO: 3884 - DNA, 21629 bp, synthetic construct
  source 1..21629: mol_type = other DNA
  misc_feature 1..21629: note = Synthetic
tgggaaaaaggattgaccggggaaatgatcgtaaaaaattattacgaaagataaagacatataggagttgccggaatggaacaatggagaaatttaatacatatcaaccgtaatttccaaaaagcagtcaatttgcagcttgatataggagatcatggaagaattgaacattatataccgacacggtcatccatgttgatattgcgcagatatttaaaagctgtgacgggagaggcaaaagaacatgcaactgttttaatcggtccgtatggaaagggaaaatcccatttattactggtattgctttcaattctttcctgtgacctgccacagagtgtttttgaaaaaataaagatcacagatccggagacagcggatttagtcgcgcagatccggaaggagaataaaaaatatttaccggtattggtttcttctgtaccggggttttccatgaatcagattttattattcgcactgcgcgaggcattagagaaaaatggtttgtcggatattgcaccggagactgcattcacagaagcacttagaatccttgaaaagtgggaaaaggaatattcggatgtgtatgccagattttgtgagtatctgacggaacatcagacagatgtgcaggatttgaaaaagaatctgaaaagaaaacataaacagtcattggaattatttaaagaattatatccgatgctgacggcaggaagcacttttatgccattgatgcagtctgagaccatacggtcatatcagcagattataagaagtctgacagaagaatgtggttatgagggcatctttattatttttgatgaattcagtaaatatatagaaggacatgagaaatccggttttgcagaggatatgaaaacgctgcaggatatgtgcgaattggcggaaagttccgatcagaaattattttttacaatggtggcacataaaagtattcatgagtataccaggagtatagacacttccatgaaaaatgcgtttcgcggagtagaaggaagaatttcagagatatctttcgtcgtatccgcacaaaataattatgaattgatcgccaattcaatccggaaggaagaacctgcgttttcgaaacaatatgaaaaagagattgtgaaaaatgagcaggggaagctccagaagttatcctatcagcttccatgttttcagaaattattttcagagcaggactttgaacggatcgttgccaaaggatgtttcccgctgacaccgcttgctgcgtatgcattacttcatatcagtgaacgtgttgcacagaatgagagaacaatatttacatttttagcagatgatggacagggaagtttatcatggctgttagagcggaatgaagaaaactgggtaggcgttgataaaatttatgattattttaaatcaatgttccgtgaaaccgaagatgtaccgatgatccattcagagtggctgaaggcagagtatgcgttgggaaaagcggaaacggaagatgagaaagctgtcataaaagcaatcgcagtaatccgtatgttacatagagaggatgaacttcctgcacaggatcaggcaatctgtcttgcattagggatggacccggaaaagaagtatcgtcctgcaatggaaaaattaaaaaaagatgggattttaatgttccgcagcagtgtcggagtatatgcattccgcagcaatgcaggcgttgatgtggaaaaagaaatcacgaagaagatggatgagcaaaaagggcactgtaatttttgccagattctgtcagaggctgcagacacagagtatgaactgccaaagcagtataatcaggaatatgcgatgacacgctattttcagtatgagtatatgttttcaaaagagttttttgccctggaaaatacaagatatctgtttgatgaaaagttttcagacggaaaaattatagtgatgccggaaaaagaaaaaccccaaacagatgagatacaaaagcagttagataaactggcggataaaagaattcttgtgttagtgtccgaccaacgttttgacaaagaggaattattacttcgctatcaggcggttatgacgttaaaaggggacaaacgctttattgaagaaaatgaagtgctgctgcaggaactggaattatgtgttgaggatatccggtttgaaattaatatctatctggaagagcattatctgccggagagcggaaaggtaatagttctccagacgcaaaagaaaaaagaaaagtgtacaacggccgcagaatttaatcagatattaagtgatgtctgcagagaatattatggctacgcgccgcgtgtaaaccatgaactgttaaatattgaacacatcggcaagcagtatttaagagcgcgcaatcaggtgatcgataaaatgttagggcatgaggatctgtctgtgtaccaaaaaggaaccatgccggaggctatggtatatcgtgctgcatttgtgcataccagaggggataagggctgtcagaaagttagtttagagatagatcgtttttttgcggaatgtgcaggtgaaaaaaagtcttttcagatattataccagcgattgcagggaaaatgttttggcgcaaggcgaggagtgattccattgtttctggcaaaaaaattatctgaaattgaaggaacagcggtcatttatattggggagaaagagctggaaattacttcggataacctgaatcatgtgaatgattttccagaaaactatgcattgtatctggagctggaaaccgttgaaaaagaaaaatatttaaaaaaattggaaaagatttttgaatgtgatacggagaagttttccggacagagcagattcgcacagattgctgcctgcatgcagaaatggtatcggtcacttccccagtacacgatgataacactaaatcttccggaaaatcaaagtggatcgataaagaaacttaggaatctgttgagaagagcagaaatcaatccaagagaattgttatttgaaaaaattccggcatgctatggagaacctggttttgagcaaacggcacaggatttaaaagaaagtaaaaaaatattagatgatgtatttattacattaaaaaaacaggtcgcaggaaacataaagcgcgaatttggaaaaacgcagaatgtgagtctgaaagcatgtttacacgaatggtatctggcacagaattattcatcaagaaatcatgtactggcaacggcagagagtgaatttttgaattatttagagaaactttctaccaatgatgagggagaaattgtatcagcgttgtcttatattttatcaggggtatatttagaggactggaatgatacaaactttgtagaatttcaggagaaattgcacgcggtaaaagctgaagttgaaaaacttgaggaacatggtaaagatgcaggtggcagcagtcgtatcctgttgacagaccagaatggaaatgccatagaaaagtattataatgcggatatttcggatacaacgagcctttacttaaagaatatgttagaagaggcattggaggactttgggaatacgctcgaaacaaatcagaaggttgcagtgctggtgcagactttagagggattattacagtaagagaagaggagattggttatggaagaaatttatcttgataatgcagcgacgacatttccaaaaccagaatgtgtatatcaggcaatggatgaaattgcgcggaccggtgctgtcaatgcaggcaggggttcttatgcgctggcgcggcaggcatccgggttgattgagagtacaagaaaacagatcaaagaacttgcaggagcagatgatgtagcagaggttgtgtttacagcctctgctacgcttgcatgtaacgtgattttagggggactcgaatggaaacagacggatatcgtatatgtttcaccttttgagcacaatgcaatgatgagagtgttgtatcattaccagaaacaatatggatttaaaattatcgaacttgcattaaacagggagtcgttagaattagatttgtcacagatcaggtttcagttcaccagagaacatccaacagtcgttgttatgagtcatgtcagcaatgtgacaggttacattctgccaatcaatgaggtggcagagtcagcaaaacaatatggagcagttgtggcggtggatggttcacaggcgcttgggcttgtgccggtaaaattgaaagagagtggaatcgatttttatgtttttgcggggcataaaacactctatggtccgtttggagttggaggatttatcagtgagggggatatttctttaaaaccgtttcttgtgggtggaacaggcagtgattccttaaaccctgatatgccaggacaaatgccgggaatcttagaaccgggaagccccaatatagttgcgattgcaggattacatgcagccttagaagcgtgctgtgacatggaaaggcaactttcacaagaaagaaaatttgcagaatatctgattgaaaagctaaaaagaatagacggagttttactgtatctgccttgggatgaaatgaaacgaaccggaattgtttctttttccatagagggttaccgtgcggatgaagttgggatgctgctcgatgaagattatcatatagcggtcagaacagggtatcaatgtgtaccgctgatccataaatatttaaaagatgaaaaatatggcggcgtgatccgggtggggatcggacgttttacaaagcagagtgagttggaaatattaatcaatgcgatagaagaaattgcagaagggtgaaggaaaaatggaaaatcaacgtttggattttggagagattgtcagaaaaattgcggaggataaaatgctgctgccggattttcagagaggatttgtctggaaggatgaagaacagagaaagatcgtagcatcagttctggcaaaaatgccgatagggagtattttactgttgaaatcaaagccggatgagtatgcatcgaagtcaatcggtatgaaagaaaaaaatacatatcaaagccaggatggtgaggtcgaatttctactggatggacagcagcgtatgacagcgcttacgaatgttttttcaaatgtgatttatgaaaaatgtaaaatgttttcaaaattgagttcacgggcattacagcgaagattttttttaagaattccaaagtgggagaactgtaaagaagaggcagatctgtttggagtccataatttgacttttcccatatcagattctgcggaaccggattttctgacagcggatattttaccgtttattaaatgtgccgcattttttaatcaggatggagagccgtataatccacagcagtctttgtcgacccgtctggatgatttttgcctgacaaatgaggatggatatttagtaccgctgtatttgatggtggcaccggaaaatataaaaaaggcgcagataatgctgcgctataatacgatcacctctgatatcgcaggtaaaatcggagatgagatcagacagcattttacagatttgtcggatgaaaataagaatgattttatagcagagatttttggaaatgatgaaaactgtaatgaaataaaagaagatcattctaagttcggtgaaaaagtgcaagaaaaacaaatggtgtggaaagtctgtctgacaaattatctggattcctgtgtaaagaatatggcgttgaataagattgaggtatcgggggaacagcgtgacagggcgatcgatatctatgagaatttaaatcgtggaggaatcagtttaaatacttttgatctggttatggcgagagttgcaaaagtaagtacagataatttttatcgtcgtctggtcaggtatattcaggaagaaaaaagttatgacaaacaggtcttaccggatcagattgttcccttgattgggaaaaaaatacaaaataatcaatacaatgcatccatcagtacgggatgttataacgaggaaaagaatgacatagcaggaaagtatattgatgtttttttagatgtgctgtgtctgtattgcaataacaagttatttgaaccggataaattcaaattagattatataaagaagaagcagattctgatgttagcaccaacggatattaatgataatgcgaaaaaggtttgtgatgccatagacagggtaatgtttttctttcagagcagatgcggaatccggaatatccaggaaataaattattctttgatgattgtcttagtggcagttatatttttaaaggatgagtggtttaacgataaaactgttcacgatattttagaagcgtggtattggtcatcattattttccggcgagtatgataaagatcagaatataaagatgatcgcgcatcttcagaccatggtaaagacaatgcaggcatccagccgaaaagagaatgttgactggattgcaaatatcaaaaattatgtgttggaagcacagaatttttcggatgaaaagtttttactgatggaaaaggcggatgaagaccgtatcccgaaaaaagtgatgcgcatgtttatgtgtcagtatctgctgtcaaagacatataaggatatgtttgacgaaaataaaattttaagtgcatattccgatgaaacagaaagatttgaggcacatcatattataccgcttggaacagtaaaaaaggtaggggaatctacgaaaaaacttcgtgatgatgaaaaaaatatctgcaactcgcctttaaattttgtgtacataacgaaaaaagcaaataaggaaatatccgatgaatccttaaaagattatgtacagaagatcaacgcggaagcaaaagcaaaactgcatattacggcttatacaaattcggatataccacaagatcaggtaaaacagattttaagggaacggtatgatttcctgaagggggatatcagggagcggatcagtactttattaagttaaatacggcttggaaagtgcagataaagatattgttttacgaaagaacaatgcaggatggaggtattttatgaaagaggtcagtgaaaaagtaatgcggaatatgatttttgaggttcttcatgtggagcgtaaaaatttgcggagcaaggcaaaaacagatcagaggatggctgaggaacttgcaaagatcatagttgattatgcgaagatgtcagtgtagcagacttagggggagaatagcatgaaattccagagcattacaatgaataattttatgaggtataaggggcagaatgtaatcgagttcagctgcgatgaaaaaagaaatgttactgtcgtgctgggagataatacggttggcaagacaacaattgcacaggcatttcgctgggtgctttatggtgcggtattgacagaacgcggaaagcagcaggaagactaccagctgttaaacaatgatattctggcaatgatggatgcgaacagtaaagcggatgttacggtggaactggttgctgttgatgatgaaaaaagataccggatcaagcgtgaaatccattatacgcgtgcatatccacagttgatcgcaaaagaattttataagaaagtttcactggaaatatcagaaaaggatgatccaaatgccggtatttctgtggaaacggaaaaaatagaagaggtaatccgtgaattatttcccaaaaatctgtcacattattttttgtttgatggagagagatggaatgatgtaactgttaacggtgtgcgtgaaaatatcaaagagtctgtacatacactgaccggattatctgcgtatcaggctgcaatctggcatttgaaggatatgggaagtcattccgttattaaaaagttcaaaggaaagatatcaggttctggtaatatgtatgataatctggaaaaagaccggaatcgcatggaacatgagatagagcagtgtaaagataagataaaaaatatcgaaatcaatatacaaaacaataatgaaaaaatagaggaggtgcagcagtatcttcttgaaaataagaatacggaaattttgcaggcaaaatataaccagttattagtagtaagaagaacgcaggcggaaagaggagttgctgcatataaaagtctggtaaatttattcagtgataaagcttatatgttgtttgcgaaaccgatgatagaggcatctgtgaaaatggtaaaatctgttgcaggagagcggcgtgacataccgcatatgcatcaggcaagtattgactatattataaaaacaggcagatgtatctgtggaactccgattttaccggattctaaggaattagaatgtctgatggaacagagaaattttcttccgccggcagatattggttcattgctgggtgagtttgaacggacaggacagcgctggaaccggcaaagcaattctgtttatgatgatttaagagaagatgcgcaaaatgtggatcagagcatccgggcttacgaggaaacctgtaatcagttagccgggatggaacagcagatggacaggcagacagactttgctgaaaaaagaaaaatgctgaaatattatcagagtgaaaacagtaaattaggggtggaaaagggaacactgcagggacagattataaactttgagcggcagattgaacggatcgaagcggagatgaagagccaggaggtcaagagcgaagaaaataaaaaatggcgagagcgtgtagatttggcagaagcattatatacaagattaaaaaatgattttgaggtaaaaaagaataagacatttctggaattaaacggacagatccaaaaaaattttgagcgtatgttcaatgcgaaagataaaagaatacagttgacggaaaattatgagatccagatgttatatcagacggatttgggtttccgcgaagagaagaatctgtcagagggcgaaaagatagcgcgcaattttgcatttatcgttacgatcatggaatacagcagaaataaaaaggcagagcagattggagtggagggtgctggagatacactgccgattgttttagacggaccgttctctaaactgggggataaaaatatcagtctgattgcaaaagttttgccggaagtatcagaacaggtaattatttttatgctggacaaggactggaagtacacaggactcgatgaatatgtcggtgcgtcttattatattgaaaaaacagctgacgaggcatatgcgtccatacggaaagtagaatctgatcagtagcggaaggggatacaaaagatggggaattatgaattttttaagaaggagtttgaatttcatggaaagcatgccaggatggcaggtgaattgtgggtaaaaggtgactatgagcatacctatttccggagactgatcgatctgtatatggtggcagcagtggtgggatttcgcgtagaccgtaaagcaaaggaagatttctcgccgtttgggacaaagagcattttagccgagcaggtcatcaatgcaaaagaagaattagattttattatgcagatgatgatcatgctggatgcgaaagaaagcatgccggctgaggaagcagtaaaaaaagcattccggggtgcggagacggaggaagaatttcaggcttatcagtccatgtttcatgattatgtcagaggcggggtagaggaactgtatgagagactgatcattcaaaaagcagaaccggacagtgaattttatgataataaaacagcaaatctgatgtctgtgttagaaagatttggttatggtttacaggatatggaggagtaataattttacatgatttttgaaggaaaaatgtaaaaaaatcaaaaacaggtatttacaatcgtcgaaaacaggggtataatttaagagaattatatcataccaagtgataattaggttattacaataaggtaagaaacctaaaagctctaatcccattcttcggaatgggattatcttttatacagaagtttattcatgacaatgaccggtatgcggatcattgttgaagcgcgcagaataaaacagttgtcccgtttgctggtatgagagagaacggttcagatgagaggagaaggaacatggacgaaaaaatggattatcgtattgggttggatattggtattgcatccgtcggctgggcggtattacagaacaacagtgatgacgagccggttcgtatcgtagaccttggggtaaggatatttgatacagcagaaatcccgaaaacaggtgaatctttggcgggaccaaggagagctgcacgaacgacaagaaggcggcttagaagaagaaaacatcgtttagacagaatcaaatggctctttgagaatcagggtctgataaatattgatgactttctgaaacgatataacatggcagggttaccggatgtttatcagcttcgctatgaggcattagaccggaaactgacggatgaagaattagcacaggtgctgcttcatattgcaaaacaccgtggatttcgttcgactagaaaggcagagacggctgcaaaggaaaatggtgcagttttaaaagcgacggatgaaaatcaaaagcggatgcaggaaaagggatatcgtacggtcggggagatgatttatttagatgaagcatttcgaaccggatgttcctggtcagaaaagggatatattctcaccccacgcaataaagcagaaaattatcagcacaccatgttaagggcaatgcttgtggaagaagtcaaagaaattttctccagccagagacgtcttggaaatgaaaaagcgacggaagaattagaagaaaaatatttggaaatcatgacaagtcagagatcttttgatttaggaccaggcatgcagccggatggaaagccaagtccatatgcgatggaaggtttttcggacagagttggaaaatgtacatttcttggagatcagggggagctgcgcggcgcaaagggaacttatacggcagaatattttgtggcactgcagaaaataaatcatacaaaactggttaaccaggatggagagaccagaaactttacagaagaggaacgacgggcactgacgttgctgttattcacacagaaggaagtgaagtacgcagcagttcgcaagaagttaggtttgccggaggatattcttttttataatttaaattataaaaaagctgccacgaaagaagaacagcaaaaagaaaatcaaaatacggaaaaagcaaaatttattgggatgccatactaccatgattacaagaaatgtttggaagaacgggtgaaatatctgacagaaaatgaagtcagggatctgtttgatgagattggtacgatcctgacctgttataagaatgatgacagtcgtacggagcggctggctaagctgggacttgtaccgatagagatggaagggttattggcgtatacaccgacgaagtttcagcatctttcgatgaaagcgatgcggaatattatcccgtttttggaaaaaggcatgacgtatgataaagcatgtgaggaagccggatatgattttaaggcggattctaaggggattaagcagaagttattaacaggagaaaaggtgaatcagacgatcaatgagattacaaatccggtagtaaagcgttctgtatcacagactgtcaaagtgatcaatgcaattatccgtacctatggcagtccacaggcaatcaatattgagcttgcaagagaaatgtcaaagacttttgaagaacgccggaaaataaaaggtgatatggaaaaacgccagaagaataacgaagatgtgaaaaagcagattcaggaattgggaaaattatcaccaactggacaggatattttaaaatatcgcctgtggcaggaacagcagggaatctgtatgtattccggtaagactattccattggaagaactgtttaaaccggggtatgatattgatcatattttgccatacagtattacatttgatgacagttttcggaataaggtacttgtcacttctcaggaaaaccgccaaaagggaaacaggacaccttatgaatacatgggaaatgatgagcagcgttggaatgagtttgaaactcgtgtgaagacgacgatacgggattataaaaaacagcagaaacttttgaatcgagaaaaaagaaagggccttccgataatgaaagcccttttgaatatattttattttttgttttatacggtgagtatctctttctctttttcggcaaacatatcgtcgattttcttcatgtatttgtcgtgaagtttttgtgccgaggtttctccgtctttggcgacatcttcgggcattccctctttttgagcctttttcagcccgtcaatggcatcccggcgcgcattgcgcacgctcactttggcattttcggcttcttgtttcgactgtttgacgagtgctttacgtctctcctcggttaacgggggaattgatagtctgatgatttcgccgttattttcgggagtgatgcctaattctgaatccaaaatggctttctcgatcactttgaacatggatttttcccagggggtaataacgatggtacgtgcatcggggacagaaatattagctacattggaaagcggggccaaacttccgtaataatcgacccgtatgccgtcgagaattcgggggttggctttacctgcccgaatgtgagctaatgcttcatctaagaattcgatggccatagccattttttcttcggcagagttcaagtatgtctttacgtcgtccataatgaataaggttgaaatttttctgtataattagtttcgtgaacaaatgtactcttttttttaagaatagccatataagaccgggtttaatataccagagtccctatgttctctcctgacaatacttttttcaggtttccgaccgtatccatatcgaatacgataatgggcagatggttttctttgcagagggtggtcgccgtgaggtccatgacctttaatccacgggtatagatttcgtcgtagctgattttgtcgaatttctttgcggtaggatctttttctggatcggccgtgtaaataccatcgacacgtgtccctttcagcatgacttcggcttctatttcgatacctcttagggccgagcctgtatcggtcgtgaagaatgggtttcccgtccctcccgatataatggctacggttccgttttgcatggcctcgatagctctccatttactataatattcgccgatggggaacatattgattgccgtgaagacttgggctttttgtccgattttttccaatgcggagcttaatgccaaactgttgattacagtcgcgagcatgcccatttggtctccttttacacggtctacccctttggaagttccgctcaatccgcgaaatatgtttccgccgccgatgacgatacctatttctatgcccatgtcggcgatttctttaatttgtgtggcatattcggctattcttttttcatcgatgccatattgcttttcgcccatgagcgattcaccgctcagtttcaggagaatccttttgtattggttattcataatcagattcgttcttttaattaaacagtcgcatttatgcaaaaataatcaatttttatggttcacgtagcctttgaagagaaaataatatccgattagtgattatgagaaaagtcgagaccggcaaagtaagtctaccttgtcggtctcgattgtgtaggtgatttcctatttccgatgatttatcgggcgatgactttaaatatcttgcttccgacttttacgatataaatattggcagcagggatagaaacgatattttctcccgaggttccatttatggtttttacaagttgtccgttggcagtaaatatttgtatgagtgccctttccgatagaactatgttgattgagttttcagaagcgattacttttacgttttgagttgtgctactttctattcccgaatgtattaactgcacggtaataaggttagacgtttcggaatattcttcttcctcatagtcgttgtaacgcataccggtcacttcgtagccgtagtttccattcgtttcgagatctgtgaaagtataagaagtttgagaaccgtccgaaatggttaccggaacgagaggtattctcgtaacctctccggccttgctttcttgtatgatggtgatttcgtcgatgaaaaatctttttagtttgttttcttcgatggagagttgcatgttttcagcaccgtcttccatttcccaagtttcttcggcgtatccgttttcgtcgaaagctgttactttatgtatgttaagggcatcgggttctccgtctccgttgctgtctatcatataacctattcgataaatcgacagataatctccggctgttccacgggctttgatgtggattttgtatttaccgttattcgatgacaggttcattgtgggagtccataaataagagaggcttacgggaaatcttccgttgtcggctccgagcataccgttggctgccagtatgtttttcccgctccaacccggaactgcggtgtataagtccgggtcggtaacagagatcggatcgtccatagtaccctctgtcgatttttcgaaagaatcgtcgagtattttcttctcactgtcttgtgttgcggtgtgatattggtacgcttgcacgatgtatccttttgctttgggcagtctttcccaatttgccgtgaacgagttttccgatgtgccggttgcgtctaaggctttgggagtgaggaattcatttactctgatgatgttcgatgcgtttgtcgtttttccttccaccgaagcagcgacgtagtagtaatattccttttctgggtcgaggttggttacaggataagaattttcggccgtttcttgatctttcagaatatacgaaggctcggtacaagagtaagagatagagtttatcatgaggtctccaatttttccgtcacctttttcgatagatatttttatgcgcccgatgtttgcttgtgtgtatccgaagccgtcgaaaatattgaattcggttatttgggcaaaaagtaaagtttcgattgttccggtgctaagaagtatacctgctttgtcgaatatttcaatcttgaataagcttgaattttcttgggtgatattttctgcattgatgaggttggcgttaacgatatatttctccacaccggttccgataatttgttcggtgcttatgtagtcgtctgtcgcatcgaggataattttatttacaccttcgtagacgaccatatcggtactgccgttttcactcacgtttatctcccagccattcgggtaattgggcgattgcaggtctattttcccattggagtggttgatgttgccaaaggtttcatttacgttttggacgttggtcccgttcgtgtagacattgaggaaatacttgtctgctcccgatactttgtcccagttggctacgaatgagtctccggtataatcgctgtaattctgaatgacgggagcatcttgtgcccagacagataggctgtaaaaaccgatagtgactaacgtcaatagttttgagtaaagttttttcatgatggaatttttcggctcggattgaaaataacagtacaggaagacgagcctttttatcttaatggactgttttaattactgttacaaagatatgggaataatgctatgtataagattatagtttataaatataatattactttattttgttttccgaatggaactcgttcaaagtttatgtttaattaactcatcgggactatttactggattactgcaagtttcgcagggaatctgttttattttttgtcggcagtattgcctatattacagagttgatttgttatctttgtaaatacgaaaataggatgcggtttggcatagtcaaatcggaaataaaatttccgtttgtctctgcactcacctttcgctatctttgtctgttcataatgggtgacaattaaatgtatataagacggataataggatttttccttttttgtagtatcgctttttcggcttttgccgagatgccgtatcgtactgtgttgagaaaagccgatgatcactttgtcaatagggagtggcaagaggctgttgctatgtatgacgtattgttggaacgccgtcccggtagggtgaaaacgtatgtggatgcggttgtcgcatcggccatgatgaacgattcttcgtctattatgcaatatgtggttcgttcggaaatgcaaggactatctttggactcgttgtttaccggcatagacgtgttgtctcgatctatcggacagtcgggcatttatgaacaggtacttttgttggtgaaagaacaacagccgtggtttactcgggtgacgaataattatttattggggtattatgtgtttcggcatgatgctgaaaaaatacttgccgttgccgacgaattgttgtcggtgatgcccgggcaaattaattatttgaaagccaaagccgatgctttgttgttgcttggaaacgataccgcagcggtcgaggttcagaaaactattttggatatagactatcttaattttgatgcaaacttgtttttgggaagctattatgctataaagggacaggaaaaactgaaatcgatagatcaacagtatcttgaagattcgaacggtctttctatctctgcttccgtatataaagaggaaaaaaggcaagtgatcgacgacgatatagcttgtgctaaaaaatattttacgattgctgcacgggttcgtagcaataaatatctttcggaacaactttccatgctgtcgggactttccgatgagttgcctcaaagcagcggggttattcgtccgttcttgaaacgtttaaagcaagaatgaaacctctttgaaagcgaagcgttttttctctcccgattccgtcgataaaagcagatgaccgtcgagttcgacatcggcaatagaggcgtggaaaatattgccgtcactataaaacggatataccccgtcgtttcggtagagtgtcgctatatattctttgtggatacggtcggaggagtttgtaaatgtgtctgtatatcgctttccgaaagcctctgtgaattcgtctaatattttttctatcttgtaggtgcgacctgttatttgatataatgaaatcgggttgggggcatcgctataaaaatttttctgattgatgttcagccccattccgataatagcccgtgagaatgtactcccgctcagtacattttcgatgagaataccggcaatttttttgtcgtgccaatagatgtcgttcggccatttgatagagaatccagtggcgtatcggttcagaacatcgacagttgccagcgatacgatttcggaaagtaagaattgccgattggcagggatatgttctggtctgagtaaaagactgaatgttaaatttttgtaaggctcagattcccatgaattcccacgctggccgcgcccggatcgttgtatgtcgcagtaaacgatggttccttccgggagaagtctgtctttgtccgattcttggagatatgtattggtcgagccgatctcctttaagtgagttttttggaattttatttcttttgtttccatacttcgagtagttccgataaaggttcgcgtttgattctgggtagtttttttagcacttcgctataagcatggacgatacaatcgcaaatgactttatcgtcgatggaaggtctcagccaaatagaattccacaatcgtttattcgtgtggtatcccggttctatttcgggatatcgttcccgtaattctatggcaagttcgggatcgcatttgagcgaaattcgtttctcttcggccgacaaatcacagaagagaaacattttaccttcgattttgaaaaccaacacccattcatcgaatgggaaacattcggttacctgcggtagtgacagacaaaattcacgcaaagattctacgttcatgtttatcgacagtttaatggaggaagaaaggcatcttctatatgttctatttggaagtcttcattttccccgactaaggtaatgatgtcgaatcgtatgtcgaaaggtatatcgaacatacgaatataggcatccgtagcttggattatattttttatcttgcggaacgtaacggcttcttccgggcgtagaaattcgttgttttttcgtgttttgacttctacgacaaccaacgttttgtcacgataggctacaatatccaattccatttttccactccgccaatttatgtctcggataatgtatcctttggaaatcaaatattctgcggctcgttcctctcctgtttttcccaattggttatgttgcgccataagtacgaatttggaaaagcgaatatacgaagattcgatgaaaaaagaaatcggagcaagaaaaagtctgatggatatggcgaataattatctttgaaacagttactgacaataaatgcgaaaatagtctatgtctccggtaaaattgcaaataaaatttgcttttgagtctggcatgcattttctttgtaagaaataaaatacggaagattatgaaaaacaaatggattgtgccggctattatcatagcagtaggcttgtttttattggggcaacgaatcgaacaaggtatcgttcgttcgaaggaggctgtgcgtacggtctcggtaaagggtttgtcggagcgtgaggttccggccgataaagttatctggcctttggtatataaggagttggggaatgatttgggcacgatttatcgtacgatcaataccaagaatacaatcgtgataaattttctgaaagctaacgggatatccgacgccgaaatttctatcgcggctcccggaatcgtagatatgcaggccgaacggtatggaaaccaaagtgtcccgtatcgctataatgttacttcggtaataacggtatcttcgaatcaagtagagaaagtacgagagttgatcgtgaaacaagcctctttgttggaaaagggtgtggctatcgtttccggggattatcagtataacacccagtttttgtttaccaagttgaatgaactaaaacccgaaatgattgccgaagccactcaaaatgcgagagttgccgccgaaaaattcgccaaagactccgatagtaaattgggcaaaatatcatcggcatatcaaggacaattctctatcgaggatagggatgccaatactccttatttgaagcatgtgcgggtcgtgacctcggtggtatattatttgaagaattaagaaaaaggacaagagctactatgtggggaatattgtcaggatcgtatgagaaatgatagtgtttcccataaagcttatgagaagatatggtcgatagagcaaaggacgaacggtttatgagaatggccttgcaggaggcaaaagaggcattcgatgccgatgagataccggtgggagctgtcatcgtttgtaaagatagggttgtggctcgggcacataatttgaccgaatgtctgggcgatgtgacggctcatgccgaaatgcaagcgattacttcggctgcggcttcgctcggcggtaagtatttgaccgactgtaccctgtatgtgacattggagccgtgctgtcattacggaaagcagccgccctgcgtggatgcgattctgggtgcgggcatccaccgggtggtcgtgggttccgctgacccgaatccgctggtagccggaaaaggaattgcaatcctgcgcgcacacggcatagatgtgaccgaaaatgttctgcaagaggaatgcgatgcgctgaacaaggtattcttccactatatcaccacaaaacgcccctttgtttccatgaaatacgccatgacgatggacggaaaaatcgccacatacacaggcgcttccaaatggatcaccggggaaattgcccggactcatgttcaacggcagcggcaccgattccgcggcattatggtgggagtcggaaccattctggcagatgacccgctgctgacctgtcggatagagggtggccgtgatcctgtccggatcatctgcgatacacatttgcggacaccgctgcaatcacaggtggtcatgaccgccaaacaggttcccaccattcttgcgacctgctgcggcgacccagagaagcaggcggcatatcaacaggccgggtgccggattctttttctggaagagcaatgcggtcatgtgaatcttttgcaactgatggaacagctggggcaggagcagatcgacagcattctgctggaaggcggcggaaccttgaactggtctgcactggaaagtggcatcgtgcaacaggtacaggcttacattgccccgaagctgttcggaggaagggatgccaaagcacccattgagggtgcaggtgtcccgcttccggatgctgcattccgcctgaagaacagccgattggaacagcttggcgaagatttcctgattgaaagtgaggtggagtacccgtgtttaccggaatcgtggaagaagtcggaacaataaaatccatcaatcggggacagcattctgctgtactgactgttcgtgcaaaaacggttctggaagaaaccaggatcggcgacagcatcgccgtcaacggcatctgtctgaccgtcaggcagctctttccggatggctttgctgcagatgtcatgcacgaaaccttgaaccgctctgcacttgcacagctcaccgttggaagtgctgtcaatctggaacgtgccatgccggccaacggacgttttggcggacacatcgtagcaggccatgtggatggcgtcggacgcattgctaatatccgaaaagacgatacggccatctggtacaccattcatgcagattctgcgatccttcgctatgtcgtcgaaaaaggctctatcacaatagacggtatcagcctgaccgtggctgcggtggaacctacgggcttttccgtgtccacgataccgcacaccgtccgtcagacgaacctgcaccagcggcacaaaggagattctgtcaatctggaaaccgatgttgtcggaaaatatatcgagaagctgcttccatcagaagcactaaagcaaaacacgctcacaaaagaaatgctgctgcgctgcggcttttaaggagagtttacgatgaacttcaataccattcccgaagctttgcaagacctgaagcaaggaaaaatcattctggtaacggatgaccccgaccgtgaaaacgagggggacttcatctgtgctgccgaatttgccaccaccgaaaacatcaactttatggcgacccacggcaaaggtctgatctgtatgccgatgtccgaggctttcgtccagaagctgcaatttccgcagatggtgcagtataacaccgacaaccatgaaacggcatttacggtgtccatcgaccacgtttctacttctacgggcatttctgccgcagagcgttccattacggcgatggcttgtgtggacgatcacgcaaaagcagaagatttccgcagaccgggccatatgttcccccttctggcaaaaaagaacggtgtgttggagcgcaacggtcacacggaagcaaccgttgacctgtgccgtctggcagggctgaaagaatgcggcctgtgctgcgagatcatgcgggaagacggcaccatgatgcgcgccacggaactccagcagaaggcgcaggaatggggcttga

SEQ ID NO: 3885 - DNA, 19046 bp, synthetic construct
  source 1..19046: mol_type = other DNA
  misc_feature 1..19046: note = Synthetic
ctacggtggctctggccgcagcagctttgcatattgaagaagcacagattgccaagacgatggcattcatggtggaagatcagccggtgctggtggtgtgtgaaggcacagcccggattgacaatcataagttcaaggaaacttttcataccaaggcaaagatgatgagtgcagaacagctgatggaatatgtcggccatgaaccaggcggtgtgtgcccgtttggcctgaagccaggtgtggatgtgtatctggatgagagtctgaaacactgggacaaggtatggccggcggccggtgcccacaacaatgccatctgtgtttctctggaagaactggagcagtacagcggtgcaaagggatgggtggatgtgaccaaggctgccgcctgagacaaacaaagcagagtaatggtataatactcctgttttggaggagctttatgaagggacgccatttgattccgctgctgagcatcatgctggcagtcagtgttctgcccgtgcgcgcagatgatgattattccgatacaacatactggacaaatctctgcacatcgggaaatctgacttcagcggaaaagacttcctgtcagggctttgtggattatatgtcatcccagtctgattcactgtctgcatcgattgcagatattgacagccagaaggagcagattgcggccaacattgaagaatatgccgctaagatctccgactatcagacccagattgatgatctcaatgcgcagatcaattccctgcagacacagattgaggatcagcaggcacagatcaatgaacaggaagaaaacgaagcttctctgcgtgagaaggtgaaccgtcagattgtcaatgcccagccgacgatgcggctgtcaacgatggtggatattctgatgggtgccaaatcatttgaagatctgatccgggtggccaatggtctcagtgatatcacatcctacagccattcgctgttagtacaactgaataatctgattgcgtccctgaatgatgccaaggcacaattgcaggccagccaggatgagctgaaacagaagcaggatgatgtgcttgcaaagcagtatgaggcacaggtcattcagcaggaatatgaacagcagcaggcagatttgatggcccagcgagcttcgattgtgtccaatatcgaagacattcagtcacagatgaagaatatttcggatgcccttggccaggtgacagccagtgacggctggacatggccggtgcccggtgtcaagatgacacccggtgcaggcacatggtattacgcttccggcggcaagcactatggtgaagacttcggctatggtgttgtctatggccagtcctatgtcgtcgcagcggccaacggtgttgtcctgtatgcccatgatgccggctgcggctatggccatcttggcgactactgcccggtggtcggcggcggcaatgaaatcctgctgctggtcagtgtcaatggctccgcctatggtgtcaaatactaccatctgttaaccggatccttctcagtatccaccggacaggtagtcaatgccggcgaccggctggccaatgtcggttcctccggcaactcgaccggcccgcattgccatatctgtgtgtattatcttggcgatgcttccaatttctcgtattatgctgagaactggaatggcgacatggcgatgaataccggctggaattccagcacggaaagaatctgtgaaaatggtgcttcggcaccatgcaaagtccgtccggagacaatctttggaacaggttgggaataaggtgcattgaagcacctttttctttggggtatgatgtgttcaggaggaatcgtatggcagtttatacaatgaaaaatgaggaagcggcagtcaccattgatgagcacgcatccgagattcacagcttcacactggcaaagaccggctttgagtacatgtggaatggagatcccaggtactggtccggccgcaacccgaccctgtttccgatggttggcaagacatgggatgatacactccatatcaatggcaaagagtatcataccggcaatcatggctttgccagacacagtgatttcacctgcattcatcatgatgacagcaatatcgtgatgcagctgaaagacagtgaagaaaccttgaaacagtatccgttccatttcacgatgaccatttcctatcacctggaaggcgcaaagctgtccatccgctatgaaatcaccaatgacaatgaagaagtgatgccgttcaacttcggcctgcatccggctttcaactgcccgagtgatccggcaaagaagtatgaagattatcatattgacttcaatgcaccggaaacgttcacctggaaggaaacgtacctggccggggcaaaacggatgtccctgcatccggatgcactgagtcagacgatcatcattcatcatcctgacagtgatgaggtatcactcaacgatggcagccatggtgtaaaggtacatttcaccggctttgaatggctggcattctggagcccgcatgcaccgtttgtatgcattgagccgtggtattcccacaccgattttgaacaggtcaaagtgccgtttgaaaagcgggaaggcacccagttcctgcagccgcatgatacgttccatgcaggttatgacattacagtgttctgagattgacactggaaacccgtcctgatattctttctcatgtaaggcttttcagaagggagaatatcattcactatgttcaacattattgtctgcaagaactatgacgaagtcagcgaacaggcattcaagctgatgaaggatatcatgcgcaaggaaaaaccagtgctgggtctggcaaccggcagctcaccagttggtctttacaagctgatgatccaggatcacaaggaaaacggtacatcctatcagaatgctttgacgttcaatctggatgaatatgtcggtctcaggcataccgatgagcagagctactactatttcatgcatgaaaacctctttgacggcatcgactgcccggaagagaacatccatgtaccggatggcagcaccaatgatcctgaaaaggcagctgcagactatgagacagagctggcaaagcataccgttgatctgcaggttcttggcattggctccgatggccacattgccttcaatgaaccgggtacaccgcttgattccgtgactcatgtgactgacctcaaggaacagacaatctctgacaatgccagattcttcggcggcgacaagtccaaggttccgaccaaggcgattacgcagggtctggcatccatcatgcgggcaagaaagattgtgctgattgccacaggtgccaataaggctgatgccgtctatggcatgatcaagggtgaagttacaacagactgcccggcaagcatcctgcagcgccatgatgatgtgacggttgtgctggatgaagctgctgcaaagcggctttgagcatttcacttttctttccggaaatgatttggcatactgtcccatgtaaacggaggaaacaacaatgaatattatcaagaatacagcggaatatgatgagacactgaagaacaacaagagtgtatttgtagacttctatgcagactggtgcggaccgtgcaagatgctgggaccggttgttgagcagctggcaggtgaaaacagcgatgtgacttttatcaaggtcaacgtggatgataacccggaagttgctgagcgctatggcatcatgtccattccgaccctgattgcattcaagaacggtgaggttgccggcagctctgttggcttccagccgaaagaagcagttcaggaactcatcaataaagcaaagtaagaaagcaaacgaaaatctgcagcgatgactgcagattttttcttttgacaaaatgtaagctgtctttctgatctctgacatggttcccctgaaggatacaagactgagtgtcttacgatgctcttcagctgaaaactgtgaggcagttgagagaatgctgcagcatgcatcatctttgcctaacagatatccgggctcatggacccgtttttttcatgcgatggctgggcaatcatgctggaaagctgtaaagaacatgttaattttgaaagcatcctgctggaattttccccagcaggtctttttatggcccagaagtttagagattgcaaacaaaaagtattgcataagtgaagcagtccggtataataagcaaggtttgttaaaaagtcatttttggtttagctaaactaaacatgagagggggcttgcaagtgatagatattggcaatcgaatcaggcagctgcgcatcaagaatgagctgactctgcaggagctggccagccggacagaactgaccaagggctttctgagccagctggaacggaatctgaccgcaccgtctctggcaacgctggatgatatctgtgaggcgctgggtacggatctttcgcatttcttcaaggaggaaggggaagagaagattgtgtttacgccgcaggatgcttttgtcgatgagcaggagggcagagtgctgcactggattgtgcccaatgcgcagaagaatgacatggaaccgctgctgatggagctgctgccgcatggacgctctcaggtgattgagccgcatgagggtgaggagtttggctatgtgctgcagggcaggattgtcatcatgcgggacacggaccgcaagggtattgctgcccggcgcggggatacgttctatctcaagggtgatacggcgcactatctggaaaaccgtacggaaaacaaagctgttgtgctgtggatcagcacaccgccggtattttgaaagcaagaggggataagagaaaatgaagaaactgatcgaaatcaagaatgttgtaaaggcatttgaccgccaggttgttctcaaggggatctcactggacatcaatgagaatgagtttgtgacgctgctgggaccttccggctgcggcaagacaaccctgctgcgtatgatcggcggctttctggaaccggatgaaggccatatcctgattgatggcgaagatcaggcaggtgtgcctgcctataagcgggatgttaacacggtatttcagcactatgctctgtttccgcatctgaatgtctatgacaatattgcctttggcctgaatatccgcaaaatgccaaaggacatcattgaacaaaaggtttcccgtatgatctcgctggtgggtctggaaggctttgaaaagcgtgatgttaccctgatgtccggcggccagcagcagcgtgttgccattgccagagcgctggtcaatgagcctaaggtacttctgctggatgagtctttgagtgcactggataagaacctgagaaaagaaatgcagatggaactcaaggacatccagaaggaagtcggcattaccttcatctttgtcacgcatgatcaggaagaagctctgaccatgtctgacaagatcgtcatcatgaaagatggtgagattgaacagatcggcacaccaactgatgtgtacaatgagccgatcaatgaatactgtgcccgtttcatcggtgattccaacatcatcgatggcacgatgaaggcagaccgcagagtagagtttgatgatacggtctatgactgcgtggattatggcttccatgagaatgagccggttgatattgtgatccgtcctgaggatattgatatcgtgaccagaaacagaggcctgctgaatggtgaggtcaagtctgttctgttcaagggcgtacactatgaggttattgccgagacatcctccggtacaagtaagaccgttacgatgcatgtgaccaaggcacaggacgtcgtcaatgaagaagcccgtgaaaagatcagtgcttcttcgttctacatggatctggaagacgttgccagcctgtctgatcctgaggtcattgcccgtgccaatgcccaggcatggaatgatgataatgaagatgtatctttgacaaccgtggaatatgatgtcaagccggaagtcggcgtttatccgtgcacatttgccacagatgccggcacttccatcacgatccgcattcatgtggtcaagccgcaggttgttgaagatacggaaaatgaagagaagatccaggcatttgatttctaccgcaatgcggatgatatcaaggagtctgttgccctggatacggatctgatccgctgggcagatgcctatgcatgggataccgaagataacagccgcgttgagatctgggacgtgaagtatgactttgatgaccagaatatcaccgaaggcgactatccgattacgttcagcacacagggccgcgagctcaagatcgagacaactgacaagcatgaagtcggtgagagaatcggtctgcgctgggatccatctgacatccatgtcatgagaaagatgaggtaagcacatgaagcagtttaacaaacttgtgtatccttacatgatctgggccttcatcatgatcatgctgcccatggtcatgattgtcctgtatgctttcacagtcaaaggaaacgatgttctgactttccagttcaccatttccaactttacccgtttcttctccgattccatctttccaagtgtgctgtggcgctctttaaagatggcattcttcacaaccatcatctgcattgccatcgggtatccaactgcctatttcatggcaagaatgaagccgagaagccagggactgaccgtattgttaatcacgctgccaatgtggatcaacatgctggtgcgcacctatgcctggaagggcatcctggccagaaccggatggcccgctgaagtacgtgtctatatcggcatggtctataacttcctgccgttcatgatcctgcagatctacaatgcattaaacaagattgaccctgctttgatcattgccgccaatgaccttggcgccaacagccgccagacattccgcagagtcattctgcctctgtcactcagcggcgttgtcagcggcatcacactcgtctttctgccggcggtatcttccttcttcatccccaagctgctgggcggcggaagatatgttctcatcggcaacctgatcgaagactacttcatcagtaccggtgactggaactttggctccgccatcagtatgatcatggccattattattctgatctccatgtacatcacccgcaagctcgacaaagaaccgaaggaggcatctgactgatggaaaagaaaacagatctcaaggctaaaatctggcttgccctgatcatggtgttcttctatgcaccgattgcctatgttgtcttcttcagcttcaaccgttccaagtcactgaccagatttaccggcttctcgctgcgctggtatgaagccatgttccataacagatccattctggaagccatcggctataccgtactttgtgcggtgctggcaacggcgatctccacgctggttggtaccatcactgcgatctctttaagcaaaaacaagaaagtcatcagagaagccgttacccaggtcaataacctgccaatgctcaatccggagattgtcacggcaattggcttaatgctgttctatacatctctgcgcatcaagacaggcttcatgacaatgctgctggcacacattgccttctgtattccctatgtcatcctgaccatcatgccaagactcagacggctggatcccaacattgccgaagctgccatggaccttggctgcacaccgatgcaggccatgttcaaggtcatcatcccacagatcaaagagggtattgttgccgcagcactggtcgcattctccatgtcctttgatgactttatcatctctatgttcacgaccggaccaggcgtatccaacatttccatctatgtctatgccaacgtcaagcgcgtcaatccaaccatcaatgcactcagctcgattatcgtgctgatcattacgatcgtattgatcatcgtcaacgtcgtaccgatgatcagaaaggggaaagagaacaatgaagcatttgctgaagaccgcattgcttagtgcaacctgtctttccatggctgcctgtgccggcggcagcggcagttatgtgcagcaggtggcagatgccaaaacagaatatggctgcagtgtcatcaacgtcttcaatgccggtgagtacattggcgaagatgtcatttccaacttcgagaagatgtacaatgcccgcgttaactacgatacgtttgaatccaacgaaatgatgtacacaaagctcttgggcggcagctcgtatgatgtgcttgtcccgagcgactacatgattgagcaattgatgcaggagaatatgctgcagaagattgacatgagtgccatgaccaactacagcctgctcgatccgaatgtcattgagaaccagaagtccttcgatccaaccctggaatattccattccgtatttctggggatccgtcggtcttgtttacaacaagaccactgttccggaggaaaagatcaggaaagagggctggaatatccttaaggatccggaatacaagggcaagatctatttctatgattcccagcgtgatgccttcatggttgccttcaaagcacttggctattccatgaatacagatgatgaagaacagattcaaaaagcgtatgaatggctcaaggaaatgaatgacaccatggatcccgcctatgtcacggatgaggttattgacggcatggtcaatgccgaagaggacatcgccctgatgtattccggcgatgcggcctacgtactgtctgagaacatggatatgggctggattgaaccggatcagggcaccaatgtctggatcgatgccatggtcattccatccaatgccagctgcccgggtcttgctaatgccttcatcaactacatcatctccgaagatgtacagatggaaaacagcagctacgtcggctatacatccgttgacaagagcgtcgcggaatacatgagcggcaaagacggcgactactttgaaaacgatgcctacatcccaagaaccggttatgcaaaagacgaaacattccactataatccggttctcaagcagaaactctccgatctctggaacaaagtcaaagtaggctgatatgcacaaggtcactgatatctcaagatgtcaggaaatcgcatcggcttgtacagacgcattcctgcatgaaccgggaacatttcccgccatgctggatgtgcaggaaaccatggctctgatgcaggcagttatccatatggcagtcttttccggatcactctatgaaaatgaagcacaaagtgcctggatgtttgtctatcacaagcacaatggtcccagtatactggcacaggcaaggatgggatggaatgttctgagacatctgaaaccagcccacacgatggcaatgcagcaggcattgtcatcatggcagccggcaacggaacgcttccggaaggaacacaattacctgtatgtctatctctttgccatacgtacagaaagccagcatcagggcatgatgcgcgtcatgctcagacagcttcagaaacaggcagctgaagaacagatccccatcattctcgacacggattcaccgatcaaaagacagaagtatgaagcctgcggattcagaactgcagccagtgcagaactgccctgcggcatctgccagtatgccatgatctggcgtccttactgatagttttggttgcaattgacctctactcttggtattataagaaagcacgaaaagtgaacgtggttccttagccaagtggtaaggcaacagactgcaactctgtgagcgccggttcgactccggcaggaacctctcagataaccgtatccgatataaaggatgcggttttttactacagccatcatttactactgttctaatgtctgaattcatgtataattaatggcgtatcataacatacctagtgataccaggttgctacagaaaggtagtaaaccaaaaagctctagcctctttcattgaaagaggctatctttattattaggagggcagtatggaaccaataaattaccgaattggccttgatatcggtatcacttcagtaggatgggctgttttgcttaataattcaaataatgagccgatccacattcttgatatgggagtcaggatttttgataaggcagaaaatcctaaaaatggggcatcactggctggtgaacgcagaatggcgcgcagtgtcagacgcagaatccgccgaaagagactcagattgagtacaatcaagaaactctttgctgattatggacttgttgatctagatgaattcgaacagcattttcacgcaaagaatcttgaaaacgtatatgaattacgctgtaaaggattggatgaactgctgacgggcgaagagcttgcgcaggtattgctttttattgcaaaacatagaggcttccgctctacaagaaaagcagagacaaaacaggataaagatagtggcaagatgcttgctgcaacaaaagccaatgcaaagctgcttgaagaaaagaagtatcgcacagttggcgaaatgttctacaaggatgatgcttttaagaccgctagaccatatgcatctattccgtatgaatatacaacccgcaataagcaaaagaactaccagcatacagtgatcagagttttgcttgttgatgaagtgaaacagatttttcaggcacagcgcaatcttggcagcaaatatgccagcattgaattcgaaaataaatatctggaaatcatgcaggagcaaagatcatttgatctaggaccaggtaaacaggctgatggaaagcccagcccgtatgctgttaacggtttccaggataaaacaggaaagtgcacttttgaaaaagatcagataagggcgccaagagcagcatatacatccgaagttttctctctatgtgaaaaactggttcatttgaaaatcgtaaatgcggaaaatggtgatgactattttctgtctagtgaacagcgtgacaagatttttcagtatgcccatagtcataaggaagttacatatgaaaatctgagaaaactgctggggttatcagataatgatcggtttaagacattgaattatagtcctaaaaagaaagaagattatcgattgccgatcagcgagagagttaagaaaacggaaaaagcaaaatttatcagtctgagcaattactatgacattagaaaagcaattggaagtgatgctattgttcctgatcaggatcttgctgatcttgtagatcgtattgctgtcattcttaccagctataaaaatgatgacagtcgtactgcagagttgaaaaaactgaatctgaatgatcatcagatttctaacctgttatatctttcaccggcgaaatatatgcacctttcgtttgtcgcaatgaaaaaaatcattccgttcctgaagaaaggcgagacatacgacaaagcatgtgaagatgcaggatatgatttcagaaacaataataatggtgagcggatcaagctgatcaaaggcaaggtccttaatgattttctgaaggatattccaaatcctgttgcgaagcgcggcatttcacaggcaatcaaagtattgaatgcaattattttgaaatatggttctccgcagtctgttaacattgaacttgcaagagatatggctaaaaactttcttgatcgtaaggagagccagaagtacatggaaaaccgtgcttctgaaaatgaaaagatcaagaaagaaattcaggaactggggaagtctaatccaaccggactggatattgtaaagtacaggctctggaaagatcagcaggaatactgcctttatactggtgaaagaatcaaacttgaggatctttttcagcctggttatgatatcgatcatatcattccttacagcagaagctttgatgacagctaccataataaagtacttgtaacatctcaggcaaaccgtgaaaagggaaacagaacaccgtatgaatacatgggcaatgatcctgaaaaatggaatcgttttgtaactcttgtaaattcctatgttacggattcgagtaagaaaatgaatctgtttaagcatcatttcacttctgaagatgcagctgaattcaaagaaagaaatctttcggatacaagatatatcacccgtgcagtttataatctgattcgaaacaatctgcaattctctggatgtgaaaatacgcgtgcagtcaatggtgcaattacatcatatctgcgcaagcggtgggctttaggcgaaaaagaccgcagaacagatattcaccattctgttgatgctgtcatcattgcctgcgtgactcctggaattattcagaaaattacgcgttacacgcagggcagagaattggctagaacgcgtggcatgaaactcgttgacgaaaaaactggagaagtatttgatccacgagattatacgacgcaggaatgggatgaaatgtttggcgtaaaaccaccgcttccatggaaaacattcaaagaagaagtggagttgcgtcttggcacagatccgttatatcttcttaatactcaacatgatttcaaaaagaaacttgattatccagactggatgctggataaaaagtacattcatccgatctttgtttcaagaatgccaagacataagaatacgggaactgtacatgacgcaacgattggcagcccaaaaatgttcaccgacggttatgttattaaaaagacggatcttaccagtctaagattggataagaatggagaaattgaaggatattacaatcctgaaagtgacatgctgctttacaatgctttgaaagcccgtttaatagcttttaaggatagaaaagaaggcgcaaaagaagcttttaaacaacctttttacaaaccaaaggcagatggaacgcaaggacctcttgttaaaaaagtgaagatctgtgataaacagacttctggtgtcaaagcggcaggaggcattgccaataatggagatatgatcagaattgatatcttcaatgtaaaaggcaaatactacatggttccgatctacgtttcagatacagtcaagaaggaattgcctaacagagcggtagttgcacataaacctgtttctgaatggaaggttatggatgataaagatttctgcttctccttgtatcccaatgatttgatccgaataagcaaaaaaggcggaataaaagtaattgatgtttctaagaagcgctacgctgagagagaaatgttaggctattatacaggtgccgatgtttcagcgggggcaataggattagagaaacatgataattcaattacggcaagaggaattggtatccaatcactaacggtatttgaaaaatacacagttgatgtacttggaaatatttcactagtcagaaaagaaccaaggatgaagtttgggtcgtaaataatatggggtatcgtaacatcaagattgattcatccgtggatgtgcgaataagaaattaccagttgttaattaatgattattccattccattagaagatatgaattctattttgattgaaaatccgacggtaaaactatcagaatactttttacgaacatgtgcagatgaaggaattgcagtatatgtatgtgatgaaaaacatatgccaaatggagtgcttcttcctctggaaaaacattgcaggcactttaaagaattaagaacacaaattgaagcccccaaaccgttgaaaaaacgtatctggcaggaaattgttatatgtaaagttgctaatcaggcagaatgtattcgcttgagcggtaaagaaggctgtaagcaattgttgcaaatgtcaaaagcagtacagtcaggcgaccgcacacttgtcgaggcaaaggcggcagaattttactttcatcaattatttggtcaggactttgtaagaagagaggaggatgctttaaatggtgccttaaactatgggtatgcgattattcgaggaaacatcgcaagaaccattgttgtacatggcctagagccatcacttggaattaatcatcatagtgaattgaatagttttaatcttgcagatgactttatcgagtgctttaggccacttgtagacttactggttttctccatgaaggatgatatcttgagtgaggaagaacttactccagaaattaagagaaagcttttctcggtgttaactcttgatatggaaattaatcatcaaaagcaaattatcaacaattgtgtggacatactgactgaaagctatattcgttccttggaggagggggaacaaatgttactaactccaaaactgttgaagttaggaatacatcagtatgagtaaatttatgagaatattgttattttttgatcttccaacaaagacaaaaacagaaagacacgctgcagccaaatttcgcaaatttttaaaggatgatggctactacatgatgcaatggtctgtttattcaagaatttgtaatggggcagattcagtatcaatgcatgagcagagggtcctttctcaacttcctgaaagaggatctatcagagttcttgtcttaacagaaaaacaatatgaatcgattgatatcttacttggtgataagacagcgaacgatactgaaaaatcaacaaaactagtagacgttttctagaaaaacaacacttttctatcacgatctgacttttttcattgattcagaaaaaaagataaccccagactccaatccttgcctggggttatcttgctccctatcataacatacctagtgatgccagggagctacagcagtgcaagctgtgtcagtgtacgcacaccatcataacatacctagtgatgccagggagctacagcttccggtgctgtctctgtcactgtcactggatcataacatacctagtgatgccagggagctacagccgttcagaagaatctcaatgccagggcaagatcataacatacctagtgatgccagggagctacagcagccattgagcgtgagcatgaagaggctgcatcataacatacctagtgatgccagggagctacagctatgggaatcgccttgtgtagaaaaagttatcataacatacctagtgatgccagggagctacagcatcgatcgagctgttaaaggatacgaccttatcataacatacctagtgatgccagggagctacagcggagtgtaagcgtgccccgttcgcgtaacaatcataacatacctagtgatgccagggagctacagcaaaggcgatcttcccaagcagaaaatctatatcataacatacctagtgatgccagggagctacagctaagccgctgatcagagtgtatggcagcggatcataacatacctagtgatgccagggagctacagccattcttgcaaaactgaccaattttgacacatcataacatacctagtgatgccagggagctacagcagaagctgctgcgaggcgtttaagttgaggatcataacatacctagtgatgccagggagctacagcttctaccttcacagatgtaaccagctgacatcataacatacctagtgatgccagggagctacagcatcttctgaattggataagagctatgtttcatcataacatacctagtgatgccagggagctacagcaatgatcatcggctttccgctcctgtatctatcataacatacctagtgatgccagggagctacgccagggagctacagcaatgatcatcggctttccgctcctgtatctatcataacatacctagtgatgccagggagctacagcagtatcgccatctttcacagttatcggaaaatcataacatacctagtgatgccagggagctacagcctcgcgctgagataatcctttctctgtcctatcataacatacctagtgatgccagggagctacagcttccctgatctgcttacttttctctgtccaatcataacatacctagtgatgccagggagctacagcctgactgatcttttcttcccagtccaaacaatcataacatacctagtgatgccagggagctacagcaatcggtattgcgtttttcctgctatcaaatcataacatacctagtgatgtcagggagctatcgtggcttcaagcatgctctaacatgatgtcagatatcatatatggaaagtggaaaaatcagagtgccttgtgagcaaagaatactattgtgttagtacttagcattctgattgttataaaagattattctgccagtactgtctgaattttgtggctttctttctgtttgagaaacagtgcggatactgctgagatgatcttggcaatgatggtgctccaccagaccatgttctgtcctcctagtgatgcggtaattgccatgagtgtgaacattgtgatgagtttcatgaaggccagaatgtaggagagtgtattcttttcagttgcgtagaagctttatgttgtgattttcgtgatggcatcaaaggggatggatgtcaggaaaatcaggataatttctgctacatctgcgttgacttccggtgaggagccaaacaggatgccgatatatggtttcttaccgcatagatcaatgtacatcccacaaatgccagcagcagggagaagagatatgccattctctgtattgccttcagaccgtctgtttcctttttgccataatacatgctcatgagcggctggctgccatcgccgacaccctgcaggatgagatagatgacggcaaaatctgcaatagcctgcgggccgccataggaagcagagaatcggttggtgataatcaatgaaatatttggcgtcattgccagaccgaaagggccagtccggtggatagaattctgacgataatcggtgcggtctgtttttcatttgttttgaagatgatgagttttctgcggaaggtataaatcaaagcggataccatggtgacgccttggccgataatggtcgtaatggcagcacctgtcatacccatcggaatgatcgtgacgagtacatcatccagaatgatgttggtgataaagcccagcaccatggaaaccattgcccagaaagatccgccgtcattgcggatgagcgggatcagcccggtaccaaatacctgcagcaaggatccaagactgataacgaaaaggtattcactgccataggcatcaatctgtccatctgcgcaaattaaggaaagcagcatacgggaagtgctgcatacagcaattgtcagaatgatactgcataccagcagaatgcaccaggtggtggctagatatgcctttgctttgtcttcgttctgttatgctttggaaattgtgtaatggacagcacagcccagactgattccggttcccgctgactgaatcagtgctacgactggatacgcaacattgatagcggaaagtcctgcatctccaattttgttgccaacgaaaaagccatctacgatggcatacacacatgataaagcaaaggcaatgacagaaggaatcacatactggaaaaacaaattctgatgcttgcgcatgatcatcctcctgttctttgaaacagttggaaaactgtgccaacaggctgttcaactgtgcgatcttttcctcacccatcgtattgatcacatgcatctccctctgatgcagttcctcaatgatcttttctgcatacgttcttccagtctgtgttagtacaatctctttattgcgtttatcagcctgtaatgcgcttaactgcacatatagcccagcttctcaaaatttctgagaatcgtattgacagtctgcttcggacagctccatttctgatagattgattcctgcgtacacggcctttcatcttccagaagggcatgcagaatgatcgtttcgtttgtggaaagcccatgtgacgctgctcagtcatcatagacggcatttgtctctctccagacagtataaaactgcctgagcacatttgttttgtttgtcatatgattcacctcaaattagtctgaaatcagaccaaatgaatctaatctgatgccggactaatgttaacaaatgaatctgctgcatcgcatgcatgtattgcgctttcattggaaatgtagtataaactatctgcagaaaacgaagaaagttattcatctttttttgtgttatggggtcatggcggaatcggcagacgcatcggacttaaaatccggtgatggcaacatcgtgtgggttcaagtcccactggccccatccttgaaaagccctttcacttgtgaaaaatcaacaaagtttctatcgtttatttcaatattggcacactttatcagcttcatatagtcggaaatatggtcagattgctgtccattgggctgtcagagtggtcagaaagtggcagatagaggcagagtgtaacatctgactgtgagaataacattcagattctgaactgtatttgtctgaatttgtcaatataaacttgattgaaagaaaggcagaataaagtataattgctcgtggcactgctttttttcagaaaattgtgggggattgggaagtatgtgtgagtttctggaaaagcagaggttaaatggaggaaagtgatatgaagagaaacatgaaagcaacttctgcactgctggctgttgtgctgtgcggaggactggtgtttgctggatgcggcagcagttcctctgcagctgcttcagcaagtgcagcagcttcttctcaggaagctgactatgaaaagggcgtggaacagatgaatgaggggaagtatgccaatgcggcggagtatttccgctctgccggcgactattctgatgcagatgctcagcgccttgaggctgaatatcagtatgttgcaagtcagaggatgctggctaccagccgtgggaaggaatacatgcaggaccttcttgacaacaattacaaggatgcccaggatctcgctgcaaagctgggatttgaggcatcatcatcttcttctgctaactgagtaaaataggattccgtgggctcagcggaatcctttttattatgcgtaggagcgctgttgagcaccgaagaggtgcgaaacagaaaacctcccgctatgcgggaggaaggccggtgcttcttatagaaagaa

SEQ ID NO: 3886 - DNA, 18856 bp, synthetic construct
  misc_feature 1..18856: note = Synthetic
  source 1..18856: mol_type = other DNA
gcaaagctaatgacacaatacgagcgtatcattgcactagatgagcatcgccttacggagattggcaaatctacaaaaagtatatttgaaatttataattatctcaaggatactcctattacaacaataacagttgccgaaagaaacctgggattctcttttaatacagtatctaaattgtttcattcattacaaggctatggaattgttgaatgccatctaccttcctacagaaatagagtttttcgatattctgaactggaaaacttgatatgcgctgattagctgcacttgtaaattaacaataacaataagaaattgaaaggtgatgaatgtgggaaaaggaacgaacaagaaaggcaaaaaagttgcagttccaaaagccaatatccaagaattaaatgcttccagagatggcggacaaatcgccctcagaggctactcgtatcaattcttgtattcgtgctatttaattctttcgtcatcaagtccgggcatttcttttcagcttgagggaattgaagatattgattgtattaagcagaaaaatgacagcagtgatgtcacgcatatacagctgaaatattccgtcaacaaacaggatgccagctttttgcctgatgtgcttaaaaactttcttgaagcatatttgctggatcaaaatagattttttaagctggtttatgattttcctgttgcaaaaggcaatctaagtaagatatttgcatctgatctggacgaaaaatcacgcatctattggactggtgtgatttcaaatatcaagcaaaacactccttcttggaattggtctgtatatgatttcgatgaatttatttcacatttgtcatttgagaaaattgaaaaatctatacttgctgctgaaattgaaaaagccttaattggaacttatgagattaacacggacaatgtttctttatttgcaaacagcataaaaatcctttgctttgaaaaaatggagcagcgggcctatgtgaccaaagcggaattagattcccaaatccaatctgtcaaaatagatatcagtaagggccctcagaatccagctcatagttggattcgtaaactggactactctaagcctagtcttgatgaaggtcgtagtttttacgaggggaaaaaagcaacaccagcagatatagcaagtgggtttccaatcaaacgaccgagcttagaaaaagatgttattaattccatttgcgaaaacacagttactgtaattaaagcttctagcgggcaaggaaaaaccacgctggctttgcaggcagcatatatcctccaaaatgaatatataccatatcaattactatggtgcgatgaaatcaaagagattgggaatattgcccaatattttaaagcaagaattcagcttggtgaaaagattctcatcttaattgacaatctggataaccatctcagcaaatggaattatcttgttcaactcttacaatccgaattgcattgtcattataagttgctcatcacatcgcgtgagattgattggtataattatagtggcgacttgagcaatattcagtctttgaaagtaattaagccggctttagaagaaaaggaagcaatagagatattcaatctattcagagaggctaagcaacttcacccaagcataacaagctggcaaagagcatggaataagattgcagaaagacaactacttatagaatatgtctacttgcttactcatggcgagatgttatcagaaagaatagcctcacaaatatccgaaataggacaatcatcttctggtaaagcaaaatgtgaaatcctacgcaaagtatgttttgcagatctttgcggagtcagtctttctgttgtcaacctttatgcgagtcaatcagaagactctggctcggattttggtgagctcttaaaaagtatggaatccgagtttcttgtgcacgtgaatgaagagagcaggtatattgagggtctgcatcccattcggtcaaagcatgttgtagagagactgcatgaattcctgccgattgacgataccgccatttccgttatgaaaatggcggacaaagcggacctgccgatactgttttcccatctaccggagtttaccctgaacaaagagacatttttctgcgatgcggtcgagagcctatgggatgaaaaagacctttcaaactatacttctgcaatacaggggcttttttcagggagtgtgatgcagtatttcctttctaaccgggctgcgtttgacgatgcagatgcccacggcggtcttttccttctatcgaccgaaatgtgcccatttgctgtattcgaggatttcggtgtgtcgatggatacgctggacaaaatgcgggaaacatttccggataataagaatatagaatatctttgccgattgcgggagcgtattcccgcctgccatttgcaggatacgtatgtctatgttttctgcggttgtctatataggaaactgcgcccccttcgttttgacggaataaaggacatcacggcctatgcctccatttctgagtggatctataacatcaatccggagtggaatgtgtcggccggattttctctggacgatctttggagcaagtcggaaaaattgacgctggagtgcatttctacgctgatgtatctctcctactgcgggaacagagagaaatatatggaatttgtggaacgaaatcttaagagtattcttacgtacctcaagcagcggacaagatcacatagggtatttattgattccgaaaaaaatgcgattcatgttgagtatatccttcgattacgcaatatcgaaacaggaaatgaacaaagcgtatcaaggctgaaatccatttgcaaagccttgcctatttttgatttgtactgtgcggatgcactcaagccgacggttaatttgctctcggcttatcctgttccagacgatgcacacaaagcaatgcctattcgaaacattgtgatcatgttccatcaaaacttgacatcgttatggaataaaaccattatgagcaattatgaatttgataccgtaaccgaatggttggattattggcttggtgtaagagagaagatatgtctgcttgccgataaatgctgtgcctgcatgaataggctcctaggcggtaagccattaggcggcttagctagagaagttgatcaacttcatgaagaacttatccggatgaccacaggagaaaagcgatatcccaaagaggaccgtccgtttgagaaaaaagctgtgctgcctgagggactggagaggaaaaaaggagaatacttccaaagcatacaaaacttttttaatcagtttgcggggattctcaccagagatgagcagaagcggcgattacctatggcaaatctcagagcggcgcaaagtgctcttgtatcgatgcaggattgctttgcggaagttgcggcagactttgatgttcaagaaaggcagcgggttcgttgcgcgatggaagagcgaagtatcaagcggcttactatgtgctgcagctattatcttgagcacatgccaagcaaatactttgataagtatcaaatcaaagattggtatgacaggcactgtcggacagagagaaggattgcagaagaggcattatcggaattggcatccaagtattcgcttcattttccggatcagatttataccattggcctgctgcgttattatcccattgtagtggatgattttgacatgacatcggagagcgaaatgatcaaatggcttctgggcagtattgcgtttgctgatgctccctttgactatcttgtgatattgtctgcaaacgatcatgaagaaataaaccctacggcgtggcaggcctcccgacagatgctcgccgatgtcaaaaaaacgattgaatcagaaaactattcattacttgaaaagcaactgatcccatctccggtgaacgtgacagcgcagatgcttgactgctttgcgagaaaatacgttttgctggaaaggtctaatgtagaagctgaggaaccttctatagtggatattgtcgaagagctatggatttattccaaatcggttgagttgctgacagaatcagaagatgccggttatcttgcggctgaaatacaaggcattcagaccaatattgcagaaatacttcgtatattgcagggaaaactcccatcccaagaagttgattggttgacggaaatatgcaacagtgtattcgctggggaaaaatttgacgacattatgtttaacagtgttattgcacacttcgtatagaagccttcaaaatgatgtgggtagcgtagaccgcctagtcattctggaaaatagtgcaaatacaccatattttggaataaaaaagaggggaggcaacgccgtcgtgataatgcagagaagtgcaaatcatgatagaagcatgttaaaatatgagaagtaacgatatttccagtcccggacaaaaggggtgatggagaaaagctgttttaaggagattcaggatggatgagaatagtttttccttcgctgtttacatgatacatgcctgtgcaaatcgctggaatgtcgctccttcacgggtgtatcaggcactgaaaaaaagcggctgcctggaccggtacttgctcccgagctatgacatccttcatacgcagagtacagattatgtggtgcaggatatcgaggagtatctggaggaaagggacgtacctgtatgaatggggatgtgctcgaaaagtactacaaagaagcactggaggagcgaatcatttcgcatcttgccaaagtgaagaatcttacgatggaacaggcgatggatatttattacagcagtcatctcgcgcagaagatccatgagggaaaggatgatgtgcagtacctggattataaggtcctggtacagattcttctggatacagagccggtagatagtggtgcgcactacatggacgcataggcgggcaatgatgagcgtgcatcgggtgtctatgaaggaagatggtttatttgcagatcgcagaacaaaattagtcagacagtgtctgaccattttacttgtacaagaatcatacatactagatcctgtgatactaaaaaatcataaaactgacaaaaaagaatttgacagaacatttgtgtagcggtaaaatttaagcatcccgagagggataacatacaaatcattagcaggccactacagtaaagtagaacactgcgaagctccaagcccatacattatgtatgggcttatcttctattcggatttaaaattttgcgcttaaaacttaagcatagcattttgcatgtgtaattttttgcagatgcaaagtgataatatacagtcataaggaggagaaaagagtatgatgccacctattaattacagaatcggtttggatatcggtattgcttccgtagggtggagcgtgatactgaataatgcactggacgagccatgccatatcgtagatatgggtgtgcgtatttttgagaagtcggaagatgatcagactggtgcaaccctcacaatggcaagaagaggagcgcgcagtcagcgtcgattaatccgtagaagaaaacatcgcctggacagagtaaaacatctgctggaagaaaaaggcatcatcgtactggaagcttttgaaaaaaggtaccatgaagcgggactgccggatgtatataagctgagaacagaagccttagatcgtaagctttcgaatgatgagctggcgcaggttttaattcatatagcgaagcatcgtggatttaagtcgaatcgtaaagcggatactaaagataaagaatcaggtttactcctgactgctacagcagataataaaaagcttttgattgaaaaaggatatcggactgtaggagaaatgctttataaggatagcgcatttcgattagaaaccccatggaataaagcggggtttactctgaatgccagaaatcgagatggctcatacaaacatacgatgctgagagatcttctggttgatgaagtgaatacgatctttgatcgtcagcaggcattgggaaatgcaatcgctggtgatgatcttcgagaggcttatcttgcaattatgacagcgcagcgctcgttcgatatggggccaggcggagagtcaccgtatgctcttgatgggtttggtgataaagtcggattctgtacattagagcgagaagaaaagcgagcgccaaaagcggcttacacggctgaatattttaatgtcttacagaaaataaaccataccagaatcatcagcgagtttggtgagtatcgtgattttacgactgaagaaaaagtagtgctccttaatgaagtgcatattagaaaatcgcttacgtatgcgcaggtgaaggcaaagctgaaactgaatgctacagatacattcagcacacttaattataataagcagaatggtgatttagagaaaacggaaaagacaaagtttatttctatgccatttacagtcagcgtaaaagagattctggaaggcaatcctcgcgagaatgaagcggacagacacctgtatgatgaagttgcccgcatcctgacagattataagaacgacgataatcgtacagaatctttaaaaaagctccatcttgcagatgacaagatccaagaattattgatgctcacacctgcacagcatctacatttatccgtgaaagcgatgaataagcttattccatttcttgagcagggaatggtttatagcgatgcatgtgaacatgcgggatttcagagcacagcaaagacgaaaatgcatgttctgaagagttataaggttcgccgtgcagatggtagtgtcgacatagagaaaacaaaagtcattcagaatgaagcaaaggaaatacagaaacagttacaggatattacgagccctgttgtcagacgtgcgatttctcagagtcttaaagtcctaaatgcaattattcttaaatatggaagcccacaggctattcatgtagagcttgcacgagaaatggcaaaaacatttgatgaaagacataagattacatcatcgaataaaaagagacaggatgagaatggaaaatttttagaagaaattagcaagtttattaataatcctaaaggacaggatctcgtaaagtatcgtctgtggcagcagcaggatggatttgacccatatacaggaagaaagattccggttgagcagttgtttaaaaatgatggttatgagatcgaccatatcttgccatacagcaaatctatggacgacagttatgcgaacaaggtacttgttgcggcagaggcaaatcgtctgaagaaaaatcagacgccgtacgagtatttcgagcattcaaataagtcttctatgacctgggatcagtatgtgtcctgggtactgtcaacgataaaagatgagaataaacggcgacatatgctgaaaaagcatattcatgaggatgaagagcgtcagtttatcgccagaaatctgaatgatacgcgttatgcaacaagatttgtgctctcgctcatacgtgattatctggaattcgctccgtggaatacggatggtaaaaagaagcatgcctttgctgtcaatggtgtcattacgggatatctaagaaaacgttgggggcttccacagaaaaacagagagacgcatcagcatcattctgtggatgcagtggtcatcgcctgcgtcacggatcatatgatccagagaatttcgagttactcgaagcagcttgaaatggatcagaataggtacgtagatcctgatactggagaaatactggatcgtgcaaaaatggatgcggctacatggaagaggaaactatggatgccgatgccgtggaaaacattccgtgatgagctcgtgatccgtctaggtgatgatccgttaggatttatcacggaacattcagatgtcatgacgagtctgaatttaccagagtggatgctgtgcccggaagtgatccatccgatttttgtttcgcatatggaaacgcacaaaattactggaaaggcacatgatgatacaatccgcagtggaaagtatctgtcgacgataggaaatgctttttcaaaagtggctatcgagacattgaaaattaataataatacaggtgagattgatggatttgcagataagcatggagaattactgataaatgccaagagcgatatgcttctttacaatgctttaaaaaatgaactgcttggtgcaaaattggaaggaagaaagccgttttatgataaaaacggaaaccttaatgcgtttcacaaaccaaaatcagatggaacggaaggccctatagttcgtaaggtgaaaattatgacaaaagttcagtccggtgtagaacttacaaacaatgcaatcgcgggacgaaagaagggcgctatgattcggatagatgtatttaggattgctcttccgaagaaaccagatacatttaaatatcattttgttccgatatatattgatgatgctgtgagacaagtaatgccgatgcgggcagctgctaaagataagccgcaatcagagtggaaaatcatgaaagaatccgacttcatttttagtctctaccctaatgacttaatatattttaagagtgctagaggcgttcctgtagcgtctaaggcagggaataaatttaaacttaatgaagggtatgtgtattataagggagctgatattagcggattaacaataaaagtagaatctcatgatggtttaattgaagatgctcgctttggaatacagacacttgatgcatttgagaaatataccgttgatatactaggaaataagtcgttagttaagcatgaaaaaagaagggtagtaaaaactaaaaagcaacgtactcgaaagacggaaaaccatggcttataagaatgtttttatcggaacagaacgaagaatacgtgttgcacataatcagctttttgttgacgagacatctattccgctggaggatgtcaatagcgtcatgattgaaaaccgtcagtgcagtatcagttcatatgcattgagtgaattttcaaaaaatggtattgcaacctatgtttgcgatgaaaaacatttacctgctggagtgcttgtgcccattaacaggcactccagataccttgagcacattgacttacaactggatgcttccaagcctttgctcaaacgtatctggcagacgattgttgttgggaaaattacaaatcaggcgctctgtcttcagtatgcaggtaaagataacagcgatcgattgcaattaatggcttccagggtacaatctggtgataaagcaaatacagaggcaagagccgcagctttatattttcgttctttatttggtggggattttgtccgaagagaagattcgttaatcaatgcggcacttaattatggttactcgattattcgtggcaatattgcgaggagtacgaccagttatggatttgagccgtgcttaggcataaatcatagtagtaatctcaatcagtttaatctggtggatgatttcattgaatgctacaggcccttagtggatttatttgtctttacacattttgctgaagagaataccgaagatatggcagaagaactgtcaccagacatgaagaaacggttatttagcctgctgaattatgatgtttcgatcaatgatggcctgtatactgtttcaagtagtataaatctatttatcagcagttatctcaggtcactgatgaaaaaggaaaatgcagtacaggttcccaggttgatcggtttaagagaacataggtatgaataagtttatgagaattctaatcatgtttgacttgccaacaaaaacaaagaatgatcgcaggaatgcatctagattcaggtcttatttaattaaagacggctatatcatgcttcagtggtcagtttatagtcgtctctgcgatggaatggattctgtgcagacgcataaaaatcgtctgaataaaaacatgcctccattaggtgaaatacgagtactgacgcttaccgaaaaacaatatgagtctatagaaattctgctgggaggcaaaaacaaaaatggtgcagatcagccggcgtgcgctattgaattattttaaaatgattatagaaaatcggttttatgccaataatatttgttttttaaaaaatgaagtctcgcgaacaccaatgtggacgcgggactttttgacagcatattataacatacaaatcattaaccggagactacagctgagtggcctcgtaggtggtgtactccttgattataacatacaaatcattaaccggagactacagcgatcgcggcgagtttgccgtcctcgatccattataacatacaaatcattaaccggagactacagctatttccagtgagaattccggcctcatccaattataacatacaaatcattaaccggagactacagcggtcatgctgtccatcagaatctcaatgacattataacatacaaatcattaaccggagactacagcggtcgtaatgttacacagcattgttttggcattataacatacaaatcattaaccggagactacagcatcatgtaccaaaagagcgcgccgcacatgaattataacatacaaatcattaaccggagactacagcggaaaggtcctctatgcgtcggagaacgacattataacatacaaatcattaaccggagactacagcccatatctagacactgattcgaaaccgcgccattataacatacaaatcattaaccggagactacagcaaaattcaactgggatacatgggaatatgaattataacatacaaatcattaaccggagactacagcgcattaaactcaactacctttagcgcaaggattataacatacaaatcattaaccggagactacagcaaaacataagtcatgaaaaaattcagaactattataacatacaaatcattaaccggagactacagcggtcatgtccttgccgtcgagcccgttcagattataacatacaaatcattaaccggagactacagctcgtcctgctgctgttgcatgtagttttccattataacatacaaatcattaaccggagactacagctggcaagtggtattgattttatgacttacgaatatcactatgcattgtcaatttccggttcgtgcgttcagcccttcgaacaatacgaggtagcaggccatgtctccgatgcgtttccggtagtctgggttcttctcgaggtcgccgagctcgtcacgccagcgggtgtcgtggccgagttttccgaggttgcgggccaggatgtcgaattcacggatgacggcattatggatttcggaacgcctgctgtcgatcgctcctttttcttccgtggtcatcatctgccattccgcccgtacggcagcgtattcgattgagcgtgaaagaagatcgtggtataaatcggtcatatcttcatcgttttcgatttgctttttgatcgtggcgaaaatgcgcgccgcatcttcaaatggaagcgcgaaaacgcgctccaggtaggtgctatatgtctgcattggaagcctccttcggaatcatgaagcgtttaatattccagactgttctcgttcagcaggaagtcatagacactcatgatcaacacgccggactcattgtaataaggggcaggtgtgtctttggtgatgatcaatcgcttgaagaaatctcctgtcaacatcagagatcgctgttcctgctccattttagcctgatcaggaatcgcataagcagactggatataatagcgcttagaaccctggttgcagacaaaatcaatttccagctgtttgcggatgccgttgcctttaccattggtgtcgtactgcacgatcacacctacatccacattgaagcccctcattttcagctcattgaaaatgatattctccatgctgtgcgtttcttcaatctgacggaaattcaacctggcattgcgaagccccatatccgtaaaataatactttaccggtgtatcaatatatttctttcccttcacatcatatcgaatagcgctgtcaatcaggaaggaatcacagagataatcaatataccgcctgagtgtcgaagtgctgatcttttttttcttaaccgtttgaaatgtcgcagacagtttttccggattggtcagagagccgatcgccgaggacagaatattcaaaaggtcctcgagttctgccttattgcgaatatgatgcctgccaacgatatctgaaatataggtttcctcaaagagagatttcaaaaacgcaattttctgatccggggtggtaaactcaagcaccagaggaataccgccataaagcatatactcattccacccgtcctgcttcgtaccctgatagacggacatgaattcagcgaagcttaagggatgcatatgcacttcatcgccgcgtcctcggaactccgtaatgacatcctttgaaagaaaacgggcattacttccggttacataaacatccacatttttcatacgaatcagactgttgagaatagattcaaactcgctaagcaactgtatctcatcaagcagtacataatacatcgcatcatctttgatctgctctttcagatatgggtacagtacatcaggatcgcgatacttcctgttttcgaaagcatcaaaagcgatctcaatgatatgatcttcagctacaccctctgacagcagatgctccttaaagagcgtgaaaagaagataagacttaccgcatctgcgcataccggtaataactttaataagaccgttatgctccttgctgatgagtgtattcaggtagcgatctcttttaatttccatatagaacacctcctatcgacgatttctgcggtaatacgcaaaaatctttaatagcatcataccctgagcagggcaggcttgcaagcattctatgaaagatttttgcggtaatacgcaaaaatcatcaatactcattaagctgagccatgtacaataatttgcgtgattcccctgctacactacgcgccctaggccaatgctctgaccacaagctcatcacggagccgtcgattcggactataataactataatacggactacacttctagaccgggcatgaaattcttaatataataggaatcatataggacgttatgaagggagctgatgatattatgtacgagtctttaaagctaccggttgggatagaaaactttgaggagatccgcacgaaggggtattactatgtcgataagacgaaactcatagagcagctttttgaccgtcttggaaaggtcaatctcttcacgcgtccgcggaggttcggtaagacgctgaatatgagtatgctgcggtacttctttgagatcgggacggatgcatcccttttcgatgggctgtatatctcgaggaagcagacgctggtttcggcgcatctcgggaagtatccagtgatctttttgtccctgaaaaatgtggagggactcagctttgagagcgcgagatatcagctggtagagctgattgcgaaggaggcgcggagacaccgtgcgctggagagcagtccgcagctcgatgaggatgatcagaagatttatgcagcattgacacaggtgcaggacggtatgtatgtcatggcggaggatgtgctgtatggctcgctgcaggcgctttcggagctgctgtacaagcattaccagcagaaagtgctcatcttaatcgatgagtacgatgtgccgctcgataaggcattccagcatggctactatcgggagatggtggcgctcatgcgtacgctgtttggaaaagcattgaaaacgaatgatgcgctggatttcgcggtgctgacgggctgtcttcgtgtttcgaaggagagcattttcaccggactgaataattttaagattctgtcgattacggatacgcgtttcgatgagcagttcgggtttacggatgaggaagtgcggaagctgctcgcggattatcatctggaatcgaagtatgcggagacgaaggagtggtacgacggctatcgcttcggtaacgtggatgtgtactgtccgtgggatgtgatcaatcatgtggaccgtagcctggatgacatcgatgcgcgtccggaagcatactggatcaataccagtggcaatgatctcgtaaaacgtttcgttgcgaaggcgaataaaaccacgcgggacgagatcgagcgtctgatcgccggagaggccatcgagaagcagatgcgtctggatttgacctatgatgagatcgatcgcagtatagagaatctgtggagcgtgctctttacgaccggttatctgacgcaggcgggcaggacggaagcgggaaactataaactcgtgattccgaatcatgagattcgtgaggtgttccgtttccagattcaggagtggttcaaaattgcggtattcagtaatacagagcagctgatgtcattctggaaagccatcgaggacggcgacacgagcgagatggaagcttatctgaatcgtctgctgagtaattccatcagtgtgtttgacacgaaggcggtggatggcgagaaggaaagtgcgtaccacaatctgctggtggggatacttgccgggaatgcggactggctggtgaagtcaaatcgtgaggcgggtgatggtttcgcggatatcatcgtggagacagaaaatccggatgccggcatcatcatggagctgaaatatgtgaaggatttcagcgcgatggagcaggcgtgtcaacgcgcgcttgcgcagattcgggaccgtcgttaccaggagtatctgctgaatgacgggcgaagcgatatcacactttacgggatcgcattctgcaggaagcggtgccgcgtagtggcagagacattggacagatatccgtctgggttttgaaggtcgatttataccgaatccgtcgaaatgaaataatagtcaaattgggtcattaggaaggaggagtagtggttatgtgcagggttatagaagaaatgagaaatgaagctacgagagaaaatgctttggaaatagctcgtagcttgctaaggattgacaagctgacctgtgaagaaatagcacaagctacgaaacttacagttgatgaagtaaaagaactggaggagaagagaagttcataagtgtgcattgaggcctgggtaacagttcagctcccctttggctcccttggaaagtttgaggcgctcctcattcgccccaccccataggattcgtggatgactgtacgttctggtcccacccccgctcatgaggagccctcaaacttctggcgaaccggaagtcaaaggacgatcgtaggcatggttgaaccgaaaactgatgatcgtgcctacgatcacgatcgaatttataggcacagtgtcttcaaatccgggtaatcgtgcctacggattatccaaaaatatggacatttccgtaggcatgctgacgttttaaagcgcttaccatgcctgcagttgaagtttcagagttccctcgccataggcatgatggtggaattttcagctcaaagtgcctgcactcacaagttccatatgacgtcggatcgttatgatgatggttttcagaccccggcatgcctatgctgtatctttttgaagctttctcatgatgatgactgggtggttttggaaaaatgctgcatcatctgagcagaattcttccctgatgccaacaacactcttcaatctcgcttgatttttgttggcatcagtttcattttctaccaatttgatacagcatcatgacctccagatacgcttttaccgttagcatcattttcattttgggctgttttgatacagcatcacctgctcgtgctaagacaggtgggcatcgtagcaagccaatatgccagatggtgggcatcacccgctcagactaacacaggcgccgatcttttgtttgcctgcatggggcggggccgatatgtaagaagataaaaggtgtacactggggtgggcaggcaaacgagaagaggcgccccggtggacgccccaaaaaacatctgtatatcaagaaatacacacggctgaactgttacaaagccagggattttcctgatggttttcaaccagaagtttagtgcattttctgtgaatctgccttataatggtaaactgacttaaaaagggcagtgagtggaggagtctgcaaaaggcagatttcggatcgattacggaggtgaagagagatggaaccgatctatttgtcgattgagcctgagaagaccggaaagaagatcaagaagctgctcgatgcgagtgggtataccgtgcgggatgtgcagcgcctgatgggctttaacaatccgcaggcgatttacaagtggctttcgggaaagtcgctgccgagcatcgataacttcgtgattttaagtagacttttacataccagcattgataacctcctcgtcgtagacggggaggttgttgttttatatggggtacgggcggcgtgagtcgatatgcctacttcacgattttttcgaaatctgaggccgggtgcttgcagatcgggcagatgaaatcatccggaatctcttcgccgacgtactcatatccacagatgcgacagcgccataccgtctgtccctcgtcggtctttccgaccgcctgtggcttcggcttgatgtgattctgatagtactcgtaggtcgtggatggcgtatcactcagtaccgccatatccgtgatctcgccgataaacatcgtatgcgaaccgagatccaccgtcttatcgaccgttacggaaatgtaggcattggttccctctgtaatgtaatagaggccatcagcgccacgtgcacagccggtgaaattcgtaaacttatcgacatcacgaccagactggaaaccgaagtgcttgaagagttcgaaatctgcctgctcactcagcacggatacggtgaacttcccggtccgttcgatcatatcatgtgtatagtttgccttattcacgcagatgctcagctgattcggctccgatgccgcctgaatcgccgtgttgataatgcaaccgttatccttctcaccgtcacgtgcggtcagcacaaacaaaccataacttagcttatacatcgccttcttatccatcagacttcctccttttcatagaatcaacgaaaatgaatcacgtacgccatacttactattaagaaacgttcctaataactagtatagacgttttttggatgctgtcaatcgcgctatagctcgggttaacatacgcacctttttcttccgttgccatcatctgccatttcgctttttatacggtgacttgacctgtgtgggtcaggtttgccgggaaatcgatgcgggtagcgggccgggcatgcccgccgtgcgatgtaaaaatcccctccgggtcgtgcgatggcacggttcggaggggatgctgtgtttagtagttattgttccgtgtgatccacaggaaggtgccggtgaagaggatgcctttcacgatggaggtgctggtgagggcccaccagatgccgtcgaggccgagcgggcggctcaggatgatcgcgagtgggatgcgggcgccggtgaaggtgatgctcaggatgctgcacaggcgtgtctttccgaggccggagagggcaccgacggtggtgagctcgacgcacatgaaggcttcaccgaagccgatgatgatgaggtagctgatcgcggtgacgatggccttcggttcgtggaagaagacgccggcgagcggtcccgggaagcagatgaagatcgcggtgacgagcaggccccagagtccgacggtgaggagggagatgaggtagcccttccggatccggtcatgcttcgcagcaccataattctgggcgacgaaggcattgagcgcggcggcgaagccgtctgctgtgttccaggagatggactcgatctgtccgccgacacgctgggtggcgacggcttctgcgccgtagccggagaccatgcgggtgaggaccatggagatcgcgcagtaggccatgctctggagggcagtcgggacgccgatctggaagatgccctcgaggatgctgagcggcatccgagcgagaaggcgggtgcccttcaggatgttgtctttatgaccgcggagaacgccgaggaccatgatcagcatgacgatcgcctgcgcggtgacggtcgcgatggcggcaccggtgacgccgagacgcgggaacgggcccgggccgaggatcagcaccggatcgagcaccatgttgatgacgaggccgatgaggttcgcgatgaacggggtcttcgagtcaccctgggcggtgtagaggccggtgagggtcaggctcaggaaggagaagaccacgaagccgcaggcgatgcgggtgtaggagatcgcggcggcgtaggactcggcgtcgctcagctggaagaagttgacgagtgggtgtacgaaggcgacgcagacgagcgcgtagagaaggcccatcagcgtggacagctgtacggcggtctgcgcgtaacgatgcgcgcggtcatgatcgccgcgccctaagcattgagccacatgaacctgaccgcccatgcgcgccatggaggcgaggccctgggagagccaggtgaacatgccgccgacaccgacgccggcgaccgccttcgagccgagcatgccgatccatgccatatctgtgatgttgtacagggtgctgatgaacgacgacgccatgatcggaagcgcgagcttcaccagcgttttcatgatcggacccttcgttaaattaccagtcatagtgtgaattcctttttgtgtccttcgtgcaaacgttacaccagaccctggcggcgatccatgcgtcgcttttcattcgtctcggtgcactctgagctagtatacacgaaaataagaaaaggtcgagggatat

SEQ ID NO: 3887 - DNA, 18295 bp, synthetic construct
  source 1..18295: mol_type = other DNA
  misc_feature 1..18295: note = Synthetic
tacaggaagtatgtttatttcttttagtggagggaaagattctactgttgtggcggatttggtcaccaatgcattgagcgactcgaaaatattgcatttatatggcgataccacgctggaatttccttttacattggcatatgtgcagcgatttcggcaggcacacaacggcaccccgtttttgattgcaaagaataaagaaaagaactttctggaactgtgtcgtgtcattggaccgcccagccgtgtgatgcgctggtgttgtaccatttttaaaacaggggcattgaccagaaagattcaggtgttgtttcgaaataaggaagaggtgatttcttttcagggaatccgcagacaggaatctaccagccgcagtaaatatgagcgggaatcgtccaactctaaaatcgcaaaacaaaaagcggtagctcccatcattgactggctggactttgatgtgtggctgtatttgttaactaaaaaactggattttaatgatgcctatcgttatgggtacagcagagtgggatgttggtgctgtcccaacaatacagactggtccgaatttctttctgccatttatatgcctgtacagtatcagcagtttcaggattttctggttgagtttgcggcattgattggaaaacctgacccggagcaatatgtcaaagatggcaagtggaaagccagacagggtggcaatggattggaagccgcacaaaaatcggtgttacagtttgagaattgtgtgctggaagaggatacggtgaattttgaactgacccgccccatcacagaggaattatatgaactgtttcgcccttttgggtatttagatcaggttcgaggcaatgccaggctgggtgaagtctatgtgctggatcacaaaggaaacgcccttttgaaactatccggacgaataggaagccggacattgaaagtatccatacaaaatctggatctgtttgccaggggcagccggaaatccgcagaggagaagattcgtgcccagttgaccaaataccagatgtgtatgggatgcagggcatgtgaaagtgtttgtaagcagggggccattactgtaaaagaattgtcggatggcagcacgtcctatcagatcaatgatcaaaaatgcattcgttgcaaagtatgtgtggggcatttcattgcaggatgttacatgcgaaaggtattgaccattcgcagaacataaaaagcagatgctatataggaatttcctattacagaacaaaaccgaagagaaggggaacgtatgacacaatcaaaaatcatatttaagataaaaggacatgaaagttttactgtccgggaagggtggctgcaaaagggcatacgtgctgtacagtcagatccatttgtttttgcggaacatgcaggagcagatgcactgggtgtgggaaccaatatggcaaaatccattcgatattggttgaaggcatttcaactgaccacagaattgtcaagaaaaggtgtggtgttgactgattttggaaacttgttgtttcaaaaagatccttatttggaacttcctgctaccttgtggttgttacacagcatgctggtgcggaatcgggaactggccacttcctggtacttgttttttaattgtatgcaagtgaaccaaatggagcgggaagatgcggaagaagcattgctgtatgagatggagcgttacacacaagggcaagtgttttcaagcaagacagtaaaagatgattgcaatgccattttgcatatgtatgtgggcagtaaggaacgggaatatgatccggaggatgccacaagaagcccttttgcggatctgggattgatggaactggaagggaaacggattgtgtgtaacgcaccatccccagaaatgcttcctgtgctggcggtgtatgatgtgctgcttagacaggcagaaggaaccaatcatctgttgttggatcaggcaatggagggtatcaatagtccagggaagttgttttttatgaatcgggctatgttatatgattatctgctggctatgcaaaatcgtcagctgcttaccatcaaccgtacagcaggattggatatgatttattttccaacagtggtgacaaaggaaatggagcagttttttttacagatgatatacgataagtaaaattagaactgcaaaaaggtgatttaacactataaaatgtactggatagttatgaagaaaacaataaatgaggattacagatgaaacaggaaaccacattcctacgggaattgctgcaagtagaaaaacagtttcaaaccgcagtcaatttgcaattggattacacaaaaatagaaaaaatacaaaattacattccgaccagggcatctgttgctatattaaagcaatatttgcgtcaagtatatgaggatggaacagagaaggcaactatattgattggaccatatggaaagggaaagtctcatttgcttttggtattgacggcacttctttctatggagcgaaccggaacagttggggacagcttgaaacaactgaaaaagaaaattgatgatgtggatgcagaagccggttatttgattgaccggatatgggaaaagaagcaccgttttctgccagtcattgtgagcaatacctcttatgacttgaatcaggcttttttggtggcattgaaagaagctttgtgtcatgcaggattacaggaaatggaattgcccagtaactatgaggcggccgaaaagacgattgcgctatggaagcagtcctacagagatacatacgaggcattttgcagggaggttatacagcagggcaaagaattagaagtgtttctttctgatttatccggaggcagtcgggaagcctatcacctgtttgttactttatatccccaactgacttccggcggggtgttcaatccgctgatttcttctgaagtgcatcagatttatcagaaagtcaatgatgtgctttgtgaacagcatggatatagtgggatgtttttgttgtttgatgagtttagtaaatttatagaaggacatccacaagatactattgcggcagatatgaagatattacaggatatgtgtgagttggcatctgcttccaaagaaaagcagattcatttgacattggtggcgcataagagcatgaaggaatatggaaatcagctgagcaaacaggtgcaaaatgcctatcggggtgtggaaggacgattaaaagagattttgtttgtcacttcttcccagaataattatgaattgattcagtacgccatcggcaaaaagtctggttatggggattttgtaaaagaaaatgccggtttatttgatgggatagaggcgcagtcaagagaagtggcaggcatgcggaatttgtttccggaatcgttgtttcgcagtgtgttagtggaaggatgttatccccttttgccgttgacggcatttctgcttttgaagatcagtgagcaggctgcccagaatgaacgcacgctgtttacttttatcgccaaagaggaagcccattctctgggggagtggattcagaaggaacaggcagggactgtggtgactccggattggttatatgattattttgctcctatgtttcggcaggataagaatttagacaccgcccacagacaatggctggcagcagagtatgcattgagccagacagaagacagggaactgcaaaaacgaatcaagtgcatggcactgcttttgatggtgcagcagccggaagattttccggtgagtgcagtggtactgtcagtggcatttttgtgcagtctttcagaaacggaagagatgttgcaagttttgaccagccaggaaatcattcggctccagaggagaaccggtacctatgtattctgcaacaatgtaggcggcattcatctggaggaagagatcttgcagcgaacagagcagctggaaagaaagtacgaacgctgtgcgtttttggatgagcagacatctcttcggtattttttgccaaagtcttacaatcagaaaaattatattacaagatattatagatatgtatttatggaagcggaagccgtgttatgtctgccctccacagaagccttgtttgcacagtatactgcagacggacttttgttgtgtgtggtggcagatacaccagtgaatctggaacaattgcagaggcaggtgaacaggtggcaggatggtcgtatggtggtattgtgtccattggcagagtttcagggggatcagatgttaaaacgactacaggccattctttctttgcaggcagatcatggatttattgagcagaatctggttttgacagaggaattgaaattgctggaagcagactgtcgttatgagttacaacagtatttgcaggaacaatatgccccggagggcacacagacccggattttctggggcagtggcagaacagaaaccgtatcagacaggctgtactttcagcggctgctcagtgaaaccatggaagaatattatatttatctgcctaaaatcaatcatgagctgatcaataagcgattgatttctccgcccattcgaaaagcacggcagaggattatggaagcgcttttgagccatcaggactgtacagaattcataatgggaaccagtccggaatctaccatttatcgggcagtgttggtacggtctggtcttttggcaggggaaccggaggaaaatatggcacatatgcaggaggccattttggattttttgcacagtgcggcagggcatagacagccattctccaggatatacgaggtgttggaaggacatccatatggcattcgggcaggggttatccccatctatttggcgtatatgctcagtatacagcatgccatgccttgtatttatctgaaaaacaaagaagtgcctgtggatgccagcaccatgcagctgatcagtgaaaaaccggaggattacagcctgtatgtggaagagcaggaagtgtcgaaactggcttacttgaatgctctggcacagatgttctggccggaggcaggacagaacatctggaatgcggaattgagaacattggcagaacagatgcaaggctggtatcagggactgccccaatatagcaggacaggaaccataccggcagagacagaagaacaatccttacgtatcaaagcatttcggcgtttgttccgttttggagagcctaatccaagagaatggttgttagagcagatgccaaaggcacttgacagtggggattctctggaagagactgcgattcgatgcagacaaatgaaggagagattggaaacatttctgccagaagtgaagcggcagctggtgaaagaaatcaaaacactgtttggcgcacgggaggaagaagacctgtttcagaccctgcaaatgtggtgtttgcaaaaggaaggaatttggcggcaaaaagtgctatctgtgctgtctaagaattttgtggattgtgtcatgaatttgtatacccacgaggagacacagatcgtaaatgtgttatccaaggcactgctggatttgtatatagaaagctggaatgacacttccaagggtcaatacatagaaaaaatacagcaggtgatggcagagttatcagaagcattggagacagatggagaggcaggttccagtgtcattttcattgatgagaatggcatgcaggtgaaaaaaaactatacgctggaagaggacagcagtatggatttcctgaaaaacgcactggaagatgtgctggaagaatttggggatgcactgacagaaaatcagcgggtcaatgtgctgatggagttgctgaaagcgcatatatgatctatgcagaacagaccggttagtggctgtgcagtccagtttgtgaagataggatgtaaagagaggaaagcaatgatttattttgacaatgcagccactacatgcccaaaaccggagccggtgtaccggcgcatggaacaggctatgcgggaggcggtgaatctgggaagaggctcttatcaggcagcaaggaagggaaccgatctggcggatgatgtgcgaaacaggctgctggctttgtgccgtgggcaggatcagtaccaggtggtgttttccccatctgccaccatagcagtcaatcagatcatatggggggtagaaagcagcaggatgaagcgcatttatctgtctccttatgagcataatgcagttgccagaacggtgcatgcattggcaaagcggtatgccatacaagtggtgctgcttccggtatgcgaagacgggatcattgatctgacgcaaacggcatggatgtttatacagtctcctcctgatctgctctgtatgacggtggttagcaatgtgacaggttatgtactgcccatcgcagagctgactgcactggcaaaacaggcaggggcaaaggtattgttggatggtgcacaggcagtgggattgcttcctttgaatttacagcagttacagccggattatctggtatttgcgggacataagactttgtacggtccttttggtgtgggtggttttttcctgaaaaaggaagatgtgttacaaccggtgttatatgggggaaccggaaccaattctctgaatctggagatgcctgctttcgggatcggtcagtatgaaccgggcagtccggattatacagccatcgcagggctcggtgccgcattagaatggctcgaacagacggggaccgcccatcttttggcagaggagcagagactgaccgggttgctgcacagacagttgtctgccatagaaggggtgacggtattggggatgacgcagcctggtaccggaattaccgctttttgtgtagacggatatgcgccagaagaggtgggacagattttggatgaggagtttgatctggcagtacgaacaggataccattgtgcgccatatgtccatgatgtgatcggaagcagacagaccaaaggatgtgtgagagccagcgtaggcgcatttaccacagaagcagagattgagaaactggtggaagcagtaagagatattgcggaggagaggtgacaaaagaaaaaacatggagttaagaaaaattatagaggtttacagttgtgggatatctgtttatgaacagaggaagtgcaagtgttgcttcgtagtggagaaatagaagaaatgacgtaatgaaggaggtggccatatggaacatttaacgccagaagaaaaacaaagactgatcaacaccattatttatctggaacggaaaaatctgaagagaagaccgtcttataccaataaggctatggcagatgaaattgtggcagagattataaaattcaccagacaatacggaaagtagacagggagcaaaggaggaaacattgaaattcaaaagcttatatctttataattttatgcgctacaaaggagaaaacaggctggatttttcttgtgattcggagaaaccggtgacggtggtcttaggagaaaatgccagtggaaaaaccacattgtctcaggcctttcgatttgcattatacggcaatatacaggtggaacgtggaaaaagggaacaggattactgtctgctgaatcaggatgtgatagagagtatggatgccaacagcagagcatgtgtggaggtgcggattgaatttgtgcatcgggaagaggtatatcgggttacacgaaagatacagtatcggagaagatatccggcattgtctctgatagaagagaaatccatacagacaatggaactcatggaagaagaggttcccattcagcagatatcggatcaaaaagatatcatacaggcaaaaatagaagaaatgctgccttattatttgtcgttctactttctgtttgacggagaaaagtggtcggaaccgacttccaatggatttcgcagcagcgtgaaggaatccatgcaccagtttacagggctcagttctctgaaaaatgccatgattcatttaaaggagatgggcagttcttctgttatcaagcagtttgaaagccgaattaccggtggggcaatgtttgataatgtacagaaggacaaggaactagaagagagacacctacagcagaaacagcatgatctggaagttgcaaaaacagccgaacggaatgccaagaaaaagtgtgaagaaatagaagaatttttggaacgtaaccagacaacagaagaagtgcaaaggcggttttctacattgaaaaaactagaaaacgatcgggcagatatggttgcaaaggattatcaaagtctggtcagcaggttcagtgatttgggactgtactatattgcacagccgttgatgcagagatgcctggaactgttgaagtacgtgcatatggaaagaaaagatgttccccatatgcggcagggaaccattgattttttggtaaaaacaggaaactgtatttgtggaacaccgctgcacaaagattcgcaggcatatcacacgattatggaatatcggaattatttgcctccggcagatattggttctcttttgggagagtttgaacgtacagccaacagatggggactgcgggaagaaaaagcacaggaagatattgcagagatggccaatcagacggtacaggcttatggtcggtatgtggaaagcaggaatgaaagagaagaattagaaggcaggatggagtcttctgttgattttaaagaaaagagagcgttgcaaaagcgttatcgggaagaatatagaaatgcagcggtagaagtgactgccattcaaagtaagattcgggaaatatcggagcggattgcccggaaggagcaagatatgcaacagatggaagcaaagaatcaggccaatcagcagaaccgtctgcgtgcagaaattgcaaaggaactttatgaggagattgatcgaagttaccagaagaaagaaggggaggtattcagagaactcaacgaaggaattcaggaaaatttccgtagaatattcaaatctcaggacaaaaaagtgctcttagatgaagattataacattaaaatggtctatgaaaatgaaggcagagaagagaaaaatctgtctgaaggagaaaagattgccagaaactttgcttttatcatcagtgtgttggaatatagccagcggaaaaagcaggaagcatctttagatgatgacgaaattgaaacattgcctcttgtgttagatggaccattttccaaactcagcaatgaaaatatcggaaaagtatctggagtattgcctcagattgcggaacaggtgattttgtttatgttggaaaaggattgggtacataccaatttggatacatatgtgggagcgtcttatcggattgagaaaggaacaaaatcaatcaatgccaagctaagaaggagggaaaatggagaatagatatgaattctttaagaagcagataataattacaggaaaacacgcaattatggcaaaagaaatttggcagagagataacatagaacaaacttgcttcaagcgtttgattgatttgtataagctggcaccagtggtaggctatctggcagatcataaggctgggagagatggttcttcttcagaagatgcaaccgtatttgtagagcaggtattaaaagaacgagaggatctggaaaccattttgcacatgcttttgatggtagaatatacaggctgtggcaaatatacccaggaagaagcggtcaaaaaagtatttcgtggccctcagacagaagaagaatttagggaatgtatggatatttttgacagttatgtgagaggcggtatcgaagtactgtatgaggaattgattacaaaggggacctctcatgaaaacaaatatagtgcccatttgaagaccggagcgattatggagtttttggacaagtatggaatgggggagaaggaaaactggaatttgtaagagtatttcagaaatttaaaatatatccttaaatattttaaaaaagagattgacttttatggaaaaatatggtagtattacatcgtgaagattatatcacaccaaggaacattcggttactgcaataatggtagtaaaccgaaaagctctaatcccacccgttatgcgagtgggattatcttttatatggaaaaatagtttgagtgactgtagtggtgtgaaagaatggaatgaaacggactggcaaaatatcttgaatgaaaagatgttgcaagatagagaaatttgcaaagataaggaacaggaggacgaaaagatgaactatcgattggggttggatattggaatcgcatcagttggttgggctgtggtcagaactgattcaaaggatgaaccgtgtgggatcgaacgcatgggagtgcgtgtgtttgataaagcagaagtaccgaaaacaggagattctttggcatcggctcgaagaagtgccagatgtacacgaagaagattgagacgaagacggcatagaattgagcggacagaaatactgttagagaatgctggtttgattgatcggaatttgtttcaggaaagatatcagtctggacagatggaaaatgtatatgaactgcgcgtgcgtgcattggacgaattgatttcagatgagggactggcacaaatccttgtgtttatggtgaagcacaggggattcaaatccaccagaagagcagaaatgaaagacgatgaaaccgggaaagttttaagcgcagtgaaagaaaatgaaaggcgcatgaaggaacagggctatcgtaccgtgggagaaatgatttatctggatgaatcatttcgaaaagatgccccatggagtgatacccattatctattgacaccgagaaacaaaggtggggactatcggcataccattttccgggcacagttggaagaagaggtattgttgattttagatacgcagaaagcgcttggaaatgataagattacagaagaattcattgaaaagtataaatttatttttgaaggacaaagatcgtttgacgagggaccgggtttacagtctgatcatcagacacccagtccatatgctggtagtttgattgaaaatatggttgggaattgtacgtttgaaaaagatgagaaacgtgcggcaaaggccacctatactgcccaaagatttatgttgctggagaagatcaatcatacgaccattgtatgtgatggagtggaaagacggttgtctgatgccgaacggcaagcattaaaggaatatgcttatcaaaaagaaaaacttacatacgaagacgtgcggaagaaattgaagctttcagatgatgcgttcttcaaatcattggtatatcagaaaaataaagcagagacagaaaagaagaccaaatatgtgtctttagatgagtatcacaaattcaaaaaggcatccattcgatttgtggactctatagagatcaatcaaaattatgaattatatgatcaggtggcaacgattctgtcttactacaagggagatgaaagaagaatggatgaattgtctaccctgggcattccaatggatatctgtggagaactgcttgaactttctccaagcaaatttcaacatttatctgtaaaagcgatgcagaatatattgccttacctggaggaagggcaaatttatagtgatgcctgtacagcagcaggatatgattttcgaaatgatggagaacgggaaaagcaaaaatatttgacccaagaagtggtacaggaaatgctggcagatattccaaatcctgtagtgtgccgtgccatttcccaaacagtaaaagtggtcaatgccattatacgggaatatggcagtcctgttgcagtccatattgagcttgccagagagatggcaaaaaactttaaagaacgcaatgagcttaccaaaagcatggaacaaaatatgaagaagaatgaatctgtcaagaagagactgcatgaggaatatggggtcatcaacccgacagggcaggacattgtgaagttcaagctgtgggaggaacaggatgggcgttgtatgtattctggagatgcgatttccattgagcatttatttgcgccgggatatgcagaggtggatcatattattccatacagtatctcttttgatgattcataccgcaataaagtgttggtaaagaaacaatacaaccaggaaaaaggaaatcgtaccccctatgagtattttggacagaatgaaagctggtggaagaaatatgaaaatcttgtacagacatgtgtaaaagactttagaaaacagcagcatcttctgaagaaacatgtttcaaaagaagagcgggaggagtttaaagttcgcaatatacaggataccaaatatattacaagcgccatgcagaatctcattcgtcaaaatctgctgatggcaccttatgaaactccggataaaaagagaaagatgtttactgtcaacggtacagtgactgattatttaaagaaacggtggggactgcccaaaaaagaccgccgtacagacaaacatcatgccatggatgcgttggtggtggcatgtaccacccagggcatgattcagaaaatttcccaaaccatacaggcaagagaaattgctggtgccaaagagtgtgtgttgtttgatgagaatactggggaaatttttgaacggcatttgtattcaaacgatgagtgggatgaattgtttggtgtcaggattccgctcccatggaatttgttccgtttagaaactgcggcatttatggcagaagatccgtcttttgaggaagatcaggaagaaagatgcaattccggaaaggatatttttggagagagaaaagaacttctggtaaaggaattgattcgtcagggatatcgaaaaaatgaagaacagcaggaaattgttattccatctatttttgtttccagaatgccaagacataaagtcactggcgccggacatgaggataccattcgaagtgcccgtcattttgatgaggagggtatggtagtgaaaaaaacatctctggatgctttgaaactggataaagatggagaaatcaaagattactatgacaaagagtcggactggttactgtacaatgcattgaaaaaacgactgcaagaatatggaggagatggaaagaaagcatttccggtaggtgaagatttccataaacccaaagcagatggcacagatggaccggttgtgaaaaaggtaaaactgattagtaagcagtctcttggtgtgaaagtcaatggaggcgcaggaatttgcagcaatggcagtatgatccgaattgatttgttccgggaaaacggaaagtactattatgtgccggtgtatactgcggatgccatcaagaaagaactgccgatgaaggcagcaacggcagcgaaaccctatgaaaagtggaaggtgatgaaagaggagaacttcctgtttagcatttatccgggagatttgatcgaaattcaggcagcaaagggaaaaacaattcctgtcacaactgtagataaagagaaaagggaaaaacagacgataaaagcgtatttcaatggtgctgatatttcatcagcaagtatttctggagagtctcatgataggacatttagttttaggggcctgggtgttcagtcgttagatagcatcaaaaaatttcaggtggatattttgggaaattatcatgaagtgaagaaggaagtgcgaagagattttagtaaaagaaaaatgtctaaaatcagaaaatgatatatacattgtacagtatgatgtacacactgtacagtgtaatgtggagtaaatggaatgtgaagcatgtcacctggcagttgttcatgtgattttaactgtcaggtgatttttgttgtagttcccgaacgttccttggtgtgatataatacactggcggatgaggttgcgggattgttgtttactgagtcggaggaatggataaaaaaactcacctcagaggaaatcaaggcaattgaaaaatatgcatataatccaggggatgaaaaaccaaatcgcttcttcgaaagattaaacgcaatgctgagaggggagcgagagccggaagaaaaaatcatgaaatatgcggaagtaatatcagaagcaattagaaagaataaactgactcatgatataatcgtgtacagaggagtatggacagacgtgactgctggtgtaagcgtcggtagtgtctttaagtggaaccagttcacgagcacgtcagttctcccggaggcggccttcgacaagccttttaaattaattatttatgttagacgtggagcgaacgctgcatatatagaaaaactcagtaaatttccgaaacagaaagaactcctgcttgacagaagttgtatgtataggttactatcaaagaaaggaaatgtagctgaattggaggtggttttatgactaatataaccgaggaaagagttcgtgaagaattgagcgaggaaatgagcgaacgagaaaaagcgtggcgagagcgtgaagaaatattagcgcatgaaccattgaaagcgtttgttttaacagaagaggaattgcagaaattgcgtgaagagggaagaatctgataaaaataccgctagctattatggctagtggtatttttatgcccatttacaagcaagacagcagaaaggatagggataaaatgacttttagtgaagcattagaattattaaaacaagggtgtcgggtggcacgaacaggttggaacggcaagggcatgtacctgtttttaagcccgccgatagggtgtcaggcatacaaacggtttactggcaagagtatcaacgatttacagccgtttatcgttatgcgggcggcagatggcactctggtgccgtggcttgcaagccagacggatatgttggtggaggattggattatggttgattagaaggacgcagaaatgcgtccttttgttatgcccaaacacgatatggcgttaaaaggtgcgtgaccggagacaccgatgaaaacggattccacagggtgacacccttataaacggaggcaacgtatgaacaacagaaacggttttgtaccaatgaacttgcagctgtttgcagagacaccggcggcgagagcgcaggcagcagaagcaccgcagggtgatccggcagcacagacaccggcggcgggagcgcaggcagtggattatgcaaaaatccagaaaatgcttgatggcacacttgctgcaaaggaagatacggctttaaaagcctattttaagcagcagggcttgacgcagcaggaggcagaaagtgccatggctgcatttaaggccgaaaaggcaaagaaccagcctgatgtgggcgcaatgcagtcggaactggaacaggcaaaggcagcgctggcacaggtgccgtttgtccttaaattggctgacctgacgggggcagttggcaaggatggcaagcctgacacagagggcatcacaaaggcaatcaatgctgttttagaggcagtgccggcatttaagccgcaggcgcagcagcaggcaggttttgtgccggcaaaggttggcgcaggaagtacgccacagcagcaggcagggcagcaggcgccgcagcagcccgcaatcaaacggtggaatcgtttcagttgtagttcccgaacgttccttggtgtgatataattacaatgatgttgctagtggaaaaccagcagttgtagttcccgaacgttccttggtgtgatataatcatcaagtcaaccagtgtttttccgtatgcgttgtagttcccgaacgttccttggtgtgatataattcagttatttcttcaggtgacatgttgcgtcgttgtagttcccgaacgttccttggtgtgatataattggatattcagtggcagtatttagtggtgtgttgtagttcccgaacgttccttggtgtgatataattattcccgattagacgcttgtactttatccgttgtagttcccgaacgttccttggtgtgatataatgctttaacctctgctacctttgcgttgatcgttgtagttcccgaacgttccttggtgtgatataatctagatttggaggcactgctgtaaaacctggttgtagttcccgaacgttccttggtgtgatataatcgagttaggagtgactatgtacccgattatgttgtagttcccgaacgttccttggtgtgatataatgtttctgtggttggtgggtctgctcttcaggttgtagttcccgaacgttccttggtgtgatataatcttccgtcatatgtagccatgtgttttttggttgtagttcccgaacgttccttggtgtgatataataaaaacagaaccatacatagaactgcatatgttgtagttcccgaacgttccttggtgtgatataattttgctcatgcaattctgctacagcatcttgttgtagttcccgaacgttccttggtgtgatataatgtataacgtgtttttgccggaattttgtttgttgtagttcccgaacgttccttggtgtgatataatatggtcgtgcataaatattattatagactagttgtagttcccgaacgttccttggtgtgatataatgttaggctgtctaagcagcctacacttttagttgtagttcccgaacgttccttggtgtgatataatatagtgcctgactggtcaatccacattgtggttgtagttcccgaacgttccttggtgtgatataatcatcttcatgaaatacaataaattctctttgttgtagttcccgaacgttccttggtgtgatataatgccaccgtaaccaaccattacacggtcggagttgtagttcccgaacgttccttggtgtgatataatacgataccctctctactgcacgctgcatctgttgtagttcccgaacgttccttggtgtgatataatgtcctattgatgaaataggtgtcattactggttgtagttcccgaacgttccttggtgtgatataattcctgtcagatggaggtttgtcggtcctggttgtagttcccgaacgttccttggtgtgatataatgcaatcgcagtgatgtagccaccgcagtccgttgtagttcccgaacgttccttggtgtgatataatcactgcataggcaagtgcttttccccgtgtgttgtagttcccgaacgttccttggtgtgatataatatatgctggtgctgtgcggcacgcaggggcgttgtagttcccgaacgttccttggtgtgatataatttcaagttgcaccaacaccacgcggcacgcgttgtagttcccgaacgttccttggtgtgatataatacaacagcatgacggtcaaggcagctttatgttgtagttcccgaacgttccttggtgtgatataatccactcatggtcaacctgagtacccttcttgttgtagttcccgaacgttccttggtgtgatataatttagggcgctgaaaatggtacgtccgaagagttgtagttcccgaacgttccttggtgtgatataatacttcagccggttgttttcatccttcagaggttgtagttcccgaacgttccttggtgtgatataattatatcggtctgtcagtgtgctccttgccggttgtagttcccgaacgttccttggtgtgatataatgttctgatttatcggatatccttgaatgtggttgtagttcccgaacgttccttggtgtgatataattggggtcagtgaatcagccttttcaaagaagttgtagttcccgaacgttccttggtgtgatataattggacaggttcacaggtgaaaagcccacaggttgtagttcccgaacgttccttggtgtgatataatagattttcagaaatgagaaatacattggtggttgtagttcccgaacgttccttggtgtgatataattaaacggacgaacaatcgtgttctttgcgcgttgtagttcccgaacgttccttggtgtgatataatttcaaggtattcattcagcacctgttttttgttgtagttcccgaacgttccttggtgtgatataatatcaacatcaagcgctggatccacattaatgttgtagttcccgaacgttccttggtgtgatataataggctccctttctgtggctatgttttgctatttccttggggcaaagtatagattggaaagggtctttagaatcaaacaagaggcttattattttggaaaaagaagggaattttaatgctctcagctagctgtaactacattggactgacgtattacaaaaagaaaaccacgtcattagatgggatttctttttgtgaaaaagcttaaaaaatttacgataaaagagtaaaaaaattgttttaaaaaaattcattaccaaacctgaattattcaccgcaaagcggtgattgcggctgaaagccgcatt

SEQ ID NO: 3888 - DNA, 17111 bp, synthetic construct
  misc_feature 1..17111: note = Synthetic
  source 1..17111: mol_type = other DNA
atctcaatcgggtggaactcaatttttatctggataagcttgcggcggaggaatatattgccgtgaacaggactgcgggacttgatatggtatatctgcttaatggtatagagtctaaggaaataatcagaagatattatctgaagcagcaggcacttttaaagaacgaggacaggtaaagacatgcttaaagatatgattgcgatagataggagatatgagaactcaataaatctctatcttgatatagataacagaaataagatagacagttatgtgtatacgcgctcgtcgcagaacataatggactattatcttgacaatatagataacgacaggaatcatgcgacaatgctcatcggaccttacggcaagggcaagtcacatatgcttcttgtgcttcttgacaaggtaagacatagagaaaggccgtatcttccgattattatatccggtgcggttgatgacttgaatcaggcgtttctgatagggcttaacgatgcacttaagagggagaggcttgaaaagcttgctcctgagagctattacagcgaagccgtgagacgaattgtacagtggagggagaagttccccgatgcgtatgagagattcggtgcggagcttgagaagcataagatacatggcatcgatgcctttgtgaaggagcttgagagacagtcaaagaaatcgttaagcctgtttgaggggatatatccgataataacaaacggaagtgagtttaagccgtttctgatgatggagacagtgaggatatatgaacagataagggatgtgcttgcgagggagtacggctatgccggtctttatattatctttgatgagttcagcaagtatgttgagggacatgaaaaagacacatttgcaggtgatatgaaggtgctgcaggatatgtgcgagcttgccggtagaagcggtgacggcagaatatatcttacatgtgttgcacataagagcattaaggagtacgatgctaagctctcagccgatatgaaaaatgctttccggggtgttgaagcgagacttacggaggttcgttttgtagtatcgtcccagaacaactatgaacttataggaaatgtaatcaggaaggatgagacggcactaaaaagaatcagaaagattaagaaatacaacgaaaatgcaatgaaatcttatggcttttcgtgtttttccggtctgtttagcgaagatgatttcagaaaatatgttgttgagggatgttttccgctcatgccgctcacggcatacatgcttttacatataagtgagaaggttgcccagaatgagagaagcatatttacctatctggcacatgatgagaagggaagcctgtgcaggatagtggaggagtgtacccttgatgaggcagattacggaatcggtgcggatacaatatatgattattttaagaacttattcaggggcgatggcacggatgcaatcatacataatgagtggctgaaggcagagtatgcgcttggctgtgcgcaagctgagacagagcggaagataataaaggttattgcactcatggatatgattgacagaccggaggagatgcccgccgatatggagcatattgcatgtgccctcaatatttcggaggcagagtgtaccaacatacttgctaagctctcagaacgcagagtaatcatataccgcagaagaaagcatgccttcagcttctgcaacaatgtcggggttgatattcaggcggagattgctgatagggcggcgaagctgtctcctgacatggatattccgggtattttaaagaatatatcggagcttgattatattcttccaaagaaatataatcaggatttttcgatgacaaggtattttgaatatgtctttatgacacctgaacagataagcagacttccgaagccggatgtgctgttcgaagaacacttttcggatggcaagattgtggcagtgatatcggaaactgttgtcgaatacgatgagaagctttcagagagacttaacgatgagagaatcgtggtgcttgtgcctaagacgccgtttaatcaggtggacaatataagaagatacatggcagcaggagaacttgccaagaatcaatcctttattgacgagaatgtggtactggcacaggaactggttaattattgtgatgatatggtatatgaggtgaacagatatttagagaatgcgtttgacacggaaagcggaatgtgcagtgtatatcatgccggggaaagatattcaggcggattcagacatacaatgaccttcaatatgtttttgagcagcataatgaaaggctgttacgacaatgcgccgattgtcaacaacgaacttatcaacagacagaacatatctgcacagaataaaaaggcaagaaacaagattgtggatatgattttaggacatgaggactgttctaagtttcttaggggaacatctcctgaatcgaccatatacagagcggttcttgtaaacaccggagcatgcggcacggggaaaattgaacccggctgtgagaatgttataacagagatagacagatttatcacgcaatgtgacgacaacagatgttccttcaagatcttgtacaacaaaattatgggaacagggtatggcatgcgcaaagggattatacctatatatatggcattgtgtctttcaagacttcatgataagccggtgctgagctttaagggtaaggaagttgaactttgtgcacatatacttggaaatgttaatgatgagccggagaattactacctgtatgttgaacataaaagcatagaaaaacagaattatatcaaggagttaaagggcttgtttggcataagcggtaatgaaaaggatgaggacagggaggttgttgacggagtgcttaagtggtacagggcacttccgcaggcagcggcgaacataggcagggatgcacagtgtgatgaagccatgaaggacaggttgaaaagcctgtgcagcatgctgagacgtcaggattataatcctcatgattttctgtttacggaactgcttgagggaataggtattgcaaagggagagtatgtgacggcagttaaggttctttcggatttaaagcagtatcttgacaactatctgaaaaaaatatcatcgcaggcagcattaattataaggataagatgcggtgcggatgagaaggacagcgtaagagcggttcttgatggttattatgcgcagcatgcaaaaaatcaggacggtgttattttaaaaaggcgcacccaatccattgtaaaatacatagccggtctgtcaacttacgatgatatggaaattgtgtcgggtctgtcaaagcttgtcacggacatttacattgatgattggcgtgatggtatgcttgagagctttaagagaggctggtgtgaattctgtgatgaacttgagagtgagcatacacggatgtcttccggactcgaaggactgttgatgaacaatcagagtcacagcctgtccggcacagacgatgtggacatggatgataacagcacggcttatttcctcaagaatgccgtaaaagaagcaatagacgagttcggagacagcctcgatacaaaggagaaggttgcggtacttgcaagagtacttgctgagcttgttgcaggagaaaatacatagaatatggagatacagatgagtgtaatatactttgacaatgcagcgaccacctatccaaagcctgatgatgtctatgaacagatggataaagtcaaccgcagtctggcgttcaatgccggacgtggttcttatgctctggcgcagcagtcggcggttatcattgacaatcttagaaaagaattattgcgcattgtgaatgcggtgaatgtagcagaggtcgtactgtcggcttctgctacatttgcattgaatcagataatcggcggactcgatataagaccggagcagtacatatacatatcgccttacgagcacaatgccgttgtgcggactctttacaatcagcagatattccgggacggcaaaaacagctcacacataatcgtcatgccggttctaagcaatggaagcatcgacgaggagagacttttatatgagttcagtgtgcatgttccttcgttcgtgttcatgagccatgtgagcaatgtgaccgggtacatactgcctgtggagaaaattgctgccgaggcaaagaaatattgtgccacaatagttgttgacggctcacaggcattgggacttgtgccgttcgatatgtcgtcatccgccgttgacttttatgtctttgcgggacacaagacaccttacggtccgttcggaatcggcggattttacatgaaaaacggcatgcggctcgacaccttcattgccggcggcacgggaagcgattcactcaatgtgcgtatgcccgaggcaggcgcgtcgcgctacgaacccgcaagcccgaatgtcgtggcggcggcagggcttcttgcggcagtaaaggctttaaccttggaggagataagacaccggcttgaatatgaaatgaagctcacggattacatcgcctgcagcatgaaaaagatacggggaattaagctgtaccttccgccaaaggaggcacatgtcggaatcgtagcctttaatctgacaggttataaggcatccgacatcggaatgattcttgacgaggattacaacatcgcggttcgcacaggctaccactgtgctccacttatacatgaatatcttgatgacagagaatacctcggcgttgtcagggcgagcatcagcatgtttacaagctttgatgatgcggatgcactggtcagggcattaggggagatttaggaggatgggaaaatgaatttagagtttgcggaaatcagaaatatcaataagctgtgtaatttggagaacaagggaagtaacaatgaaaatgtaccgctcaacgtgaatattccatattatcagagaccttacaagtgggacaaaacaagaatcgacaagctgattgatgatttttatgagaatgaggatagcgatgatgagaaggagggatattttgcgggcaccgtcgtcatggtcaaaggggagagcggaaggttcgaggttgttgacggtcagcagagaataacaacgctttttttgttgaattatctgagatttatacttatcaggggacatatcgagctgataataaagacaaaaagaatgtcacagcttattccaaagttcaatgaaatgataagcgcggcggtaaatctttttgataaaggcagaattgaaaaattaggtgaaatcggaaaaaagattgaagctttcacagccggaattgaggagcagagcgatgagggcggaagcggtgagaaggaaagaatatgggatgagttgcttgagtattacgagaaggagatgtgtctgcccgagagaaattttacgaatatagaaaactataaaaaagaaagctttatggcggacaagaaatttctgtcaggtgtggagctgactctaaagtatagcagaagcagttacaatgaacagcttaaagaggcgttgagcagagttgtaatacttatgcaggaggacagtaatccacgctttgatgtactctcgtacgataaaaattctgcgtctaagagtgcggtgacggtgcagtatatgaatgctatgagtattatttatgataagcttgtgggcacatatataatgggtgatgagaagcctgtggagcatattgtagcactcgagaatatcatgaaaaagatattggaaaacatcaatttctgtgtcgttgtgacaggaagggagaaggatgcctacacattgttcgaggtcttaaatgacagaaattttcctattgaggatttggagttaattaagaatcttttttacaagtattactgtaaaaagaatgagaatgacgagagtacggatgagtacattgagaaggcagatacaaaatggggaaaaatattcagcgatgtgacgggaaaaaaggagcagtcgaagcttatttcataccttgcggcacaatattttacggcggatagcagactaaaatacaatgacaatgaaaaatacagggaagccatagagaaggaatacctgaacaaaaaacagcattacgatgaaaactcactgctcaatgacatctgcatttatgagatgctcagcataattttgggtgagtttgattttaaatatcagaaaaaggctgagaatgtaatgaaagctgagagggagaatgcaaaatccattacatataaggctctgaatttatttaatgcgctgaagctgtatggtgtcataccggcagtcaccaacattatcataaagaaatttttggagaagcataagttggacgaattgggaacggatggctatatcaaggtattcagaggatatgtgcagggaataaagaatgacagcacaaacagcaatatcgagtatgagcagattcaccgggttgcatatgatttatggcgttttgcgttgcttgcacagaactcggacaagccgagaagcatagcaaaggactatattgcgagagtagatgtatcgcattcagattatgttctcagagtggaaactcagcaaatggatgcgttgaatgaggaattcagaagatggattaatgcgtggaagtatggtaatgaaaattcgcagttgaaggttaaggtgctgttcatcaatctgtttaactccaacaagattgaaaacacactcatatttaacaagacgggaactaattttaagacagacaatatacagcttgaccatttagagcccgacaagatggacatgattgccgtggaaaagtatttcgagccatcgtctaagctgccgagggagacatatacggacagtctcggcaattttatgattatggacgctgacagcaacaacgacaagagcacgatgccgttacagactgcgctcaaggtttatgacgaaatggcaggaggacactggctcgtaaaagaaattcacgagcttttcaatgacagcgagtgcggcactgataagaaaatcgacggtggaaattacaggacaccgaatgaggagtttttcagcaggagaaagagaagacttatctgttactttaaggctcttttgaacaaaaggtttgatgatgacaaggtggaggtatcggaacattaatgttgaaggaggtaacattgtgcagaaaacagacgaaaggcagataaaaaccgccatgcttgaaatactccatcttgagcggaaaaatcttagaagcaaggcaatgacggatcagaagatggtggaggaaatcaagcacataatagtggagacatcgagaatcggcatgtgattgggaggatgggaaggtacaaatgaaatttaagacacttaaaatgaaaaattttatgcgttataagggtgtgaatgaggtaaatttcagttgcgacggcgagcataatgtcacggttatacttggcgacaacacggtgggaaagacaacaatagcacaggcgtttcgctggtgcctgtacggagcaatcatggttgagcgtggaaagaaggagagcgactacgagcttttgaacaacgatgttttggcaaagctcgatgcgaacgggagagctacggtgtttgtcgagattagtgcacttgacaatgaaaagctttatacaattcatcgtgaggcggagtacatgagagtgtatccgaagtttatcacatgcgaatcgtttaaaactttaaaaatgtatgttgcggatgtggacagcccggattcaaaaacggaggtcgaggcgggcgtaaattataacaaaataaatgaacttataaatgaactttttccgaaaaatctttcgcattatttcctgtttgacggcgagagatggagtgatttttcggtaaacggagttcgcgaaaacatcaaggaatcagtgcatattctcacgggcttatcctcgtataaggcagcaatgttccaccttaaagatatgggagcaaattccgttatcaaaaagcttaaaagcaatattcagggcaagggaaatatgtatgatgattttcagcaggagttgacaaagacggagcatgatatagagaaataccgtagacagatagaaagcattgaggcggatataaggcgttacaacaaaaaaagcgaagagattgaaagctatcttgaggaaaacaagaacacggaacagcttcaggcggcatacaggcagtcgcaaagaacattgcgggctcagggagagagatatattgcagattttaggacatttgctacggagtataattcgaaggtttacagggtgtttgctgttccgcttattgaagcgtgtcttaaaatggtcaaatctgttaacggtgagagacgcgacatacctcacatgagacaggcgagcattgattacataatacgaagcggacgctgtatctgtggaacgcccgtgactgacggttcccatgcacttgaatgtctgcttgaacagagaaattatcttccgcctgctgatatgggctcgctcctcggagagtttgaaaagaccgctaaccgctggtgtcgatacgagaatgaaattaagcagaatgccctcagggtggacgatagcgcaagagaatatgatgagacatgcattcagcttcaaaagatggaaaatcaaatgagtgagaatgttgattttgcacaaaggagagcggagcttaagcattacagggatgaagagagccgggcccttgagagaaagggcgaagtaaagggaatcatagtttcactcaaggataagattggcagcattgaacttcagatgagaaatcaggaggcaaggaatgctgaaaacgaaaagtggagacagaggcttgctcttgcagaggcagtatacgaaaatttgagtgctgatttttccgagagggagaaaaaaatcttttgtgagctcaatcaggagattcaggcaaatttttctaagatgttcaatgcaaaggataagagaattcaactgtctgaggactatgaaatacagatgtgttataagaccgatgtcgcatacaaggaggagaaaaatctgtccgagggcgagaaggttgcgagaaattttgcctttatcgtcaccataatggactacagccgcaggaaaaggcttgagagcattgagaatgcgggagacgatgagtctgccaatgacactctgcctatcgtgcttgacggacctttttcaaagcttggcgaggaaaatatttcacttgtggcaaatgtgctccctgaggtttcggagcaggttatagtgttcatgctacgaaaggactgggcgtacacggggcttgataaatatgtaggagccgagtattcgattgataaaagacctgatgagagctttgcatcaatcagaaaggtggagagggattaatggcggattttgagttttttaaaaagcagtttgagttcaagggaaaacattcaaggatggtaaatgagctctgtgttgcaaatgattatgagcacacgttttttaagagagttatagatgtctatatctttgcggctgtaataggaatcagacttgacagaaaggcgccagaggattattcaccggtggaaaccaagagtatatttcccgagcagatgattaacgccaaagaagatttggattttataatgcagatgatgataatgcttgattctgcttcgggaacatcggatgaggaaagagtgcgggaggcgtttagaggtgcgcagagtaaggaggagtatgaccgcctttcggatagctttaatgactatgtacgcggtggtgtggaggaactttatgaaaggctgatcttgcgcacgcccgattccgaggacggattttatgacaagcggaccgcaaatctcatggcactctatgaaagatttgagccaaagaattaacggtaaaagattggcaaaaaatagaaaatatgctttacttttttagatgcgtgtaatataataaaattacgttatattgtaccaagcgatatacggttacaacaataagacctccatctttttgatggtgtgtctcaggctctgatcccatctaaagttaattctttaggtgggattatccattttataggagaggaaatgtatatggaggaaattaagcagttaagcaaaaatgaagagataccgaagccgacggatttaaactacagaatcggtttggacattggtattgcgtcggttggatgggctgtgcttgagaatgatgacgatgatgagccatgtagaattattgatttgggagtgagaatttttaaaaaagctgagcaggataacggagatccacttgcgttgccacggcgtgaggcacgttcggcaagaaggagacttagaaggcgcagggacagagtattgcgcatcaagaagctttttgaggcagaagggcttataaatatcgatgagtttgaggcgcgttatgaaaaggcagggcttactgatgtctaccgcctcagatacgaggggcttgacagaaagctctcaaatgatgagctggcacaggtattgctgcatatagcgaagcacagggggtataagtcaaacagcaaggcggaagaaactgcaaatagcgaggatgaggcaaagcaaaaagaagctggagaagtaaagaaaagtataagcgataataaaaaacttatgatggaaaaaggatacagaacagtaggagagatgctgtatcttgacgaaaaatttaaaatagattgcaattggaacgcagaaggatatgtattttgtcctagaaataaagcaggtgagtacaaggtaattattcttagagatatgcttgttgaagaggtgaaagcaatatttgatgcacaaagaaaatatggtaatattgcggcgacagttgaactggagaaaaagtatttggatataatgcttagtcagcgttcatacgatcaaggaccggctgcaccaagcagatatgcaattgatggttatgaatttggaatgtgtacatttgaaagaaaaaatgggcatagacgagcaccgaaagcggcatatacatcagaattgtttgttgctttattgaatataaatcacacaaaaatcagagataaggatggaaatttgcgaactttttctgatgaggaacggaaaaagcttattaagctgctccatgtgcagcaagaagtaaaatattcttcggcaagaaaactgcttggtttgcctgatgatgaaacattttataacctgacttacagtaaagggaaaaataaaaactgtgaagatgcagtgtttatcaaaatgaaaaattatcacaagataagagtggcaatgaatgaggagtgcactgataaattacttgatgatgaacgagctgataagtatgacactattgcatattttctaacaaaatacaaaaatgatgatagcagattaaaagagttaagggctttgggaataggaggaaatgaatgtgctaatttgcttaaattatcatttacaaaagcgcaaaatctatctcttgtggcaatgaaaaagataataccttttttgctggatggtaaagtatacagcgaagcatgtaagcttgccgggtatggcgagtatgaggaagataaaaacaccggaaaattaaaattgttaaaagggaaggaaattacagagtatgtaaatgaaatttccaatcctgttgtcaggagagctgtatctcagacaattaaagttttaaatgcaattataattgagtatggtagtccgcaggctgtaaatattgaattatcacgccaaatggcaaagaataaaaatgaacgtgataaaattgataatgatatgaaaaaaagaagcgcggaaaattcgaaaattcttaatgagataatggaatataaagcaaatccgacgggtaaggatgttgtcaaatatcgtctttggaaagaacagaaagaggtatgtttatatacgggtaaaaaaatatcggcggacgaattgtttgctggtgatggtgagtatgatatagatcatatacttccttatagtaaaacttttgatgatagttatcataataaggttctcgtaaaagctgaagcaaatagagagaagggaaacagaaccccttatgagtatttgatttcaaaaggcggtgaaaaagcttgggaggaattttctgtcagggttgaacattgcattaaagactataaaaagaaacagaaactatcaaagaaatgtatcacagaggatgatacgaaagagtttaaaaggcgtaatttacaggatacgcagtatgcaacaacatttatttataatttaatacgacagaatttatacttaaaaccatatcaaaatctcacaaataaaaaagtacagcaggtagttgcattgaatggttcaattacaagttacttaagtaagcgttggggacttgaaagtaaggatagaaaaattgacacgcatcatgcacaggatgcggttgtaatagcgtgcactacacaaggaagaataaataaaatttccaattattttatgtgtagagaagcagaattatccggtaatcatgttatttcaagaaagaaatatgatgaaaattctggtgaggaattccctaaaccatggaagtattttaaaaaggagcttgatgtccgtatgtcaaggtatcatggtgaagcgggagcgatagactatgttacaacaccaagagaatatcttttattagataaggatgttcgcaagcatataggttatcctgactggatgtttgtcaaaggcagacctggacgaaggggtgttcttgatggaatttttgtttcgagaatgccaagtcgtaaagtaagcggaaaggcacatgaggacacgattcgttccgcaaaatattataaagatggtggatgtggagtgaataagggatatgttgtttttaaaaaaactattcagggcataaagcttgatgaaaatgacgaaattaaggatttttttaatcctgatagtgataggttgctttacaatgctctggttaatagacttaaacaacataataacaatcctaaagaagcttttgcagagccattttacaagcctaaatcggatggaactccgggaccgattgtaaaaaaagtgaaagtgtttgagaaaatgacgataggtgtatctttagaaaaagctgaaggatatgctggaaacatatctggaagtatgattagagttgatttttattatgttaatggtaaatattactttgtacctgtttatgtatcggatgttgtaaatcatcaattaccaagaaagcgtgcggttaaggagaaagtctcatcagagtgggaagaagtagatgataaagattttatttttagtatatataaaaatgatttagtatatattgaaaatgataaattgcctttaacgcataaaaacaattctgattatcctttaccggatgctaaaaatggtgttttcatgtacttttgtgatgcggacataagttctcttgctatcagatgtgaatcaaatgatggaagttttggatttaggagcagtatagtaacagtaaaaaaattttgtaaatgtcaggtagatgttttaggaaatatatcatttgttcacaaagaaaaacgtatgacatttaactgatacaaaaattgggaggcatatatgggatttcgtaacataaaaattgacagttcgatagggctgcatataaaaaatgagcagttggtgataggtgacaagggcgtaacttttccgcttgaagatgtcaactgtgtccttatagagaatcaggctgttacaatatccgcatatatgcttcaggagtttgcaaagcagggaattgcgttgtatgtgtgcgacgagaagcatcttcccaatgccgtccttttgccgatagtcagacatagcaggcattttaaaatgttgactaaacagatagaagcgggaaagccgttaatcaagaggttatggcagcagattattgtgtttaagattaaaaatcaggcactatgtctcaaagagatggggcttgacggttacgaaaagcttcttgcaatgacaaaggaagtgcagtcgggtgataagacacatgttgaatccaaggcggcagcgtattatttcagaattttatacggagaagagttcacgagggcggatgagtgcatagtcaattcggcaatgaattatgcttatgccataatacgaggattgatagcaaggtcgattgtgtgttatggcttagagccttcgctggggatgtttcatcatagcgagctaaacagctataatctggcggatgatatgatagaagtattcagaccgctggttgatttgtatgtggcaagtcattttgacatttccgaggttgatgcggatttgacaccgcagataaaaagagacttatttaacataattaattatgatatgtcggtgaaaggagagaagcgtattatcagcaattgtattgataagcttgtctacagctacagtggggtgttacagggaaacaggactgacttggagcttcctgaattaataccgttgcaggtgcactgctatgaataaatttatgagattaatggtattttttgacttaactgttgtaaaggacagggataaaaaagtggctgctaaatttcgcagattccttgtaaaagagggctatgtcatggttcagtggtctgtatattcaagactctgtaatggcactgattcaatcgaaacacataagcagcgactgaaacaaaatcttccgcataaaggctctgtaaggtgtcttgtcctgacagaaaaacagtattcatcaatagatattcttctcggaacagcaacatttcatgacaccgacgaatcaacggacttgataaatattttttgaaaaaaagagaagttaatggcagaataaggcacttttagtgtaaaaatttgcatgaaaaatccccgtgaacatatataaacacggggatttttcgttccctattatatcataccaagcgataaccgggaacaacaactgttaaacttgccttaatgttttacgcataattatatcataccaagcgataaccgggaacaacaacttcggaatgttcccagagcctacactgctgattatatcataccaagcgataaccgggaacaacaaccttgacaatggcaacactttagcgtcacacattatatcataccaagcgataaccgggaacaacaacaccgccgaaccgccgacgggataattaatattatatcataccaagcgataaccgggaacaacaacggtcattactggaaacaaagataaaggctgattatatcataccaagcgataaccgggaacaacaacacgtaggagcctgagcaattaagtttgtgaattatatcataccaagcgataaccgggaacaacaacaaagattgcccgctattgcccgattttatattatatcataccaagcgataaccgggaacaacaacagttaagtgggtcaatctccaactttttctattatatcataccaagcgataaccgggaacaacaaccgcaccgccttaacatacacccctttgcgattatatcataccaagcgataaccgggaacaacaactgttcgtctacatcgtggagaacaccaattattatatcataccaagcgataaccgggaacaacaactctcaagccctcgactgtacccgttagccaattatatcataccaagcgataaccgggaacaacaacctcatttgccttgttgtcgagctgctgctcattatatcataccaagcgataaccgggaacaacaaccattcaggatcgaaagcagctctcctctaattatatcataccaagcgataaccgggaacaacaacgagaaataactataaaacatgcaaaagaccattatatcataccaagcgataaccgggaacaacaaccacacgcagtgaagatacacatattacataattatatcataccaagcgataaccgggaacaacaactgtatccgcccacactggtgacgcacccatattatatcataccaagcgataaccgggaacaacaactgttggctaaaggttgccactttaaggatattatatcataccaagcgataaccgggaacaacaacgcacacagccaatacaacgacaaataatatattatatcataccaagcgataaccgggaacaacaacttgacctattgaagaatacgaacagatataattatatcataccaagcgataaccgggaacaacaacgcaaccgcgatatatcgtcaacacgtcggaattatatcataccaagcgataaccgggaacaacaacagaacatagagagtgagccacaggcagacaattatatcataccaagcgataaccgggaacaacaacctgtcttgacttctttcttgttccgggtacattatatcataccaagcgataaccgggaacaacaacaataacagaaaggtcttgaaaaatataatattatatcataccaagcgataaccgggaacaacaacctgtattgcttcactctgcttcaccacctaattatatcataccaagcgataaccgggaacaacaacggtaagctgaagtttacccttgctgtcaggattatatcataccaagcgataaccgggaacaacaacggtaagctgaagtttacccttgctgtcaggattatatcataccaagcgataaccgggaacaacaacttatgatccggattattctccggagcctgtattatatcataccaagcgataaccgggaacaacaacattaaagaaaaaggaagattttaataacagattatatcataccaagcgataaccgggaacaacaacccacttactttagttgggatatcagtcgaattatatcataccaagcgataaccgggaacaacaaccatcattgcagtagcaaatatacgctttggattatatcataccaagcgataaccgggaacaacaacctactctgaggaagatgtagaacttccggtattatatcataccaagcgataaccgggaacaacaacatatccagagttcagaagaggacagaaagattatatcataccaagcgataaccgggaacaacaacataatagcaccgtgattgacggtgataattattatatcataccaagcgataaccgggaacaacaacataatagcaccgtgattga

SEQ ID NO: 3889 - DNA, 16731 bp, synthetic construct
  source 1..16731: mol_type = other DNA
  misc_feature 1..16731: note = Synthetic
aaatatttaccggtattggtttcttctgtaccggggttttccatgaatcagattttattattcgcactgcgcgaggcattagagaaaaatggtttgtcggatattgcaccggagactgcattcacagaagcacttagaatccttgaaaagtgggaaaaggaatattcggatgtgtatgccagattttgtgagtatctgacggaacatcagacagatgtgcaggatttgaaaaagaatctgaaaagaaaacataaacagtcattggaattatttaaagaattatatccgatgctgacggcaggaagcacttttatgccattgatgcagtctgagaccatacggtcatatcagcagattataagaagtctgacagaagaatgtggttatgagggcatctttattatttttgatgaattcagtaaatatatagaaggacatgagaaatccggttttgcagaggatatgaaaacgctgcaggatatgtgcgaattggcggaaagttccgatcagaaattattttttacaatggtggcacataaaagtattcatgagtataccaggagtatagacacttccatgaaaaatgcgtttcgcggagtagaaggaagaatttcagagatatctttcgtcgtatccgcacaaaataattatgaattgatcgccaattcaatccggaaggaagaacctgcgttttcgaaacaatatgaaaaagagattgtgaaaaatgagcaggggaagctccagaagttatcctatcagcttccatgttttcagaaattattttcagagcaggactttgaacggatcgttgccaaaggatgtttcccgctgacaccgcttgctgcgtatgcattacttcatatcagtgaacgtgttgcacagaatgagagaacaatatttacatttttagcagatgatggacagggaagtttatcatggctgttagagcggaatgaagaaaactgggtaggcgttgataaaatttatgattattttaaatcaatgttccgtgaaaccgaagatgtaccgatgatccattcagagtggctgaaggcagagtatgcgctgggaaaagcggaaacggaagatgagaaagctgtcataaaagcaatcgcagtaatccgtatgttacatagagaggatgaacttcctgcacaggatcaggcaatctgtcttgcattagggatggatccggaaaagaagtatcgtcctgcaatggaaaaattaaaaaaagatgggattttaatgttccgcagcagtgtcggagtatatgcattccgcagcaatgcaggcgttgatgtggaaaaagaaatcacgaagaagatggatgagcaaaaagggcactgtaatttttgccagattctgtcagaggctgcagacacagagtatgaactgccaaagcagtataatcaggaatatgcgatgacacgctattttcagtatgagtatatgtttgcagaagagttttttgccctggaaaatacaagatatctgtttgatgaaaagttttcagacggaaaaattatagtgatgccggaaaaagaaaaaccccaaacagatgagatacaaaagcagttagataaactggcggataaaagaattcttgtgttagtgtccgaccaacgttttgacaaagaggaattattacttcgctatcaggcggttatgacgttaaaaggggacaaacgctttattgaagaaaatgaagtgctgctgcaggaactggaattatgtgctgaggatatccggtttgaaattaatatctatctggaagagcattatctgccggagagcggaaaggtaatagttctccagacgcaaaagaaaaaagaaaagtgtacaacggccgcagaatttaatcagatattaagtgatgtctgcagagaatattatggctacgcgccgcgtgtaaaccatgaactgttaaatattgaacacatcggcaagcagtatttaagagcgcgcaatcaggtgatcgataaaatgttagggcatgaggatctgtctgtgtaccaaaaaggaaccatgccggaggctatggtatatcgtgctgcatttgtgcataccagaggggataagggctgtcagaaagttagtttagagatagatcgtttttttgcggaatgtgcaggtgaaaaaaagtcttttcagatattataccagcgattgcagggaaaatgttttggcgcaaggcgaggagtgattccattgtttctggcaaaaaaattatctgaaattgaaggaacagcggtcatttatattggggagaaagagctggaaattacttcggataacctgaatcatgtgaatgattttccagaaaactatgcattgtatctggagctggaaaccgttgaaaaagaaaaatatttaaaaaaattggaaaagatttttgaatgtgatacggagaagttttccggacagagcagattcgcacagattgctgcctgcatgcagaaatggtatcggtcacttccccagtacacgatgataacactaaatcttccggaaaatcaaagtggatcgataaagaaacttaggaatctgttgagaagagcagaaatcaatccaagagaattgttatttgaaaaaattccggcatgctatggagaacctggttttgagcaaacggcacaggatttaaaagaaagtaaaaaaatattagatgatgtatttattacattaaaaaaacaggtcgcaggaaacataaagcgcgaatttggaaaaacgcagaatgtgagtctgaaagcatgtttacacgaatggtatctggcacagaattattcatcaagaaatcatgtactggcaacggcagagagtgaatttttgaattatttagagaaactttctaccaatgatgagggagaaattgtatcagcgttgtcttatattttatcaggggtatatttagaggactggaatgatacaaactttgtagaatttcaggagaaattgcacgcggtaaaagctgaagttgaaaaacttgaggaacatggtaaagatgcaggtggcagcagtcgtatcctgttgacagaccagaatggaaatgccatagaaaagtattataatgcggatatttcggatacaacgagcctttacttaaagaatatgttagaagaggcattggaggactttgggaatacgctcgaaacaaatcagaaggttgcagtgctggtgcagactttagagggattattacagtaagagaagaggagattggttatggaagaaatttatcttgataatgcagcgacgacatttccaaaaccagaatgtgtatatcaggcaatggatgaaattgcgcggaccggtgctgtcaatgcaggcaggggttcttatgcgctggcgcggcaggcatccgggttgattgagagtacaagaaaacagatcaaagaacttgcaggagcagatgatgtagcagaggttgtgtttacagcctctgctacgcttgcatgtaacgtgattttagggggactcgaatggaaacagacggatatcgtatatgtttcaccttttgagcacaatgcaatgatgagagtgttgtatcattaccagaaacaatatggatttaaaattatcgaacttgcattaaacagggagtcgttagaattagatttgtcacagatcaggtttcagttcaccagagaacatccaacagtcgttgttatgagtcatgtcagcaatgtgacaggttacattctgccaatcaatgaggtggcagagtcagcaaaacaatatggagcagttgtggcggtggatggttcacaggcgcttgggcttgtgccggtaaaattgaaagagagtggaatcgatttttatgtttttgcggggcataaaacactctatggtccgtttggagttggaggatttatcagtgagggggatatttctttaaaaccgtttcttgtgggtggaacaggcagtgattccttaaaccctgatatgccaggacaaatgccgggaatcttagaaccgggaagccccaatatagttgcgattgcaggattacatgcagccttagaagcgtgctgtgacatggaaaggcaactttcacaagaaagaaaatttgcagaatatctgattgaaaagctaaaaagaatagacggagttttactgtatctgccttgggatgaaatgaaacgaaccggaattgtttctttttccatagagggttaccgtgcggatgaagttgggatgctgctcgatgaagattatcatatagcggtcagaacagggtatcaatgtgtaccgctgatccataaatatttaaaagataaaaaatatggcggcgtgatccgggtggggatcggacgttttacaaagcagagtgagttggaaatattaatcaatgcgatagaagaaattgcagaagggtgaaggaaaaatggaaaatcaacgtttggattttggagagattgtcagaaaaattgcggaggataaaatgctgctgccggattttcagagaggatttgtctggaaggatgaagaacagagaaagatcgtagcatcagttctggcaaaaatgccgatagggagtattttactgttgaaatcaaagccggatgagtatgcatcgaagtcaatcggtatgaaagaaaaaaatacatatcaaagccaggatggtgaggtcgaatttctactggatggacagcagcgtatgacagcgcttacgaatgttttttcaaatgtgatttatgaaaaatgtaaaatgttttcaaaattgagttcacgggcattacagcgaagattttttttaagaattccaaagtgggagaactgtaaagaagaggcagatctgtttggagtccataatttgacttttcccatatcagattctgcggaaccggattttctgacagcggatattttaccgtttattaaatgtgccgcattttttaatcaggatggagagccgtataatccacagcagtctttgtcgacccgtctggatgatttttgcctgacaaatgaggatggatatttagtaccgctgtatttgatggtggcaccggaaaatataaaaaaggcgcagataatgctgcgctataatacgatcacctctgatatcgcaggtaaaatcggagatgagatcagacagcattttacagatttgtcggatgaaaataagaatgattttatagcagagatttttggaaatgatgaaaactgtaatgaaataaaagaagatcattctaagttcggtgaaaaagtgcaagaaaaacaaatggtgtggaaagtctgtctgacaaattatctggattcctgtgtaaagaatatggcgttgaataagattgaggtatcgggggaacagcgtgacagggcgatcgatatctatgagaatttaaatcgtggaggaatcagtttaaatacttttgatctggttatggcgagagttgcaaaagtaagtacagataatttttatcgtcgtctggtcaggtatattcaggaagaaaaaagttatgacaaacaggtcttaccggatcagattgttcccttgattgggaaaaaaatacaaaataatcaatacaatgcatccatcagtacgggatgttataacgaggaaaagaatgacatagcaggaaagtatattgatgtttttttagatgtgctgtgtctgtattgcaataacaagttatttgaaccggataaattcaaattagattatataaagaagaagcagattctgatgttagcaccaacggatattaatgataatgcgaaaaaggtttgtgatgccatagacagggtaatgtttttctttcagagcagatgcggaatccggaatatccaggaaataaattattctttgatgattgtcttagtggcagttatatttttaaaggatgagtggtttaacgataaaactgttcacgatattttagaagcgtggtattggtcatcattattttccggcgagtatgataaagatcagaatataaagatgatcgcgcatcttcagaccatggtaaagacaatgcaggcatccagccgaaaagagaatgttgactggattgcaaatatcaaaaattatgtgttggaagcacagaatttttcggatgaaaagtttttactgatggaaaaggcggatgaagaccgtatcccgaaaaaagtgatgcgcatgtttatgtgtcagtatctgctgtcaaagacatataaggatatgtttgacgaaaataaaattttaagtgcatattccgatgaaacagaaagatttgaggcacatcatattataccgcttggaacagtaaaaaaggtaggggaatctacgaaaaaacttcgtgatgatgaaaaaaatatctgcaactcgcctttaaattttgtgtacataacgaaaaaagcaaataaggaaatatccgatgaatccttaaaagattatgtacagaagatcaacgcggaagcaaaagcaaaactgcatattacggcttatacaaattcggatataccacaagatcaggtaaaacagattttaagggaacggtatgatttcctgaagggggatatcagggagcggatcagtactttattaagttaaatacggcttggaaagtgcagataaagatattgttttacgaaagaacaatgcaggatggaggtattttatgaaagaggtcagtgaaaaagtaatgcggaatatgatttttgaggttcttcatgtggagcgtaaaaatttgcggagcaaggcaaaaacagatcagaggatggctgaggaacttgcaaagatcatagttgattatgcgaagatgtcagtgtagcagacttagggggagaatagcatgaaattccagagcattacaatgaataattttatgaggtataaggggcagaatgtaatcgagttcagctgcgatgaaaaaagaaatgttactgtcgtgctgggagataatacggttggcaagacaacaattgcacaggcatttcgctgggtgctttatggtgcggtattgacagaacgcggaaagcagcaggaagactaccagctgttaaacaatgatattctggcaatgatggatgcgaacagtaaagcggatgttacggtggaactggttgctgttgatgatgaaaaaagataccggatcaagcgtgaaatccattatacgcgtgcatatccacagttgatcgcaaaagaattttataagaaagtttcactggaaatatcagaaaaggatgatccaaatgccggtatttctgtggaaacggaaaaaatagaagaggtaatccgtgaattatttcccaaaaatctgtcacattattttttgtttgatggagagagatggaatgatgtaactgttaacggtgtgcgtgaaaatatcaaagagtctgtacatacactgaccggattatctgcgtatcaggctgcaatctggcatttgaaggatatgggaagtcattccgttattaaaaagttcaaaggaaagatatcaggttctggtaatatgtatgataatctggaaaaagaccggaatcgcatggaacatgagatagagcagtgtaaagataagataaaaaatatcgaaatcaatatacaaaacaataatgaaaaaatagaggaggtgcagcagtatcttcttgaaaataagaatacggaaattttgcaggcaaaatataaccagttattagtagtaagaagaacgcaggcggaaagaggagttgctgcatataaaagtctggtaaatttattcagtgataaagcttatatgttgtttgcgaaaccgatgatagaggcatctgtgaaaatggtaaaatctgttgcaggagagcggcgtgacataccgcatatgcatcaggcaagtattgactatattataaaaacaggcagatgtatctgtggaactccaatattaccggagtctaaggaattagaaagtctgatggaacagagaaattttcttccgccggcagatattggttcattgctgggtgagtttgaacggacaggacagcgctggaaccggcaaagcaattctgtttatgatgatttaagagaagatgcgcaaaatgtggatcagagcatccgggcttacgaggaaacctgtaatcagttagccgggatggaacagcagatggacaggcagacagactttgctgaaaaaagaaaaatgctgaaatattatcagagtgaaaacagtaaattaggggtggaaaagggaacactgcagggacagattataaactttgagcggcagattgaacggatcgaagcggagatgaagagccaggaggtcaagagcgaagaaaataaaaaatggcgagagcgtgtagatttggcagaagcattatatacaagattaaaaaatgattttgaggtaaaaaagaataagacatttctggaattaaacggacagatccaaaaaaattttgagcgtatgttcaatgcgaaagataaaagaatacagttgacggaaaattatgagatccagatgttatatcagacggatttgggtttccgcgaagagaagaatctgtcagagggcgaaaagatagcacgcaattttgcatttatcgttacaatcatggaatacagcagaaataaaaaggctgagcatcttggagtggaaagtggaggagatacactgccgattgttttagacggaccgttttctaaactgggggataaaaatatcagtctgattgcaaaagttttgccggaagtatcagaacaggtaattatttttatgctggacaaggactggaagtacacaggactcgatgaatatgtcggtgcgtcttattatattgaaaaagcggccgacgaggcatatgcgtccatacggaaagtagaatctgatcagtagcggaaggggatacaaaagatggggaattatgaattttttaagaaggagtttgaatttcatggaaagcatgccaggatggcaggtgaattgtgggtaaaaggtgactatgagcatacctgtttccggagactgatcgatctgtatatggtggcagcagtggtgggatttcgcgtagaccgtaaagcaaaggaagatttctcgccgtttgggacaaagagcattttagccgagcaggtcatcaatgcaaaagaagaattagattttattatgcagatgatgatcatgctggatgcgaaagaaagcatgccggctgaggaagcagtaaaaaaagcattccggggtgcggagacggaggaagaatttcaggcttatcagtccatgtttcatgattatgtcagaggcggggtagaggaactgtatgagagactgatcattcaaaaagcagaaccggacagtgaattttatgataataaaacagcaaatctgatgtctgtgttagaaagatttggttatggtttacaggatatggaataataattttacatgatttttgaaggaaaaatgtaaaaaatcaaaaacaggtatttacaatcgtcgaaaacaggggtataatctaagagaattatatcataccaagtgataattaggttattacaataaggtaagaaacctaaaagctctaatcccattcttcggaatgggattatcttttatacagaagtttattcatgacaatgaccggtatgcggatcattgttgaagcgcgcagaataaaacagttgtcccgtttgctggtatgagagagaacggttcagatgagaggagaaggaacatggacgaaaaaatggattatcgtattgggttggatattggtattgcatccgtcggctgggcggtattacagaacaacagtgatgacgagccggttcgtatcgtagaccttggggtaaggatatttgatacagcagaaatcccgaaaacaggtgaatctttggcgggaccaaggagagctgcacgaacgacaagaaggcggcttagaagaagaaaacatcgtttagacagaatcaaatggctctttgagaatcagggtctgataaatattgatgactttctgaaacgatataacatggcagggttaccggatgtttatcagcttcgctatgaggcattagaccggaaactgacggatgaagaattagcacaggtgggtgctgcttcatattgcaaaacaccgtggatttcgttcgactagaaaggcagagacggctgcaaaggaaaatggtgcagttttaaaagcgacggatgaaaatcaaaagcggatgcaggaaaagggatatcgtacggtcggggagatgatttatttagatgaagcatttcgaaccggatgttcctggtcagaaaagggatatattctcaccccacgcaataaagcagaaaattatcagcacaccatgttaagggcaatgcttgtggaagaagtcaaagaaattttctccagccagagacgtcttggaaatgaaaaagcgacggaagaattagaagaaaaatatttggaaatcatgacaagtcagagatcttttgatttaggaccaggcatgcagccggatggaaagccaagtccatatgcgatggaaggtttttcggacagagttggaaaatgtacatttcttggagatcagggggagctgcgcggcgcaaagggaacttatacggcagaatattttgtggcactgcagaaaataaatcatacaaaactggttaaccaggatggagagatcagaaactttacagaagaggaacgacgggcactgacgttgctgttattcacacagaaggaagtgaagtacgcagcagttcgcaagaagttaggtttgccggaggatattcttttttataatttaaattataaaaaagctgccacgaaagaagaacagcaaaaagaaaatcaaaatacggaaaaagcaaaatttattgggatgccatactaccatgattacaagaaatgtttggaagaacgggtgaaatatctgacagaaaatgaagtcagggatctgtttgatgagattggtacgatcctgacctgttataagaatgatgacagtcgtacggagcggctggttaagctgggacttgtaccgatagagatggaagggttattggcgtatacaccgacgaagtttcagcatctttcgatgaaggcgatgcggaatattatcccgtttttggaaaaaggcatgacgtatgataaagcatgtgaggaagccggatatgattttaaggcggattctaaggggattaagcagaagttattaacaggagaaaaggtgaatcagacgatcaatgagattacaaatccggtagtaaagcgttctgtatcacagactgtcaaagtgatcaatgcaattatccgtacctatggcagtccacaggcaatcaatattgagcttgcaagagaaatgtcaaagacttttgaagaacgccggaaaataaaaggtgatatggaaaaacgccagaagaataacgaagatgtgaaaaagcagattcaggaattgggaaaattatcaccaaccggacaggatattttaaaatatcgcctgtggcaggaacagcagggaatctgtatgtattccggtaagactattccattggaagaactgtttaaaccggggtatgatattgatcatattttgccatacagtattacatttgatgacagttttcggaataaggtacttgtcacttctcaggaaaaccgccaaaagggaaacaggacaccttatgaatacatgggaaatgatgagcagcgttggaatgagtttgaaactcgtgtgaagacgacgatacgggattataaaaaacagcagaaacttttgaaaaaacatttttcagaggaagagcgtagtgaatttaaagagcgtaacttaacggatacaaaatatattacaaccgttatttataatatgatccgtcagaaccttgaaatggcaccgttaaaccgtccggaaaagaaaaaacaggtacgcgcggtaaatggagcaattacggcgtacttaagaaaacgctggggattacctcagaaaaatcgtgagacagatacacatcatgcgatggatgcggttgtcatcgcctgctgtacggatggcatgatccagaaaatatcgcgttatacaaaagtaagggagagatgttactcaaaaggtacagagtttgtggatgcggagacaggagaaatctttcgaccggaagattacagcagggcagaatgggatgagatatttggtgttcatattccaaaaccatgggagacattccgggcagaactggatgtgagaatgggggatgatccgaagggatttttagatacacactctgatgttgctttggggttggattatccagagtatgattatgaaaatcttcgtccgatttttgtctcaagaatgccaaatcataaggtaacaggggctgcacatgcagatacgatccgcagtccgagacattttaaggatgaaggaatcgtattgactaagacggctttgacagatctgaagttggataaagatggagaaatcgacggctactataacccacaaagtgaccttttattatacgaggcattgaaaaaacagttgttgttatatggaaacgatgcaaaaaaggcatttgctcaggattttcataagccgaaagcagacggtacagaaggtccggtagtacggaaagtcaagatacagaagaaacagacgatgggggtatttgtggattccggaaatggaattgcagaaaatggcggtatggtcagaatcgatgtatttcatgtgaatggaaagtattattttgtaccggtgtatacggcggatgtggtgaagaaggtgctgccgaatagggctgcgacagcacataagccatatggagaatggaaagttatggaggataaggactttttattcagtttgtattcgagggatttaatacatataaagagtaaaaaagatatacctataaaaatggtaaatggtgggatggagggtataaaagaaacgtatgcatactatataggcgcagatatttcggctgctaatatacaaggaattgcacatgacagccgttataagtttagaggcttaggtatacaaagtctggatgtgcttgaaaaatgtcagatagatgttttaggtcatgtttcagtagtaagaagtgaaaaacgaatggggttttcttgataaaaacatgggggataaatgggatttcgaaatattaagatagacagtcatgtaaagctgtctatcaaaaatcagcagctaaatattgaaacagacatagcaagacagattccactggaggatatcaactgtatcattatagaaaatcagaccgtaactgtctcagcttatttacttcaaaaaatggcagatatgggaatcgcggtttatgtctgtgatgagaaacatcttccgaatgcagtattgcttcccatggtaaggcacagtcgccattttaaaattctgaaatatcagatagaggcaggaaagcccttacagaaaagactctggcagcagatcgtggttcagaaaataagaaaccaggcattgtgtttagcctaccttgaactggatggatcagaagaactgatgaaaatgtgtaaagaagtccagtcaggcgatcgaacacatgtggaggcgaaagcagcagctttttattttaaaagtctgtatggattaggattttcacgcggtaatgatcatatcattaacgcggcgttaaattatggttatgctattgtaagaggtctgatcgcccgctccattgtctgttatggattagaaccttcgattggagtgttccatcatagtgagctgaataattttaatttggcggatgatatgatcgagccatttcgtccgttagttgacctgtatgtagcccaaaattatgatatagcagaaattgacagcgatcttacgccagaaagaaaacgtggtatttttggtattataaattatgatatggatatgaaaggagaaaaacgtattatcagtaattgtattgatatgctggtggcaagttacagtagtgctttgcagggaaaaagatcagatttggagttgccggaactgatgcaattacaggtacatagctatgaataggtttatgagaatgttagtattttttgatctgccagtagtaactgcaaaagagaaaaaggatgccacaaaatttcgtaagtttttattgaaagatggctacaatatggtgcagtggtctgtatattccaggatatgcaatggtatggatgcagttgcaatgcataaacagcgtttaaaacaaaatctgcccttaaaaggatcagtacgtgcgctggttttaacagaaaagcagtatgaatctatggaaattatgttaggaacgaaaacgttcgatgacaccccggaatcaatagaattaatggatgttttttgaaaaaagaagattttcgatagaatttaacttccaaattaaagattttttttagatgaaatccccacgaatccctgtagttcgtggggatttgtgctccctattataccataccaagtgataacagggaattacaacaccatcaccgggcttgccatgaaaacagtcattataccataccaagtgataacagggaattacaacgccagctcgacagcgttcttgtgagcctgcattataccataccaagtgataacagggaattacaactaaggatgcatatcgttaccgcaacagtgattataccataccaagtgataacagggaattacaacgattgtgtctgtgattgtgcttttcagtgtattataccataccaagtgataacagggaattacaactttgttccacgcaacagtttcttccctttcattataccataccaagtgataacagggaattacaaccccggtgtggctggtgccgccgtcgcctaattataccataccaagtgataacagggaattacaaccttgcttttacgattaacggcaaatactgattataccataccaagtgataacagggaattacaacttcctcccttctgtgtgttttttcttccacattataccataccaagtgataacagggaattacaaccttacgattatattttctgcagtaacagatattataccataccaagtgataacagggaattacaaccttacgattatattttctgcagtaacagatattataccataccaagtgataacagggaattacaacttcctcccttctgtgtgttttttcttccacattataccataccaagtgataacagggaattacaaccttacgattatattttctgcagtaacagatattataccataccaagtgataacagggaattacaaccttacgattatattttctgcagtaacagatattataccataccaagtgataacagggaattacaaccttacgattatattttctgcagtaacagatattataccataccaagtgataacagggaattacaacttgcatctgtttcttccaccggtaaagtcaattataccataccaagtgataacagggaattacaactaaaagacaaaatctcctacccctgtacgtattataccataccaagtgataacagggaattacaacgagatcgaagacgataatttcgaaataattattataccataccaagtgataacagggaattacaactactgttaaaacaggcgcaaaaatcagtgaattataccataccaagtgataacagggaattacaactcagcacttaaggaataatttacatctgctattataccataccaagtgataacagggaattacaacaaaaggcgttttgatttgcgacgaatggcgattataccataccaagtgataacagggaattacaacaaactccggtaaaaactttagtttacacctattataccataccaagtgataacagggaattacaacgtatagcacattatactttactccgtaaagattataccataccaagtgataacagggaattacaacgcgactgcgacagaagtcgggggtaatactattataccataccaagtgataacagggaattacaactgttgtcgattatatttccgaaacaattttattataccataccaagtgataacagggaattacaacggatattgatagtgatagtgttgtgcaaggattataccataccaagtgataacagggaattacaacacgcctttagcacgcaatagtgcttataaaattataccataccaagtgataacagggaattacaacatttgacaagtgcagactatgaaagttgttattataccataccaagtgataacagggaattacaacgctgcacaacacctatgtttagaaaacaaaattataccataccaagtgataacagggaattacaacctgccagtgagtgaaattgcagcagataatattataccataccaagtgataacagggaattacaacgtaagtcattgctatcgagataatgacaaattataccataccaagtgataacagggaattacaacgtgcaggttgaaatattattgactgctgatattataccataccaagtgataacagggaattacaaccggtgggcataataagcggaatgatgatatattataccataccaagtgataacagggaattacaaccatcatatcgttgtacgcttcgcgctccggattataccataccaagtgataacagggaattacaacaatcgttatggatagtattttaaattgcagattataccataccaagtgataacagggaattacaaccggttgaaaaagagactgtgatcgaggaaaattataccataccaagtgatgcaaattccgcttcatcggatcaccgattccgctagcaacggatcagtgtttcc

SEQ ID NO: 3890 - DNA, 16557 bp, synthetic construct
  source 1..16557: mol_type = other DNA
  misc_feature 1..16557: note = Synthetic
ttttgcagaggatatgaaaacgctgcaggatatgtgcgaattggcggaaagttccgatcagaaattattttttacaatggtggcacataaaagtattcatgagtataccaggagtatagacacttccatgaaaaatgcgtttcgcggagtagaaggaagaatttcagagatatctttcgtcgtatccgcacaaaataattatgaattgatcgccaattcaatccggaaggaagaacctgcgttttcgaaacaatatgaaaaagagattgcgaaaaatgagcaggggaagctccagaagttatcctatcagcttccatgttttcagaaattattttcagagcaggactttgaacggatcgttgccaaaggatgtttcccgctgacaccgcttgctgcgtatgcattacttcatatcagtgaacgtgttgcacagaatgagagaacaatatttacatttttagcagatgatggacagggaagtttatcatggctgttagagcggaatgaagaaaactgggtaggcgttgataaaatttatgattattttaaatcaatgttccgtgaaaccgaagatgtaccgatgatccattcagagtggctgaaggcagagtatgcgctgggaaaagcggaaacggaagatgagaaagctgtcataaaagcaatcgcagtaatccgtatgttacatagagaggatgaacttcctgcacaggatcaggcaatctgtcttgcattagggatggatccggaaaagaagtatcgtcctgcaatggaaaaattaaaaaaagatgggattttaatgttccgcagcagtgtcggagtatatgcattccgcagcaatgcaggcgttgatgtggaaaaagaaatcacgaagaagatggatgagcaaaaagggcactgtaatttttgccagattctgtcagaggctgcagacacagagtatgaactgccaaagcagtataatcaggaatatgcgatgacacgctattttcagtatgagtatatgtttgcagaagagttttttgccctggaaaatacaagatatctgtttgatgaaaagttttcagacggaaaaattatagtgatgccggaaaaagaaaaaccccaaacagatgagatacaaaagcagttagataaactggcggataaaagaattcttgtgttagtgtccgaccaacgttttgacaaagaggaattattacttcgctatcaggcggttatgacgttaaaaggggacaaacgctttattgaagaaaatgaagtgctgctgcaggaactggaattatgtgctgaggatatccggtttgaaattaatatctatctggaagagcattatctgccggagagcggaaaggtaatagttctccagacgcaaaagaaaaaagaaaagtgtacaacggccgcagaatttaatcagatattaagtgatgtctgcagagaatattatggctacgcgccgcgtgtaaaccatgaactgttaaatattgaacacatcggcaagcagtatttaagagcgcgcaatcaggtgatcgataaaatgttagggcatgaggatctgtctgtgtaccaaaaaggaaccatgccggaggctatggtatatcgtgctgcatttgtgcataccagaggggataagggctgtcagaaagttagtttagagatagatcgtttttttgcggaatgtgcaggtgaaaaaaagtcttttcagatattataccagcgattgcagggaaaatgttttggcgcaaggcgaggagtgattccattgtttctggcaaaaaaattatctgaaattgaaggaacagcggtcatttatattggggagaaagagctggaaattacttcggataacctgaatcatgtgaatgattttccagaaaactatgcattgtatctggagctggaaaccgttgaaaaagaaaaatatttaaaaaaattggaaaagatttttgaatgtgatacggagaagttttccggacagagcagattcgcacagattgctgcctgcatgcagaaatggtatcggtcacttccccagtacacgatgataacactaaatcttccggaaaatcaaagtggatcgataaagaaacttaggaatctgttgagaagagcagaaatcaatccaagagaattgttatttgaaaaaattccggcatgctatggagaacctggttttgagcaaacggcacaggatttaaaagaaagtaaaaaaatattagatgatgtatttattacattaaaaaaacaggtcgcaggaaacataaagcgcgaatttggaaaaacgcagaatgtgagtctgaaagcatgtttacacgaatggtatctggcacagaattattcatcaagaaatcatgtactggcaacggcagagagtgaatttttgaattatttagagaaactttctaccaatgatgagggagaaattgtatcagcgttgtcttatattttatcaggggtatatttagaggactggaatgatacaaactttgtagaatttcaggagaaattgcacgcggtaaaagctgaagttgaaaaacttgaggaacatggtaaagatgcaggtggcagcagtcgtatcctgttgacagaccagaatggaaatgccatagaaaagtattataatgcggatatttcggatacaacgagcctttacttaaagaatatgttagaagaggcattggaggactttgggaatacgctcgaaacaaatcagaaggttgcagtgctggtgcagactttagagggattattacagtaagagaagaggagattggttatggaagaaatttatcttgataatgcagcgacgacatttccaaaaccagaatgtgtatatcaggcaatggatgaaattgcgcggaccggtgctgtcaatgcaggcaggggttcttatgcgctggcgcggcaggcatccgggttgattgagagtacaagaaaacagatcaaagaacttgcaggagcagatgatgtagcagaggttgtgtttacagcctctgctacgcttgcatgtaacgtgattttagggggactcgaatggaaacagacggatatcgtatatgtttcaccttttgagcacaatgcaatgatgagagtgttgtatcattaccagaaacaatatggatttaaaattatcgaacttgcattaaacagggagtcgttagaattagatttgtcacagatcaggtttcagttcaccagagaacatccaacagtcattgttatgagtcatgtcagcaatgtgacaggttacattctgccaatcaatgaggtggcagagtcagcaaaacaatatggagcagttgtggcggtggatggttcacaggcgcttgggcttgtgccggtaaaattgaaagagagtggaatcgatttttatgtttttgcggggcataaaacactctatggtccgtttggagttggaggatttatcagtgagggggatatttctttaaaaccgtttcttgtgggtggaacaggcagtgattccttaaaccttgatatgccaggacaaatgccgggaatcttagaaccgggaagccccaatatagttgcgattgcaggattacatgcagccttagaagcgtgctgtgacatggaaaggcaactttcacaagaaagaaaatttgcagaatatctgattgaaaagctaaaaagaatagacggagttttactgtatctgccttgggatgaaatgaaacgaaccggaattgtttctttttccatagagggttaccgtgcggatgaagtggggatgctgctcgatgaagattatcatatagcggtcagaacagggtatcaatgtgtaccgctgatccataaatatttaaaagatgaaaaatatggcggcgtgatccgggtggggatcggacgttttacaaagcagagtgagttggaaatattaatcaatgcgatagaagaaattgcagaagggtgaaggaaaaatggaaaatcaacgtttggattttggagagattgtcagaaaaattgcggaggataaaatgctgctgccggattttcagagaggatttgtctggaaggatgaagaacagagaaagatcgtagcatcagttctggcaaaaatgccgatagggagtattttactgttgaaatcaaagccggatgagtatgcatcgaagtcaatcggtatgaaagaaaaaaatacatatcaaagccaggatggtgaggtcgaatttctactggatggacagcagcgtatgacagcgcttacgaatgttttttcaaatgtgatttatgaaaaatgtaaaatgttttcaaaattgagttcacgggcattacagcgaagattttttttaagaattccaaagtgggagaactgtaaagaagaggcagatctgtttggagtccataatttgacttttcccatatcagattctgcggaaccggattttctgacagcggatattttaccgtttattaaatgtgccgcattttttaatcaggatggagagccgtataatccacagcagtctttgtcgacccgtctggatgatttttgcctgacaaatgaggatggatatttagtaccgctgtatttgatggtggcaccggaaaatataaaaaaggcgcagataatgctgcgctataatacgatcacctctgatatcgcaggtaaaatcggagatgagatcagacagcattttacagatttgtcggatgaaaataagaatgattttatagcagagatttttggaaatgatgaaaactgtaatgaaataaaagaagatcattctaagttcggtgaaaaagtgcaagaaaaacaaatggtgtggaaagtctgtctgacaaattatctggattcctgtgtaaagaatatggcgttgaataagattgaggtatcgggggaacagcgtgacagggcgatcgatatctatgagaatttaaatcgtggaggaatcagtttaaatacttttgatctggttatggcgagagttgcaaaagtaagtacagataatttttatcgtcgtctggtcaggtatattcaggaagaaaaaagttatgacaaacaggtcttaccggatcagattgttcccttgattgggaaaaaaatacaaaataatcaatacaatgcatccatcagtacgggatgttataacgaggaaaagaatgacatagcaggaaagtatattgatgtttttttagatgtgctgtgtctgtattgcaataacaagttatttgaaccggataaattcaaattagattatataaagaagaagcagattctgatgttagcaccaacggatattaatgataatgcgaaaaaggtttgtgatgccatagacagggtaatgtttttctttcagagcagatgcggaattcggaatatccaggaaataaattattctttgatgattgtcttagtggcagttatatttttaaaggatgagtggtttaacgataaaactgttcacgatattttagaagcgtggtattggtcatcattattttccggcgagtatgataaagatcagaatataaagatgatcgcgcatcttcagaccatggtaaagacaatgcaggcatccagccgaaaagagaatgttgactggattgcaaatatcaaaaattatgtgttggaagcacagaatttttcggatgaaaagtttttactgatggaaaaggcggatgaagaccgtatcccgaaaaaagtgatgcgcatgtttatgtgtcagtatctgctgtcaaagacatataaggatatgtttgacgaaaataaaattttaagtgcatattccgatgaaacagaaagatttgaggcacatcatattataccgcttggaacagtaaaaaaggtaggggaatctacgaaaaaacttcgtgatgatgaaaaaaatatctgcaactcgcctttaaattttgtgtacataacgaaaaaagcaaataaggaaatatccgatgaatccttaaaagattatgtacagaagatcaacgcggaagcaaaagcaaaactgcatattacggcttatacaaattcggatataccacaagatcaggtaaaacagattttaagggaacggtatgatttcctgaagggggatatcagggagcggatcagtactttattaagttaaatacggcttggaaagtgcagataaagatattgttttacgaaagaacaatgcaggatggaggtattttatgaaagaggtcagtgaaaaagtaatgcggaatatgatttttgaggttcttcatgtggagcgtaaaaatttgcggagcaaggcaaaaacagatcagaggatggctgaggaacttgcaaagatcatagttgattatgcgaagatgtcagtgtagcagacttagggggagaatagcatgaaattccagagcattacaatgaataattttatgaggtataaggggcagaatgtaatcgagttcagctgcgatgaaaaaagaaatgttactgtcgtgctgggagataatacggttggcaagacaacaattgcacaggcatttcgctgggtgctttatggtgcggtattgacagaacgcggaaagcagcaggaagactaccagctgttaaacaatgatattctggcaatgatggatgcgaacagtaaagcggatgttacggtggaactggttgctgttgatgatgaaaaaagataccggatcaagcgtgaaatccattatacgcgtgcatatccacagttgatcgcaaaagaattttataagaaagtttcactggaaatatcagaaaaggatgatccaaatgccggtatttctgtggaaacggaaaaaatagaagaggtaatccgtgaattatttcccaaaaatctgtcacattattttttgtttgatggagagagatggaatgatgtaactgttaacggtgtgcgtgaaaatatcaaagagtctgtacatacactgaccggattatctgcgtatcaggctgcaatctggcatttgaaggatatgggaagtcattccgttattaaaaagttcaaaggaaagatatcaggttctggtaatatgtatgataatctggaaaaagaccggaatcgcatggaacatgagatagagcagtgtaaagataagataaaaaatatcgaaatcaatatacaaaacaataatgaaaaaatagaggaggtgcagcagtatcttcttgaaaataagaatacggaaattttgcaggcaaaatataaccagttattagtagtaagaagaacgcaggcggaaagaggagttgctgcatataaaagtctggtaaatttattcagtgataaagcttatatgttgtttgcgaaaccgatgatagaggcatctgtgaaaatggtaaaatctgttgcaggagagcggcgtgacataccgcatatgcatcaggcaagtattgactatattataaaaacaggcagatgtatctgtggaactccaatattaccggagtctaaggaattagaaagtctgatggaacagagaaattttcttccgccggcagatattggttcattgctgggtgagtttgaacggacaggacagcgctggaaccggcaaagcaattctgtttatgatgatttaagagaagatgcgcaaaatgtggatcagagcatccgggcttacgaggaaacctgtaatcagttagccgggatggaacagcagatggacaggcagacagactttgctgaaaaaagaaaaatgctgaaatattatcagagtgaaaacagtaaattaggggtggaaaagggaacactgcagggacagattataaactttgagcggcagattgaacggatcgaagcggagatgaagagccaggaggtcaagagcgaagaaaataaaaaatggcgagagcgtgtagatttggcagaagcattatatacaagattaaaaaatgattttgaggtaaaaaagaataagacatttctggaattaaacggacagatccaaaaaaattttgagcgtatgttcaatgcgaaagataaaagaatacagttgacggaaaattatgagatccagatgttatatcagacggatttgggtttccgcgaagagaagaatctgtcagagggcgaaaaaatcgcacgcaattttgcatttatcgttacaatcatggaatacagcagaaataaaaaggctgagcatcttggagtggaaagtggaggagatacactgccgattgttttagacggaccgttttctaaactgggggataaaaatatcagtctgattgcaaaagttttgccggaagtatcagaacaggtaattatttttatgctggacaaggactggaagtacacaggactcgatgaatatgtcggtgcgtcttattatattgaaaaagcggccgacgaggcatatgcgtccatacggaaagtagaatctgatcagtagcggaaggggatacaaaagatggggaattatgaattttttaagaaggagtttgaatttcatggaaagcatgccaggatggcaggtgaattgtgggtaaaaggtgactatgagcatacctgtttccggagactgatcgatctgtatatggtggcagcagtggtgggatttcgcgtagaccgtaaagcaaaggaagatttctcgccgtttgggacaaagagcattttagccgagcaggtcatcaatgcaaaagaagaattagattttattatgcagatgatgatcatgctggatgcgaaagaaagcatgccggctgaggaagcagtaaaaaaagcattccggggtgcggagacggaggaagaatttcaggcttatcagtccatgtttcatgattatgtcagaggcggggtagaggaactgtatgagagactgatcattcaaaaagcagaaccggacagtgaattttatgataataaaacagcaaatctgatgtctgtgttagaaagatttggttatggtttacaggatatggaggagtaataattttacatgatttttgaaggaaaaatgtaaaaaaatcaaaaacaggtatttacaatcgtcgaaaacaggggtataatttaagagaattatatcataccaagtgataattaggttattacaataaggtaagaaacctaaaagctctaatcccattcttcggaatgggattatcttttatacagaagtttattcatgacaatgaccggtatgcggatcattgttgaagcgcgcagaataaaacagttgtcccgtttgctggtatgagagagaacggttcagatgagaggagaaggaacatggacgaaaaaatggattatcgtattgggttggatattggtattgcatccgtcggctgggcggtattacagaacaacagtgatgacgagccggttcgtatcgtagaccttggggtaaggatatttgatacagcagaaatcccgaaaacaggtgaatctttggcgggaccaaggagagctgcacgaacgacaagaaggcggcttagaagaagaaaacatcgtttagacagaatcaaatggctctttgagaatcagggtctgataaatattgatgactttctgaaacgatataacatggcagggttaccggatgtttatcagcttcgctatgaggcattagaccggaaactgacggatgaagaattagcacaggtgctgcttcatattgcaaaacaccgtggatttcgttcgactagaaaggcagagacggctgcaaaggaaaatggtgcagttttaaaagcgacggatgaaaatcaaaagcggatgcaggaaaagggatatcgtacggtcggggagatgatttatttagatgaagcatttcgaaccggatgttcctggtcagaaaagggatatattctcaccccacgcaataaagcagaaaattatcagcacaccatgttaagggcaatgcttgtggaagaagtcaaagaaattttctccagccagagacgtcttggaaatgaaaaagcgacggaagaattagaagaaaaatatttggaaatcatgacaagtcagagatcttttgatttaggaccaggcatgcagccggatggaaagccaagtccatatgcgatggaaggtttttcggacagagttggaaaatgtacatttcttggagatcagggggagctgcgcggcgcaaagggacttatacggcagaatattttgtggcactgcagaaaataaatcatacaaaactggttaaccaggatggagagaccagaaactttacagaagaggaacgacgggcactgactttgctgttattcacacagaaggaagtgaagtacgcagcagttcgcaagaagttaggtttgccggaggatattcttttttataatttaaattataaaaaagctgccacgaaagaagaacagcaaaaagaaaatcaaaatacggaaaaagcaaaatttattgggatgccatactaccatgattacaagaaatgtttggaagaacgggtgaaatatctgacagaaaatgaagtcagggatctgtttgatgagattggtatgatcctgacctgttataagaatgatgacagtcgtacggagcggctggctaagctgggacttgtaccgatagagatggaagggttattggcgtatacaccgacgaagtttcagcatctttcgatgaaagcgatgcggaatattatcccgtttttggaaaaaggcatgacttatgataaagcatgtgaggaagccggatatgattttaaggcggattctaaggggattaagcagaagttattaacaggagaaaaggtgaatcagacgatcaatgagattacaaatccggtagtaaagcgttctgtatcacagactgtcaaagtgatcaatgcaattatccgtacctatggcagtccacaggcaatcaatattgagcttgcaagagaaatgtcaaagacttttgaagaacgccggaaaataaaaggtgatatggaaaaacgccagaagaataacgaagatgtgaaaaagcagattcaggaattgggaaaattatcaccaactggacaggatattttaaaatatcgcctgtggcaggaacagcagggaatctgtatgtattccggtaagactattccattggaagaactgtttaaaccggggtatgatattgatcatattttgccatacagtattacatttgatgacagttttcggaataaggtacttgtcacttctcaggaaaaccgccaaaagggaaacaggacaccttatgaatacatgggaaatgatgagcagcgttggaatgagtttgaaactcgtgtgaagacgacgatacgggattataaaaaacagcagaaacttttgaaaaaacatttttcagaggaagagcgtagtgaatttaaagagcgtaacttaacggatacaaaatatattacaaccgttatttataatatgatccgtcagaaccttgaaatggcaccgttaaaccgtccggaaaagaaaaaacaggtacgcgcggtaaatggagcaattacggcgtacttaagaaaacgctggggattacctcagaaaaatcgtgagacagatacacatcatgcgatggatgcggttgtcatcgcctgctgtacggatggcatgatccagaaaatatcgcgatatacgaaagtaagagagagatgttactcaaaaggtacagagtttgtggatgcggagacgggagaaatctttcgaccggaagattacagccgggcagaatgggatgagatatttggtgttcatattccaaaaccatgggagacattccgggcagaactggatgtgagaatgggagatgatccgaagggatttttagatacacactctgatgttgctttggagttggattatccagagtatgattatgaaaatcttcgtccgatttttgtctcaagaatgccaaatcataaggtaacaggggctgcacatgcagatacgatccgcagtccgagacattttaaggatgaaggaatcgtattgactaagacggctttgacagatctgaagttggataaagatggagaaatcgacggctactataacccacaaagtgaccttttattatacgaggcattgaaaaaacagttgttgttatatggaaacgatgcaaaaaaggcatttgctcaggattttcataagccgaaagcagacggtacagaaggtccggtagtacggaaagtcaagatacagaagaaacagacgatgggggtatttgtggattccggaaatggaattgcagaaaatggcggtatggtcagaatcgatgtgtatcgtgtgaatggaaagtattattttgtaccggtgtatacggcggatgtggtgaagaaggtgctgccggatagggcatcaacagcaaataagccatatagtgagtggcgaactatggaagataaagattttttgttcagcttgtattcgagagatttggtgcatataaagagtaaaaaaggcattccgataaaaaatgtggatggcagcttaggagaatcgaaagaagtatatgcatattatattggagcagatatttctggagcgaaaatagaagggaaagcacatgatagccgatatacttttagaggaattggggtacaaaaattagaattaatagaaaagtgtcaggtagatattttagggcatatatctacagtaaaaaatgaaaaacgaatgggtttttcttgataaaaacatggaggataaatggggtttcgaaatattaagatagacagtcatgtaaaactgtctatcaaaaatcagcagttatatattgaaacagacatactcagacagattccactggaggatatcaactgtatcatcatagaaaatcagacagtaacagtctctgcttatttgctccagaagatggcagatatgggaattacggtctatgtctgtgatgaaaagcatcttccgaatgcagtactgcttccaatggtaaggcacagtcgtcattttaaaattctgaaatatcagatagaggcaggaaaacccttacagaaaagactttggcagcagatcgtggttcgaaagatcagaaaccaggcattgtgtttagcctatcttgatttagacggatcagaagaattaatgaaaatgtgcaaagaagtacagtctggtgatcggacacatgtggaggcgaaagcagcagctttttattttaaaagtctgtatggattgggattttcacggggcaatgatcatgtcattaactcggcattaaattatggttatgccattgtaagaggtctgattgcccgctccattgtctgttatggattggagccttcgattggagtgttccaccatagtgaactgaataattttaatttggctgatgatatgattgaaccatttcgtcccttagttgacctgtatgtatcccagaattatgatgtagcagaaattgacagtgatcttacgccagaaagaaaacgtgatatttttggtattataaattatgatatggatgtgaaaggggaaaaacgcattatcagtaattgtattgatatgctggtggcaagttacagtagtgctctgcagggaaaaagatcagatttggagttgccggaactgatgcaattacaggtacatagctatgaataagtttatgagaatgttagtgttttttgatctgccggtagtaactgcaaaagagaaaaaggatgccgcgaaatttcgtaagtttttgttgaaagatggctacaatatggtgcagtggtctgtatattccaggatatgcaatggtatggatgcagttgcaatgcataaacagcgtttaaaacaaaatctgcctataaaaggatctgtacgtgcgctggttttaacagaaaagcagtatgagtctatggaagtcatgttgggaacaaaaacatttgaggatacccctgaatcgatagaattaatggatgttttttgaaaaaagaagattttcgatagaatttaacttccaaattaaagatttttttttagatgaaatccccacgaatccctgtagttcgtggggatttgtgctccctattataccataccaagtgataacagggaattacaacttataatcatgctctgttacaaattctttaattataccataccaagtgataacagggaattacaacgactggaacttcgctccaatcaacatactgattataccataccaagtgataacagggaattacaaccaatggagtaccgggaatggtccttgagtgattataccataccaagtgataacagggaattacaaccaagtcccgttaaaattacatttaaagtaaattataccataccaagtgataacagggaattacaacgtatcagaagaaaagagttatattctctttattataccataccaagtgataacagggaattacaacagagggtaagccgaattttggcttgtttatattataccataccaagtgataacagggaattacaacgtgctgatgatgtaaaaaacggaaaaggtgattataccataccaagtgataacagggaattacaacggcaaaaggttccttatatagagtggatttattataccataccaagtgataacagggaattacaactaaatagatagtgaggtaaaatgtatttatattataccataccaagtgataacagggaattacaaccactacctagaccaaaaagcgaaagagataattataccataccaagtgataacagggaattacaacagtggaaacgtactcggcattcaaggaattattataccataccaagtgataacagggaattacaacaatgtgtcaaatataaacgtaacctaaaaattataccataccaagtgataacagggaattacaaccttatgacacaacgggcgcgaacgctactgattataccataccaagtgataacagggaattacaaccatcacctttaataatatttttataagttgattataccataccaagtgataacagggaattacaacgataaagaaagaagtgctggaatacattgcattataccataccaagtgataacagggaattacaacgagaactacgcacaggacgaagaagggaatattataccataccaagtgataacagggaattacaacttgtttcaagataaggcagtaaccaaaaacattataccataccaagtgataacagggaattacaacggcattagttagttcatctggaatatattattataccataccaagtgataacagggaattacaaccacgccgtctggatccgcccgagaaaacttattataccataccaagtgataacagggaattacaactgaaagagggaaatatcgataagctggaagattataccataccaagtgataacagggaattacaacaattggcaactatcggagtttgcaatgcctattataccataccaagtgataacagggaattacaacatatggaaaacatccgaaaaaaaataatgaattataccataccaagtgataacagggaattacaacgattcgatttaccaagctttgacagataacattataccataccaagtgataacagggaattacaacgatgaaactatttcctcaaatgatacgcaaattataccataccaagtgataacagggaattacaactatgagtgtaccaagtaaggaagagttctaattataccataccaagtgataacagggaattacaactgtttggatggtttacccttgctacatattattataccataccaagtgataacagggaattacaaccaagcggaaaaaatgattcttgacttaatcattataccataccaagtgataacagggaattacaaccggaaacaccggcacccctttaaattatttattataccataccaagtgataacagggaattacaactgcagaagataatgactatgaaaaagagtgattataccataccaagtgataacagggaattacaaccgaggaaagcggggttctggaagaacttttattataccataccaagtgataacagggaattacaacaccttgaaatttgataaaatagatatgccaattataccataccaagtgataacagggaattacaacacaagttgtttgtgataatgcacactataaattataccataccaagtgataacagggaattacaacatcaatgaatttctccaatgcattccatcattataccataccaagtgataacagggaattacaacgaagcaactatgcagttacaatctttcaaattataccataccaagtgataacagggaattacaactcatccttattcatactgaaatctgttaacattataccataccaagtgataacagggaattacaacatgccgtcgctcaacaagtattgcggctttattataccataccaagtgataacagggaattacaacagttgttatggatagacgttgttgatttgattataccataccaagtgataacagggaattacaactccgaagctgtcaacgctcttgctctggacattataccataccaagtgataacagggaattacaacaaaatgtgatgtaggggaagttcgatttttattataccataccaagtgataacagggaattacgggagtttgacacattgaaatccaaaaaagtaccacaaagccttgaaataggc

SEQ ID NO: 3891 - DNA, 15763 bp, synthetic construct
  misc_feature 1..15763: note = Synthetic
  source 1..15763: mol_type = other DNA
gactggttcatggcgttaacgattacgtttctccagccaacttcggcagcacggtcgaggcttggaaggaggtagaacttaaggccctcagaagagccgggaatcagaacactgtgaacagcaagcacgacaatcagaagaaacagacacatcatcattggcgtggtgacgcgctcaagacctttctgaagtccggtgctgataataacgaaaccgattacgattgtaagtacggtgaagattgtcatttcagtcggattgccaagcatctctgtgaagacgcctgaaatatcgtctgtttcaacgccatcaaaggaacctttcaggaatttgatgaagtagtttaacatccatcctgaaacagttgtgtagtacatcataaggagataacagccggcaatacagaaccatccgtggatatgccacttgtggcccggcttttcgagtgccttatatcccggcacgatggtttttcttgatccacggccgacagccagttccatcgaaagaaccggaacgcccatgattactaagaataacagatagaataggaggaaaacggcaccgccgctctgtcctgtaatgaacggaaacttccatacgtttccgattccgatagcacatcctgctgaaacgaggatgaaaccaagtcttgatttgaaattttctctttgttccataacttttccctttttatagatttgtcgtagctacgggcgagatccgccctgaagcgagtgcatccgaactgcctttttgtcattcgactatgatgagcgtgagtgcctggctatcaaacgcctgtcattcgatttcgaaataaaaagacacgttataatactgtgacactatagcacattaaagcaggttagtaaagggaggggctgcgggacaatcgcaaggttttcggcgcgcgggcgccccgccgctcgcgtcgcatgccggcctcgcactgtttcgtgaatttgagtacttcacgaaaactgttaagttgtttacaatgaaggaagagaatggttcgaaaataacttaaaggcgcggccggctataatccgcgcagaacgagcggcgcggctgggcccgcgatccccgcgggcagcgcgttttgaattaaggaggaaatctttatgattcattatgatagaaaagttcagaggatggcattaaaggacagggttcgcctgtgcagcggaaagaatgcatgggttacgaaacagtttcataagtacggaattccatcgatgctgatgtgcgatggtcctcacggactcagaaaacaggcgagtcttacggattctttcggcattcataatgcggtgccggcaacgtgttttccgacggctgtaacagcgggagcgacctggaatcgtgagttgttggagaagatgggcgaggcgctttccgaagaggctctggcaaatggcgtcaacctcgtgctggggccgggcctgtgcctgaagcgtaatcctttatgtggaagaaattttgaatattacagcgaagatccggtgattgccggtgagtctgcggccgcgtttgtgaacggaatccagagcaaaggagtgggggcgtgcctgaagcactttgccgcgaataatcaggagttcaagcgcttttcgtccgacagcgttgtcgacgagcggacgttgcaggagctgtatttaagcggctttgagcgcgcggtgaagaagtcacacccgatggccgtgatggccgcctacaatctgctgaacggcgtgcattgcacggaaaataagcgtctgctgacggacctgctccgcaatcgctggggctttaacggttttgttgtgaccgactggggagcgatgaccgacagaagcaaggcatttgccgcaggctgcgatttaaacatgccgggcggttcgaactttggcgagaatcaggcggtgcgagacgtggaaaatggcctactttccgaggaggctgtgaacgcaagcgccgagcgcatcctgcgcgcaatctacgagtcgaggaaggctgcactgaaatatcacgccgagctggcgcgccatgcggaggttgacgactcagccggagcagctggtgctgcgcactgcgaatttgacgcgaaggcgcacagccgccttgcatttgagggtgcgctcgaaggcgcagtgttacttaaaaacgacggggttctgccgattcgcgacatgaccgggatgctggtctgcggatatcaggcgaagaatatgcgctatcagggctctggtagctcccacatcaatccgacgcacctggccgggttctttgattacgcgaaaaacagcaagtacctgaaggtgacgaatgaacggggcgaggcggacgatgagtcgctggtcaagcttaaaaatacaagcggcaaagagttcgagggaatcgtggtatttgccgggcttcccgacagcttcgaggcggaaggattcgatcgcgcttccttaaagcttcccgacggggaaaatgcgatggtcgaggctgcaattgcttcgggactgccggttacagttgtgctgattggcggcgtgattgagcttccatgggcagaccgcgtttctgcgattttgtacatgggactcgcaggtcaggaggccgcgaaagccgcatattttctgctggttggagccttctctccatccggccgcttgaccgagtcctggccgttccgctacagggatgttccgagcgccggcttctacggcgccgagaagaagggaaagaacgcggaatacagggagggcctgtacgtcggctatcgctattatcagaaggccggcgtcgaagtccgctacccattcggcttcggcttaagctacagcggatttgcgtttgagaatctgcgcgtcagcgcgcttggtggtggtccggccgccgcggctggcactgcgcctgatagcggctttagcgccccactttacgaagtgtccgtcgacgtcacaaacaccggtaccgtgcaggcgtcagaagttgtccagctctacgtcgctgcaaagcctggcgaacagccaacggcgaaagttgcctctgcagtaggcggcgccgcctccaacggctaccgtccggtcagagaattgaagaactttgaaaaggtgaacctgaagccgggcaaaacgaagaccgttacgatgcttttaacagagcgcgacttctccgtatacgacgtaacgtctgatgattatgcagtcgttgccggcgcctacgatattgaaattgggcgttcctgcgaagacattgttttgaaagaagaggtgcaggtcgccggcgcgtccgcagaggcgctgaccgagacccgggacggtctggccgagtggtacttcgctccgaaggggcatccgtccgaagctgagttcctgacgctttataacaagccgcttccatcggatgcggctccggtcagaggaacggcgacgtatgagaacacgcttctggagcttgagaacctgagcccgatagcgaagggcatggttgcgattatgaagaatcgcctggcaaagggatttggcgtgccggaggatagcgatgatccggcgtaccggatggcgcttgccgcaatgctggattcctcgatgtcgaccgtcttcattaactcaggcggccgcctgccgtggccactccttcgcgcaatcattcatacagcgaatggcgaaaggttacaaaagaaacacatggaaacttgacatttgccgcggaaagggtagtattgttttcgttacctggatatgaggggcatttcaaaaggatttttacatgaataataatacaaaaagtggcaggaagaaactgacggcaaagcagcacaggaagaggaatgcgctgaagattacgctgatttgcctgcttgcagtgctggcggtcgtaatcggcggcgtggtgctggtgtttgagcatttttactcccgcacaaatttcatcagcgaatccatggaggacgacggcatcgaggtcgccgactacgctcagagcgaggatggcgtttacaaccttctgctgatcggcgttgacaagcgcgattacaacggcaaatacgccggcaactcggacgtgatgatgctgatgtcgattaactcgaacacgaagaaggtgcatctgatgtcgttcatgcgtgatttgtatgcagacatcgatggtcacggcgttcacaagctgaatgcagcctgctcttacggcggtccgaagctgctgatttcgacgattgagaagaattataaagtcggcatcgataattatgcgatggttgatttcgacgacatggtgaatatcatcgacacgatgggcggtgtcgacattgacgtgaccggcgatgaggttccggtcctgaaccagtatttagaggagctgactgccttagacggcacgaggctttccgactacacgctgagccggggcgggcacctgcacttaaatggcaagcaggccgttgcctactgccgaatccgctacgtcggcaacgcagactaccagcgaaccgagcgtcagcgcaccgtgatgactcagctccttggcaaattttccggtaagaatgccattgagctcggctctcttgctgacaaacttcttccttacattacgcacaatgtcagtcagggcgaagtcctgaacatgattacaaagattccttccatcgcgaagttccgggttgtccaggaaagaattccttatgacaaccactatacttcttcagaagaaatcctggttcctgacatggactacacaatcaggcaaattcagaatgatctgaatgggtgaccggcatgcggcaggaaatttgacattttaaagaatctaaataataatataagcggtggtattcttttaaaagggaggtaactgcaacaatgaaagaatttatcaaagaattcaagaagttcgctttaaagggcaacgtgtttgacatggccatcggcgtagttgtcggcggagcattttccaagattgtaagctcattagttaaggacatcatcatgccattaatcggcatcttaaccggtggtatcaacttcgaaggtctctcagtcaatgtaggaagcgcgacattaacctatggcgtgttcatccagaacgtcattgatttcttaatcatcgcattagtcatcttctgcgtgatcaagtccatcaaccacatgaacgaaagaattcatggcaagaaggaagaagctgctaaagagccttcaaaggaagaacttctgcttactgagataagagatttattaaaggaacagaacaagtaaaaatgcattacattgtattcgacctggaatggaatcagagcccgaagggcaaagaagattctgttccaggtatgccatttgagatcattgagattggagcagtcaagctcaatgaacatctcgaaaaagaaggcgaatactgtgaattagtatgtccgcaggaatacatgaccatccattttcagattcggaaaatgctttcgtacacgatgaaggatttgaaaaaaggccgtctgtttcaggatgtatgtaaagacttcctcgcatggtgcggggatgatgcagtattctgcacgtggggacccggtgacctgacggagctcgaaagaaacatgaaccacttcggtgtggccaatcattttccaaagccactgctgttcctggatttacagaagatttattcgatggaataccaggatggcaaggttaggagcagtctgcagcatgtcgtggaagaattgaagattccggagacaaagggagattatcatcgtgcgatttctgatgcacgatacacggcggcagtagcgcagaagctcgattttgagcagtacgggaagtacaagagtgttgatttataccggattccggacagcgtggaagatgagtttcatctcaacttcgggacctacgaaaagtacgtatcgcatggcgtggaagaccacgaacagtgcgcgcaggacaagaaacttcgcatcgtgaagtgttatgtctgtcagaagaaagctaaggccagaacgccatggttctccgacaatcagggccgctattttggtgtgttcgagtgcacggagcacgggctgatcaagggccgctacagggtcaagcaggattctgaaacgggcttgtattacggcattcgcattttgaagcagaccgacagggaaggcgcagatgcagttgtagagcgcaagcgcagggtggaagaaaaggccgcgcgcaggctcgaagccaggaggcaggaagccttagagcgcaagcaaatggcaaatgccgcgatgaaggacgcatttgacaagggtctcgttgaaggcgtgcagccaaagaaaaagaagtccggtaagaagaaaaagcccgcaaccaagcaggccgcttcgcagatgcccgcaacgtcgcaggtcggcgccaactccgcgacccggcaaatttaaaaattgaatatcaaatcggattgaagatggaattaaggcagttgtgcagcgataaggttaagagaccttgtcagtgcacagctgcctttgtttacgtaaaaagggcggagcctgcgctccgccctctttgtatttgattaaatcagaacaccgtatacagtacagccaccgcgatgacaacctgaacaatcacaagtcgggaaacaacctgtgggtcggaccattccttattcttgcggaagtggtcgtggattggtgtgcggaggttcttcatcgggttcttgtggaacaccttgatgcaggtaaccttaatcagtccgaggccgccgtcaagaatcagaatcagcgcaagcggaatgaaaagcaatggatgatacagctttaagaatgcgtatgcaatcataatgccgatcgcacgggaaccagcatcacccatcagaatctggcttggagaagtgttaaaccaaagatatgctaacaggcacacaatcagcaccatcagcatgtggcggtaagccgggtcgtatccaaaacttctcatcagcaggtacacgctcacaagagtcacgcaggaaagcgttgtgcacaggccgtcgacgccatcagagcagttcgtaacattgatcgcagcccagattagaacaacgatcagaatgccataaataaccgggtgaagcgtcaccttcgtgttcgtgtaagcgatatagaacgaattgtcgttaaaatacaggaaatttacagcggaacctgcggcaaccgcgaaatctaagagccctttttttaaacggctccatggcttttcggacgcatcatcgaagtagccggacagcatctcgacgaacgcgagcgctaaatacacagccatctccacgctcatcggcaggaagatgaaagctgcaatcgtaaatacaatccagataataatgccggcgcctcttggctttccgaccgatttcgttccgttaatggcaaatgcccttcctccgtctttcggcaggtactgcattccgtgccggattgtgaggaacgtacagacgaaagcaaagattacgcttaataccgtaacgatgcgcacaggcgcgtcaggattcaacatgtaaatcataataacctccaaaaagcaaaggcctgcggcggcgccgccagcttaagttttgcttgaaaattggcttcaaatcgggtttgtgagccgaattgagtatagcacaaacagggcctctatgctataatcaacttgtgtttaagaacgaatcgtgaccatacttcaaagaagaagtgcgctgtcaaagggcgcttcttttgtgcacgacacaaagaagatggattaagtatacgggggctttgatatggcgaaaaaagcagcaaagaaaacaacatcaaagaagatgcaggccgtggagaagaagccgcaggccgcagcgccgaaggtggatcctttcattacagagtttgatgcgtacctgttcggacagggcacgcactatgaaatctataataagatgggtgcacacccttgcgtaaaagacggtaaggaaggcgtgtactttgccgtgtgggcaccgacagcgaaagaagtctacatcgtgggtgacttcaacgactggaaggcctatggctatgatatgagcctggtcaacgacggcggcatctatgagagattcgtgccgggtgcgaaggtgggccaaaactacaagttcctcatcattgcagcagatggcagggcgctttataaggccgacccatacgcgaatgcagcgcagctgcgcccggataatgcatccgtcatcaccgatttgagtggatttgcctggggcgatgagaagtgggtcgaagaaaagaaaaaagaagaccacttaaacgttccggtcaacatctacgagtgccacttgggttcctggagaaccaaggacgacggcaccgagtacggcttcatgaactaccgcgaaatcgcgccacagcttgccgaatacgtgaataagttaaactacacccatgtcgaactcatgggcattgcagaatatccatttgacggctcctggggctatcaggtaaccggctactatgcaccaaccgccagatacggcacgccgaaggacttcatgtacttcgtcaattacatgcacgagcagggcatcggcgtaatcttagactgggtgccggcgcattttccaaaggatgacttcggcctcgcgaacttcgacggctcctgcgtttacgagtatgcggacccgagaaagggcgagcatccggactggggcacaaaggtgtttgattacagcaagaacgaggtgatcaatttccttgtggcaaatgccatgttctgggtggatcagtaccatgtagacgggctgcgtgttgatgcggttgcgtccatgctgtacctggattacggcagaacagagggcaactggattccaaataagtttggcggaaacggcaacttagaggcaatcagctttttaaagcatgtcaattcccagttaaaggagcgttttccacaggcaatcacgattgcagaggaatctactgcatggccaagagttacgggagacccgaataacggcgagtgcctgggcttcacatttaagtggaacatgggctggatgcatgacttcttagagtacatgaagctcgatccgtattttagaaagtttaatcataacaagctgacattctctacaatgtatgcatattccgagaggttctgtctggttctgtcacatgatgaggtggttcacttaaagtgctccatgcttggcaaaatgcctggtgacagagatgataagttcgccaatctgatgcttggatacgcgtatatgtgcggtcatccgggcaagaagcttctgttcatgggccaggaattcggccagtggaacgagtggagcgaggcgcatcagcttgactggtatttatgcgaagacgaatgccaccggaacctgcgcgactgggtcggcaagttaaatggcctgtacaagagttatccggcgctttacgaaaccgatttcacaccggaaggcttccagtggatcaacgcagatgacaaggacaactccgtctatcgttgggttcgtaagtcaaaggacggcaagaagaaccttctcttcgtcttaaacttcactccggtggaacgcaagaacttccgcatcggcgcgccaatcaagggtgaatacagactcgtcctttccacagacgaaaccatgacaaagaccctcaagaccgacgattgttactgcgacggctttggcgactctctcatcatcgacctcccgaagtacggcgttgcaatttatgagtacggttacatttaaacagacttgatcttcaccccgccggcagaaatgccggcggggcttttctttcatcagcagttgttgcatatttacaggtgtcatagcacattacgggggtaaaagagagaaaaccacagaaaaaattcgttgaagtatcatttatgaaacacaaaaagtgatacattgctattaaaataaatggattactaataagtggaaaaggtgggaatggtcagtaatgagatatgagcaataagcctaaattagtttctataaatctagcaaattttaaaatatggggtagaaataaaattacaaatgtgatataaatatgtatatcatattataccaattgatattaggttactacagtaaggtagtacacctaagagctctagccccattccttggaatggggctatctttatttttaggaggaaatatgcaagagattaactatcgaattggtttggatatcggaattgcttctgtggggtgggcggcattattaaatgatgaacacaatgaacctgttcatattcttgacatgggggttcgggtatttgacaaagcagaaaatccgaaagatggctctgcacttgctgtgccaaggcgtaataacagaacggcaagaagaaggcaaagacgaaaaaaactaagagttgctactgtaaagaaaatatgtgaagacaatggtctcattcagattcaggagttcgataaaaaactggcaacaggttgttgtccggatgtatatgagttaagagttagggcgttagatgaaagaataagtggtgaaaatttagcgcaaatcctgttgtatttagcgaagcatcgtggatttagatcaaccagaaaatttgaatcaaacaatgaagaaaatggtaaggtattatctgcaactgaggctaatcgcaaaattcttaaagaaggcggctataggacagtaggtgaaatgctgtttaaagatgatgcatttaggtcatatacgtctttttctaataaagaatacgtattaaccacaagaaataaagctgataattatttacattctattgacagagcttcactggttgaagaagttattaagatatttgaagcacaacgtaattatgggaatccatttgtgacagaacagttcgagaaagagtatctccaaattatgcaaaatcagagatcatttgatttaggaccgggtctgcaagctaatggagttaaaagtccgtatgcaatcaatggatttcaagataaagttggaaggtgtacttttgaaaagaatgaatatcgtgccccgaaggcaagctattcagcagagtgtttttcgttattagaaaaaatatctcatttgaagattaacgatataaatggcgattatcgtattctgacatcagaacagagaaataatatatttgagttagcccataaacagaaagacattaaatactcgactttgaggaaacttttaggcttatcagagacggaacgttttaatatggtgtcttacaatgaaaaattaaaacagggtgagcacaataagagtatagagaaaacagaacgatcaaaattttatgagatgaaaaactttcatgagttttgtaaggcgttaaatttagaagagacaataccggatgagacaacaattgatttgttagacaaaatatcagagataataaccggatttaaaaatgatgacagtaggattttagagctcactaaattaggtatatcggaacagcatatttctgaattgcttaagttgtcaccgtctaaatatatgcatttatctattgttgcaatgaagaaaattataccgggattaaaagatgggttgacatatgataaggcatgcgaagcggctggatatgattttcgcagagattcgaatagagaaagaacgaaattattaaagggaaatgtggttcaagaagtactcaatgatattactaatccagtggtaaagcgtggtgtttcacagtcaatcaaagtgataaatgcgattattttgaagtatggaagtcctcaggctatcaacattgaattagcacgtgacatggctaaaaactataaagaccgttctgctgatgaaaagagaatgcttaagagagcagatgaaaattcaaaaatcaaggaagagattattgaattaggttttgctaatcctacagggaaagacattgttaagtaccgattgtggaaggaacagcaggaattgtgcttatacacaggaaagaggattggaatctctgatttatttggtaattcttcaacggttgatgttgatcatattattccttatagtaaaagttttgatgatagctatcataataaggtcctggtatacgcaggtgccaatagagaaaagggaaacagaactccttttgagtatttagggaatactgataaatggaatgattttgttattcgcacaaatctatacattacagattataagaaaaaacagagactttttaaagaacattttacaaaggaggaagcttcagaatttaaagaaagaaatctgaatgatacaagatatataactaaaacggtttataatttgattcggcagaatttatcattcaaaaacaaagcaacggtagtttgtgtgaatggttctataacttcatatttacgaaaaagatgggcgctgccggtgaaggatagaacaacagatttgcatcattcggtagatgcagtcgtgattgcgtgtgtaacacctggaatagttcataaaataacaaaatatacacaggcgcgagaaattgctaaaagtaaaggtttggtgatgatagacgaagaaacaggcgaagtattcgatccaaaggaatataccaacaatgagtgggatgcaatgtttggtgtgaagccacctcttccttggtctgcgtttaaggatgaaattataattagaacaggtaaaaagccattagaattcatccttgcaagtaggaaagttaactgtgaattaaactatcctgaatggatgatgaatgaaaacgttattaaagagatatttgtgtctagaatgcctcgtcataaaaacactggatcagttcacgacgctacaataagaagtcctaagatctttgatgaaggctatgtaatatctaaggtgccattatcaaaactaaaacttaaggcaggtgagatagagaattattacaatcctgaaagtgatttattattatataacgcattaaaagaacgtttgattaaatatgaaaatgattctgagaaagcttttgcagaaccaatgtataaacctaagtctgatggctctcgtggaccattggttaagagggttaaagtcgttagtaagatgacattaggagtacctgcggcttcaggcattgcagcaaatggagacatgattagaattgatattttctgcgaaaatggaaagtattatatggttccgatatacgttgcagacacggttaagaaagagctacctaatagagccgttgttgccaataaacctctgacgcagtggaaggtcatgaatgagagtgatttcgtcttttcactatacccaaatgatttgataatggtcgcgaaaaaaggtggaataaaggtcacaaataatcagggacagaaagaagaaaaaacagataagatttttgtgtattataactttgcggatattgcaacaggatctataaaattttcgtctgatgataatgagtatagcgggagacttggaattcaaagcctgcaatgctttaaaaaatatacagttgatgtgcttggaaatatacagttggtaaataaagaaaggagatgtgactttcgataatggggtatcgaaatatcaaaatagattcaaatgctgtgctttgtataaaaaatgctcagttgttaataggtgatttttctgttccacttgaagatattaactgtttgctaattgagaatgagaatgtaaaactatcaagctatttgattcaaaaatgcgctgattatggcatcccaatatactgttgcaatgaaaaacatcttcctaattgcgttcttgttccttttgagaaaaattcgcgtcatttgagtatattgagattgcagatagatgcttctaaacctttgaataagcggatatggcaatcaattatcaaaagaaaaatcaaaaaccaggcgtgttgtctaaaatggaacaatttggatgaatatgaacagttagaaaaaatgggtgattctgtacaatctggggataaaagctatgtagaggcaaaagctgcagcttattattttcgtgttctttttggaagtggatattccagaagagaggaaacggtagttaacgccgctatgaattatgcttatgcgattgtacgaggagttatagcacgaacgttagtgatacacgggttagaaccatcattaggaataaatcattgtagcgtacagaataattttaatcttgtcgatgattttttagaaccgtttcgtccaatggtggatatggttatcatggaaaatattgaaagcattaggagtgcggaatctcttacatcggagcataaaagaaccttgttaagtgttctaactttagatatgttaattgatggaaggaaagaaatcattaataactgcatcgatataatggttgagagctatataagatcattaagaaaaggggaaatggtattgttaactcctcagattataggtgttagcagacataattatgagtgaatttatgcgaattttattatttttcgaccttccaacaaaagaaagtgatgaaagaaaagctgcgtctaagtttcgcaaattccttaaagatgatggatatcatatgatgcaatggtcggtatattcaagaatatgtaatggaacagatgctgtttttatgcatgaaagtagagtgaagaggaatttgccaccaaaaggttctgtaagaatactgattttaacagagaagcaatttgaatcgatgagaataatgcttggagagcgaacggttgatgatacgtgtaagtcaactgaattagttgatgttttttgaaaaaaacgattttttgacatataagagtgatcgaattgtcatgttttaaaaaaggaaaaaggccagaagaccattagtcttctggcttttcttattccctatcatatcataccaataaatattagggaactacagcgaaaatgcgttagccatcattacggagttgatcatatcataccaataaatattagggaactacagctgacttcatcagatatgcatgtttccgtatatcatatcataccaataaatattagggaactacagcaaagttcattctacgaatatcattcttcatatcatatcataccaataaatattagggaactacagctgaaaaccatgcagtaaaatctacgtaatcatcatatcataccaataaatattagggaactacagccgggatattctcgattcccccattaatgtatcatatcataccaataaatattagggaactacagccgtgtatgtcttaagagtgccgtcatttaaatcatatcataccaataaatattagggaactacagctcgttatgcaaacttggaaaaagtttaaatatcatatcataccaataaatattagggaactacagctcaaacgcaaaatacatgtcggaatcgtaaatcatatcataccaataaatattagggaactacagctaatatcgcgtttaatattttagagaatggatcatatcataccaataaatattagggaactacagcccacgatcgcggtacaacttcccgatattaatcatatcataccaataaatattagggaactacagcgcagtcagcttatttaattcaagatatggtatcatatcataccaataaatattagggaactacagccgattcagcgagaacctttgtagccttatcatcatatcataccaataaatattagggaactacagcacgtaaatgtaaatagtgtgcctacagtttatcatatcataccaataaatattagggaactactatgattgtcaatttgaaactgagccacgcgctgatttgattttgagccacctaacgctagcttgaaagtgagccaccctttttgcggcctttctttgt

SEQ ID NO: 3892 - DNA, 15483 bp, synthetic construct
  source 1..15483: mol_type = other DNA
  misc_feature 1..15483: note = Synthetic
atagataacaggaataagatagacagctatgtgtatacgcgctcatcgcagaacataatggactattatcttgacaatatagataacgacaggaatcatgcgacaatgctcatcggaccttacggcaagggcaagtcacacatgcttctggttcttcttgataaggtgagaagtatggaacatccatacctcccgataataatatccggcacgggggatgacctcaatcaggcatttcttataggacttaccgacgcgcttaagagggcacggcttgaaaagcttgcacctgagagctattacagcgaagccgcaaggcgtatcgggcagtggaaatgtgattttcccgatgcgtatgacagattcaaggcagaacttcataagcttggcataggcagcgtcgatgattttaccagggagcttggcaggcagtcgaagaaagcacttggcatgtttgagcagatataccctgttataacaagcggcagtgaattcaagccgtttctgatggtcgagacggtgagaatatatgagcagataagggatgtgcttgcgagggagtatggatattcgggtctttatattatttttgatgagttcagcaagtacgtcgaggggcatgagaaggacacattcgctaaggatatgaaggtgctgcaagatatgtgtgagctggcgggaagaagtggtgacggaagaatatatctcacctgcgttgcacacaagagcatcaaggagtacgatgctaagctctccggcgagatgaagaacgcattcagaggtgtagaggcaaggcttgatgaggtgagatttgttgtttcctcacagaacaattacgagctcataggaaatgtaatcaggaaggacaataatgctttaaaaagaatccgtagaattgagcggtattaccaaaacgctataaagtcctatagcttttcatgtttttcgggactttttgatgaggacgatttcagaaagtatgttgttgagggatgttttcctcttatgcctctcacggcatacatgcttttacatataagtgagaaggttgcacagaatgagagaagcatattcacgtatctgtcgcacgacgagaagggaagtctgtgcaggatagtggaggagtgtacccttgatgaggcagattacggtgtcacggcggatacaatatatgattattttaaaagccttttcagggctgacggcacggatgcactaatacacaacgaatggctcaaggcagagtatgcacttgaatgtgcaggggatgaggatgaaaagaaagtaatcaaggttatagcacttataggcataatagacagacctgatgaggtatcggcggacatggagcatatcgcatgctccctcaatattacctcagaggaatgcagtgcgataatggacagacttgtggagcgcaaggcggttatttaccgcaggagaaagcatgcttactgcttctataacaatgtgggggttgacattcaggcggaaattgcgggcagagcggcgaagcttccgacagatgcggatattctcggaacattgaagagcatatcagaacttgattacgttcttccgaagaaatacaatcaggatttttcgatgacaaggtactttgagtatgtgttcatgacacctgagcagataagcaggctccctaagccgtctgtgctttttgaacagcgtttctccgacggaaaaattgttgcggttgtgtctgaacagcctgtagagtacgatgagcagctttttgaaagacttaacgataagagaatagtggtgcttgtgccgcagatggtattcaatcagacggacaatataagaaaatatatagcggcaagggagcttatcaaggataaggcgtttatcgatgagaacgcagtgttagagcaggagcttgtcaattattgtgatgatgcagcttacgaggtgaacagatacttagaggaggcatttgacacagaaagcggaatgtgccgggtatatcatgccaatgagaaatatgccggaggtttcagacattcaatgacatttaacatgtttttgagcagcataatgatggattattatgacaatgcgcctattgtcaacaacgagcttataaacagacagaacatatctgcacagaacaaaaaggcaagaaataagatagtggatatgattttgtccaatgctgactgcacggaatttctgaagggaacatcgcctgaatcaaccatatacagggctgtccttgttaatacaggagtatgcggaggcggaaatattgagtccggctgtgagcgtgtcattatggaaatcgaccgcttcattgcacaatgtgatgacaacagatgctcattcaaggttctgtatgacagaattatgggtatgggatacggaacaagaaagggaataatcccaatatatatatcactatgtctttcaagactgcatgataagccggtgctgagttttaaggagaaggaagttgaacttgactcgggcacacttggcaatgtaaatgacgccccggggaactattatctgtatgtggagcacaaaagcatagagaagcagaattacattaatgaattaaaaaagctctttggtgcaggcaccgggcaggatgatgacagaggtgttcttaccggaatactcagatggttcagggctctgccgcaggcagcatccaatataggaagggatgcacgatgtgatgagaacatggcggctaagcttaagaagctatgcagtatgctgagacgtcaggattacaaccctcatgatttcctttttaccgaacttcctgcaggggtaggggcagacaagggagattatgtatcggcgatagatgaactcgtcaggttaaaacagtttctcgaccactatctcgagaatgtttcatccgaggcggcttcaattataaggcgcagatgtggtgcggacgagcaggacagcttgagagcggttcttgacggttataatgcaagatatgcaggacagcgtaaggacattattttaaatcgacgcacacagtcaattgtaaggtacatttccggactgtctacattcgatgacgcagagattgtgtcgggattatcaaagctcgtcacggatatatatatagatgactggcgcgacggaatgcttgagaactttaaaagaggctggaatgagttctgtgatgaaatcgagagtgaacattccgccggaagcggcaccgggatagaaaagctgctcctggaaggtcagaatcagaacctgcttgatggcagcgacacagacgacaacagcacaagctactttttaaagaatgcaataagggaagcaatagatgagttcggtgacagccttgataccaaggagaaggtcgccgtgcttgcgagagtgctcgccgagcttgtcgccggagaaaatacatagaatcggggagatacagatgagtgtaatttaccttgacaatgcagcgaccacctatccaaaaccggagggtgtctatgaacagatggataaagtcaaccgcagtctggcgtttaacgccggacgtggttcttatgctctggcgcagcagtcggcagttatcattgacaatctcagaagagaattattgcgcattgcgaatgcgatgaatgtagcagaggtcgtactgtcggcttctgctacatttgcattgaatcagataatcggcggactgggtatgagggcggagcagtatgtgtacatatcgccttatgagcacaatgccgtggttagaacactttacaatcaaaaaatatacagggatgaagagaactgcacgcatattattgtcatgcctcttctgccggacgggggaatcaatgaggaaaggcttctgtacgaattcagcatacacacaccatcgttcgtgttcatgagccatgtgagcaatgtaaccggttacatccttcctgtggagaggattgcgtccgcagccaaggcatacggtgccaccgttgtcgtagacggctcacaggcattaggccttgttccttttgacatgtcggcatcagacgtggatttctatgtgtttgccggacacaagacaccttacggtccgttcggaatcggcggtttctatatgaaaaacggaaggaacctcgacacattcatagcaggcggcacaggaacagattctctcaatgtcggcatgccgctcgcgggtacggtacgttatgaaccggcaagcccgaatgtcatagcggcagcagggctgcttgccgctgtaaaagaactcacgacagatgagatagcacaccgcctggagcatgagaagaaacttactgaatatcttgtaaacggaatgcgcaagataccgggcatcaggctgtatcttgcgcctgcacagtcgcatgtcggaatagtcgctttcaatcttgcgggctacaaggcctccgacatcggaatgattctcgatgcggattacaatattgcggttcgcacaggctaccactgtgctccgcttatacatgaatatttggacgacagagaataccttggagttgtgagagcaagcataagcatgttcacgggttatgatgaagcggatgcgctggtcgaggcactgggggagatttaggaggatgagaagatggatttaaagtttgcagagataagaaatattaatcagttatgcaatttagaaagtaaaggaaataacaatgaaaatgtaccgctgaatgtaaatattccatattaccagagaccatacaaatgggataatacaagaattggtaatctaattacagacttttatgataatgaagaaaatgagaatgaagaaaatgagaatgaagatgagggatattttgctggttcggttgttatggttaaaggagaaagcggaagatttgaggttattgacgggcagcagagaatcacgacactttttttaatgaattatctgagatttttgcttattagaggatatattgagctgataataaaaaccaaaaaaatgtctaaaatcaagacacaaattgatgagcttattgatacagcggttaatttgtttgataaggaaaaaattataaaattacgtaatgtaagcagtggaatagataattatatcagcgatattgaaaatgatggacatgatgctgaaaaaaaggacagcatatgggatgcattacttgaatattacgagaaagaattaggtttgccaaagagaaattttactaatattgaaagttataaaagggaatgttatctggaaaacaagaaatttctggcgaatgtaggactgacactaaggtacagtagaaacagttacaatgaaaagcttaaagaagctttatgcagagctgtaatactaatgcagagtgatgatatcaatccgtgttttacaatgtgttgttttgagaaaaattcagtgtttaagagtgtagtaacagaacaatatatgaatgctatgaaatatatatatgataatattgtcaccgcatatatagtcggtgaagaaaaaacggttgagtatattgtaaagctagaaaatgcaatgaaaaatatattggataatattaatttttgcgttgtggttacgggcagagaaaaggatgcatatacattatttgaggtactaaatgatagaaatttcccggttgaagatttggaattaattaagaatcttttttacaaatattactgtaaaaatagcgaaaacaatgataacacggattatttcattgaaaaggcggatacaaaatggggggaaatatttagtgacacaataggcaaggaacagtcaaaacttatttcatatcttgctgcacaatattttacagcggatggaagactcaagtacaatgataatgagagatatagggaggcaatagaaaaacaatacctgaacagaaaacagcgatatgatggagaagcattgttaagtgatatatgtgtttatgaaatgcttgaaattatattagatgaatttgattttaaatatcagaaaaaagctgaaaatgtcataaaagcagagagagaaaattcaaaatcaattacatacaaagcgttaaatttgtttaatgcacttaaattgtacggagtaatacctgcaattaccaatattatacttaagaagtttttggaaaaaaatcatattaacagatggactggtggggattatattactgcatttagaaagtatgtacaggaaataagggatgacagagaaaataacaatacagattttgcggagattcacagtgtagcttatgatttctggcgttttgcactgcttgcacaaaattcggacaaaccaagaaatatagcaaaagactatatctcgaaaaattatgtatcaaattctgactattctttaaaagtcacaagtcaggaagcagatgtgttgaatgaagagttcagaagatggattaacgcatggaaatatggaaatgaaatttcccagctgaaggttaaagtgctttttattaatttatttaattcaactaaagagggaaatacacttatattcaacaaaaccggcacaaattttaaaacggataaaatacagcttgatcatttagagccggataaaaccaatgcagttgcaagtgaaaagtattttgaaccttcatctaagctgccaagagaaacatataccgatagtctcggtaatttcatgattatggatgcaggcagtaacaatgacaagaacacaattccgttgcaggatgctcttgaaatttatgataatatggctggtggtcattggctgataaaagaaattcatgacctgttttatgagaatgaatgtggtgtagataagaacattgatggaaaaaaatacagaattccgaatgaagaatttttcatcagaagaaaaaagagattgatatgttattttaaggctattttgactaaaaagcttggcgataataaggtggaatttgaacagtaattaaaaaaggaggcagtgtaatgcaaaaacccgacgaaagattattgaagaccgtcatgtttgaaatacttcatcttgaacggaaaaatctcagaagcagagcaataacggatcagaaaatggtggaggagattgggaaggttatctcggagaatattaagctatgtaaataatggaggcggagagggtacgaatgaagtttaaaacactcagaatgaagaattttatgcgttataaaggaataaatgagattaatttcagttgtgacgaaacacataatgttacggtgatattgggggataacactgtaggaaaaacaacgattgctcaggcgtttagatggtgtctgtatggtgcgattatggctgaacgcggaaagaaagaatcagattatcagcttctgaacaatgatgcgcttgcaaaactggatgccaataagaaagcttctgtttttgtggagataatagccgtggatagcgaaaggctgtataccatccatcgtgaagttgaatatatgagggtgtatcctaagttcattgcaaaagagtcatacaagacattgaaaatgtttatttcagatatagacagtcctgatatcaggcgtgaggtggagcccggacctaattacaataagataaatgagcttataaatgaactgtttcctaaaaatctttcacattattttctgtttgatggtgagagatggagtgatttttcgataaatggtgtcagggagaacattaaagaatcagtacatattttaaccggactttctgcctacaagtccgccatgtatcatctgaaggatatgggagacaattcagttataaaaaagttcagaaaaaatattcagggaaaaggcaatgtgtatgatgattatgagcgtgagcagaccagacttgaacgtgaagtggaaaaattacagaaacagatagaaagtatcgatgccaatatcagtctttgcaataaaaaatgcgatgagatagagttatatcttgaggaaaacaaggatacggagcaactgcagacggcatataaacagtctcagagaatgttgagggcacagggtgagagatacttagccaattataaaacttttatttcagaatacaattcatgtgcatacagactgttcgccggaccgcttatcgaggcttcattaaaaatggtcaaatctgtggcaggtgagcgcagggatattccacacatgaggcaggcgagcattgattatataatcagaagcggaagatgcatctgcgggacaccgataacggaggggtcgtatgctctcgaatgcctgctcgaacagagaaattatcttccgcctgccgatatgggttctctgctcggagaatttgaaaagactgctaaccgatggaaaagggttgatgacgaactaccagacgatgcggcaagggttgatgagagcgcaagggattatgaggagacaatcattcagcttcagaaaatggaaaataagatgaatgagaatatcgattttgcagagaagagaacacaacttaggagatataaggatgaagtaaacaaggctgcagtgaaaaaaggtgagataaagggactcatatcatcatatcagactcgaatacagagcatagaactccagatgaaaaatcaggaaataaagaatgccgaaaatgaaaaatggagaaacaagctggggcttgcggaggctatatacgataaattatcagcggatttttcggagcgggagaaaaagatattttacgaattgaatgaagaaattcaggcgaatttttcgcgtatgtttaatgcgaaagataaaagaatccggctttcggaaaactatgaaattcagatgtgctataagacagatataggctaccaggaagaaaagaacctgtcggaaggagaaaaggtagcaagaaattttgcatttattgtgacaataatggattacagcacacgaaagaagaatgagtataataaagctgactcaatcgttgaggataaggatgatgattgcaatgatgcgcttcctattgtgcttgatggaccattctcaaaactcggcgaggaaaatatctctctggtggcaaatgtgcttccgcaggtatcggagcaggtcatagtatttatgctcagaaaagactgggcgtacacgggacttgatgagtatgtcggagcggagtactcgattgacaaaaatcctgaagatagctttgcgtcgataagaaaggtggacagaggctgatggctgattttgaattttttaaaaagcagtttgaatttaaaggaaagcactcaagaatggtgtcagaactatgtgtggctaatgattttgagcatacattttttagaagggttattgacgtgtatgtatttgcagcaataataggtatccgccttgacagaaaagcttcggaagattattcaccggtggagacaaaaagtatttttccggagcagatgataaatgccaaggaagacttggatttcataatgcagatgatgataatgttagattcgggttcgggaactactgctgaggacagagtaagggaagccttcagaggtgcacagactaaggaagagtatgacaggctgatggggattttcaatgactatgtgagaggtggagttgaagaactttacgaaagacttgttgtcagaaagcctgattcggatgacggatactacgacgaaagaaccgctaatcttatggcactttatgataggcttgttccgagaaatatttcaaaaatcatgaaataatgctttacttttttaaatatgtggggtataataaacatacgttatatcataccaagcgataaacggttacaacaataaggtcccgccgctggcggtgtacctcaaagctctaatcccacttaaagtgaatactttaagtgggattatctattttaaacagaattattattaaagcgaacagaataatgatatccaatcccttattggttttgactcaaaaggaaattctgctgttttgcaggaaaatatatgagtcatgatattgcttggtattaaatgatttaatgaattattcaatctgataaccgtttgacttgataaggttttggaggaagggattatattatggaggaaatgaagcagacaggcagaaaaaatgaagcacctaagccgacggatttgaattacagaatcgggcttgatattggtattgcttctgtaggctgggcggtgcttgagaacaactctcatgacgagccgttcagaattattgatttgggtgtcagaatttttgataccgcagagcagcctaagacgggtgcatcactagcacttccaaggagggaagcacgttcagcaagaaggagaataagaaggcgcagggacaggatagaacgcatcaagaagctttttcaggctgaagggcttataaatatcgatgagtttgaggctcgttacaaaatagcaggacttcctgatgtttacaagctgagatatgaggggcttgacaggaagcttacagatgatgaactggcacaggtattattacatattgcaaagcacagaggatttaagtcgacaagcaaggcagaagaagcggaaaacgaaaatgacgcagcaaagaaaaaagaagcaggggctttaaagaagggtataagcaataataaaaagcttatggaagaaaaaggatacaggacggttggagaaatgatgtatcttgatgaaaacttccgtacagattgtccatggaatgaaaatggctacatacttacacctcgcaataagtccggcgattataagcataccgttttaagagatatgcttgtagatgaagtaagagagatatttaagtctcagagaagtcttggaaatattcacgcttccgaagaacttgagaatgcatatcttgatattatgctcagccagcgttcatttgatatgggaccgggtgctccgagcaagtatgcgatggagggatttgaggacagagtaggattatgtacctttgaaggtaagaatggtgagaagcgtgcagcaaaggcagcatatacctcagaactttttgtggcattggagaagataaatcacaccaagattgtgagtgatgatggagccacaagatttttgacgacgtatgaacgcaagagcattattgaacttatgcataagcagcagactgtaaagtatgtggcagtgcgtaaggcgattggcttagcggaggaggacaaattctacaaccttaactacagtccgaaggctggaagcaaaaagtctcctgaagatacagattttgttaaacttgaaaactatcataagatacgcaaggctcttggagaagacatagtttcagaacatttacctgctgaaaagataaagctgtatgacagtattgcaactatacttacactgttcaagaatgatgacagccgaattaagagatttatcgaactggggattggtgaggaatgctttgacgggctcctttcgttatcaccaagcaaatttcataacctttctctggttgcaatggggaagataattccgtttttgcttgatggcaacacctatgacaaggcatgcgaactcgcagggtatgattttaaggcagataataaaggcgagaagtctgttctgctgaaaggaaaaaatataacggatatggtgaatgatattaccaatccggttgtgagacgttctgtatctcagacaataaaggttataaatgcaattatacttgagtatggaagtccgcaggcggttaatattgagcttgcaagggaaatgtcaaagaactttgatgaaagacgaaagctcaagtctgatatggaatcacgcgaaaaagaaaacaataatgtcataaagcgtgtaaaagaatataagctgaatccaacaggtcaggatatagttaagttccgcctctgggaggagcaggacagaagatgcttatattcaggtgagaagattgatataaatgaccttttttcaagagatggcggttatgacgttgaccacattcttccgtacagcatcacatttgatgatacatatcgcaataaagtacttgtaaaagcatctgagaacaggcagaagggaaacagaacaccttatgagtattttatggctgagaaggatgatgatgcatggaatgcttacgagactttggttcgaaatacagtcaaagattataggaaggtgctcaagttactcaagaaacatataacagaggatgaaaagagcgaatttagggagcgaaatcttactgatacaaaatatattaccagaatcatctacaatatgatacgtcagaaccttgtgttaaaaccatatcttaatcttgaaaaagaacgcaagaaacaggtcatggctgtaaatggttccataacacattatctcagtaagagatggggacttgaaagcaaggatagacgtacagacacacatcacgcacaggatgcagttgtcatcgcctgtacaaccgatggaatgataaataaaatatcgcgatattccaagggacgagagctgctttattcaagaggctttaagtttgtagatgaagaaacaggggaaatactttcgcgcgataattttgcccgtgaggagtgggacgagaagtacggggtgaaaatccctatgccgtgggaatatttcagggatgagcttgatatccgtatgtcaaggtacaacggaacaggtgatgactcaatcgacaaaacaacgccgagggattttattttgtcacacagggatgtgcacaaatggataaattaccctgagtggatgtttgtcgaaggaagaccgggacgtagaggagtgctcgacggaatttttgtttccagaatgccgaatcataaagtgagtggtcaggcacatgaagagacgattcgctcggcgaagtattataatgatggtggcagtgtatttgagagtggtggataagtagttaccaaaaaatcaattcaggacatcaagctaaaagacggggagataaaggagttcttcaatccggacagcgacagattactttataatgctttggttgacagacttaataaatttgaaaacgatccaaagaaggctttcgcggagccattctataagccaaaggcggatggcactcagggacctatcgtcaaaaaaatcaaggtgttcgagaagcagtcatcaggagtgtttgtcagagatggaaatggtatagcagcaaacggtgcaatggttagaattgatgtattctgtgaagaagataagggcaaaaagaagtactattttgtaccgatctatacagcggatgttgtaaagaaaaaactgcctgaccgtgctgcaacagccaacaagcttatatctgaatggcgtgtgatgaaggaagaaaatttcatttttagtctgtattcaagggacttgatttatattgagagcgataagggagtgaaattaaagactgttgatgctgagagtataagtgtcgaaaaagtttatgcctattatataaaagctaatattgcaacagctagtatatatggcgagttaaatgacaaaagtgctgaatttaaggaaatgggtattcagggattgagagcactgaaaaaatgtcaagtagatgcattaggaaatatatcatttgtgaataaggaaaaacgtatgccgtttaattaaattaaggagaagtgtatgggataccgcagcataaaaatagatagttctataggattacatataaaaaatgaacaattggttataggcgataagaatatcagttttcctttagaagatattaattgtgtcattatagaaaatcaatctgttacggtatctgcatatatgctccaagagtttgcaaaatatggaatcgcattatatgtatgcgatgaaaaacatttacctaatgctgtgcttctgcctatggtaaagcacagcaggcattttaagatgcttactaaacaaattgaggtgggaaagcctcttattaagcggctgtggcagcaggttattgtttttaaaataagaaatcaggcattgtgtcttaaagagcttgggcttgaagggcatgaaaaacttctttcaatgacaaaagaggtacagtcgggtgacaagacgcatgttgaggcgaaagcagcggcatattattttcgtgttttatacggtgaaaattttaccagatcagatgaatgtattgtaaattcggcgatgaattatgcttatgcaataatcagaggtctgattgcaaggtcaatcgtgtgctatggtctggagccttcattggggatgtttcatcacagcgaattaaacagttataatctggcggatgatatgattgaagtattcagaccactggttgatttgtacgtggcaagtcattatgatatttcagaggttgatgcggatttaactcctcagataaaaagagatttgtttaatattattaactatgatatgtcggtgaaaggagagaaacgcattatcagcaactgtattgagatgcttgtgtacagctatagtggagccattcagggaaacagaacagatttggaacttcccgaattgataccgttgcaggtgcatagctatgaataaatttatgagattgttggtgttttttgatttacctgttgtaaaggacagagatagaaaagttgctgctaaatttcgcagatttcttctgaaagatggatatgttatggttcagtggtcagtatattcgagactttgcaatggtacggattctatcgagactcataagcaaagattaaagcagaatttaccgcataaggggtctgtgcgttgccttgtattgacggaaaaacaatattcgtccatagatattcttttaggaacgtctacatttcatgatatggatgaatcatctgatttaataaatattttttgaaaaaagagtattatgcaatgtgaaaaatatatttaacaattatttttttacatgaaaaatccccgtgaacatatataaacacggggatttttcgttccctattatatcataccaagcgataaccgggaacaacaacaaaataagaatataagttttgattgtaataattatatcataccaagcgataaccgggaacaacaacttgtattagcgatgttgtatatcgttatttattatatcataccaagcgataaccgggaacaacaactgtccggtacgtcgtcatacaacggcttttattatatcataccaagcgataaccgggaacaacaactagtctccctcgcaaggggcaagtctcaaaattatatcataccaagcgataaccgggaacaacaacgaactaggcttgaataaggacacttatttattatatcataccaagcgataaccgggaacaacaacatcttggaagtctctttcatcaatcgttttattatatcataccaagcgataaccgggaacaacaacaccagtggttcgagcgttgttggttcggaattatatcataccaagcgataaccgggaacaacaacgacaaatttccaaggtcgtcaatggtaataattatatcataccaagcgataaccgggaacaacaactctatcttaattttttataaattatcacaaattatatcataccaagcgataaccgggaacaa

SEQ ID NO: 3893 - DNA, 15126 bp, synthetic construct
  misc_feature 1..15126: note = Synthetic
  source 1..15126: mol_type = other DNA
gtcgcacatgcttctggttctgcttgacagattaagacatttggagaagccgtaccttcctgttattatctcaggtacgaacacggatcttaatcaggcattccttgtaggaattaccgatgcgttaaagcgtgcaggtcttgacgatatcgctcccgacagctattacagtgaggcacttaagaagatagagcagtggaaaaaggattttcctgacgcctacagccgttttgtaaaggagcttgagaagagtgaaaaatgcgatgaaaaaacactcatagcaggacttgaaaaaaacagaaaaccggcactggatattttttgcaaaatatatccgttaattacaagtggaagtgaatttaacccgattctcatgctcgagacagtaagaatatatgagcagctcagggatgtgttagcacgcgattacggatatgcgggaatatatataatttttgacgagttcagtaaatatatagaaggacacgagaaggataccttttctaaggacatgaaggtgcttcaggatatgtgtgagctgtcggagagaagctctaaggggcgcatgttcataaccttcgtcgcccacaagagtatcaaggagtatgggactaagctgtctgccgacatgaggaatgcttttcgcggcgttgagggcaggataaaagaggtattattcgttgtctcatcgcagaacaattatgagcttatagcaaatgttctgaaaaaggatgaggcggcacgacagaggatttctgaaatacgaaggtattacggtaatgccatgaaatcctataatttttcatgcttttcagggctttttgacgaggaggatttcagaagatatgtggtggagggctgttttcctcttatgccgctcaccgcatatatgctgttacacataagtgagaaggtggcacagaatgagcgaagcatattcacctacctgtcgcacgatgaaaagggcagcgtgtgcaggctgattgaagagtgtgatgaagatattgagagctgtggaataacggcggacacagtatatgattattttaagaatctgttcagagaggaagcgtcggacacagttattcacaatgaatggcttaaggcggagtatgcactttctaaaactgcagatgagactgaaaagaagcttattaagattatagcactgataaatattatagatattccggatgaattgtcagcggatgtgccggagctgtcagcggcacttaatctttcggatgatgaatgtcgggcggtgatagacagtctgcttgaaaagaaaatcattatataccgttcaagaaagcatgcatacagcttctacaacaacgtaggcgtagacatacagaaggagatttctgacaaggccgtcagacttcagtcggatgtggatgttttaggtgcacttaaggagctggccgagtgcgattatgtgcttccaaagaaatataatcagatatactcgatgacgagatattttgagtatgtatttatgtcgccggagcagatagttaagctgccttcgccggatattctgtttgagcagcatttttctgatggaaagatagtggttctgatttcagaaaatgcggttgattacacacaggagctatctagcaggcttaaagacaacagaattgtggtgcttgtcacacatgagagctttgacaaggtagagagcataagaagatatattgcagctcagaatcttctgaaggacaagtcctttatagaggataatgtggtgctgagccaggagcttgtcaattattgcgatgacatttcgtatgagataacccagtatcttgctgccgcatttaatcctgagagcggagcctgtgcggtatatcacaatggcgaggagttcaggtcaggcttcaggaacggttttaccttcaatatgttcctgagcagcattatgacggaatattacaataatgcacctattgtaaataatgagctgattaacaggcagaacatctcggctcagaataaaaaggcgagaaataagattatagacatgcttcttgaaagtgaggactgctctgcattggagaagggtacttccccagaagcgaccatatacagggcagtgcttgtaaatacaggtattctaggcaaagctgagttagacaagggctgtgagttcgtgctgtccgagattgaacattttatagcaaggtgcgatgcaaataaatgttcatttaagctgctgtatgagcgtctgatgggcagcggctatggtctcagaaagggaataattccgatttatgtggcattttgtctggctaagcttcaggataagccgatagtcagccttaaagacagagaggtaaacatagacgctgtcatcttaggaaacatcaatgatgctccgtcagactattacttgtatgttgagcatgagagcatggaaaagcagaaatacattgaaggactttctggtttgttcgcagtcaaggtgaaggcttcatgcactgccagtgacagggagattttagacggaatactaagatggtacagggctcttccacaggcatcggcaaatatcggtcgtgttgttgatgtacatgaaaatatggcatcagtgctaagacgcctgtgtgcggcactgagatatcaggattacaatccacatgaatttctcttcaaggtgctcccggagcttgctggtggggtaactgatgacaataatgcagtgcacaacacagcttcggcagaaaaatcactttcaggtatatcgttgacggaagtgttagagaatctgacattattaaaagaatatatggatggttatcttataaagcttagcactgaggcagcagcggtcattaaaaaacgctgtggggcagataactccgacagcctcaaggttgtgcttgaaggatattattcggggcatgggaaaaggcttggaaagcttgtcaccagaaacagaacatcggcaattctttcatacatttctgatataccgacctatgatgagagcgagattgtatccaagctgtccaagcttgtgacagatatatacatagatgactggcgtgacggcatgttagaaaacttcaaggcaggatggaatgacttctgtaacgaggtcgagaatgcagccgacgatgacagtggacttaacagtattattctgaagggtgaaggcggaagcctgctagaacgcagctatgccgatgtcgaggaggacagcaccagctatttcctcaaaaatgcgataaaggatgcacttgatgaattcggtgacagccttgagactaacgaaaaagtcgcagtgctcgcaagagtgcttgcagagcttgtggcgggggagaatggtaaaggatgatgggaatgtaggaaaacattccataataacagtaatgccataggaaaattttaaaagatagacttaaaaaaataataagttggagattacttatgagtatgatttatttagacaacgcagctaccacatatcctaagccggtatgtgtgtatgaacagatggataaggtcaatcgaagcctgtcattcaatgccgggcgtggttcctatgctctggcacagcagtctgccaatatcatcgataatctcagaaaagaattacttcgcattgtaaatgcgtcaaacgtagcagaggtcgtactatcggcctctgctacatttgcattgaatcagataataggcggacttgggattaaagaagaacagtacatatatatatcgccatacgagcataacgccgtggtgaggactatttacaaccaaagaatatttaaaaatcatgattgtgacgtgaacggtgaatatgtcaatgagaaaaatgctgataattgtgggagacacattataattatgcctctttcagagaatggaagcatcgacattgaaaggctctcctacgagttcagtgtacatacaccctcatatatttttatgtcacatgtgagcaacgtaacaggatatatactgccgatagagcagattgccgcacaagccaaggaatataacgccaccatgatagtggatggctcgcaggcactcggacttgtgccgtttgacatggctcagtccaaggtcgatttctatgtgttcgccggacataagacaccttacggaccatttggaataggtggcttcttcataagaaacggaataaagctcgacacattcatagccggagggacgggcagcgactccctcaacgtgcatatgcctgaatcaggcagtcaccgctacgagcctgcaagcccgaacgttgtcgcggcagcaggactccttgcggcaataaaagacattgactcagcagagattgacaggcgtcttgacactgaaagagcactcacgcggtatatgcttgataagctcagcaggcttcaaaatgtaaagttgtacctgccgccgtccgacagtcatgtggggatagtggcactcaatatcaagggctatcaggcatcggaggtcggcatgattcttgatgccgattatgacattgcagtccgcacaggctatcactgtgcaccgctggtacatcaatttcttgatgacgcagaatacctgggtgtcgtgagggtcagcataagcatgttcaccacaacagatgagattgatacgcttgtgaaggctgtgggggagatttaggaggaagaaagatgcagactatagtagaaccttttaataatatattggaaaaaattaaaaatagacagattcttttgccagattttcagagaagatttgtttgggataaggaggaaaaacaagcatcattggttgcatctgtactggctaaaatgccagttggaagtattttgttattgactgtaaaagccgatgaatatgcgtacaaaaaaattggatgtaagacgagacaacgagcctctgatttgaatattacaggagaagtaaacgctttgttagacgggcagcagagacttactgttcttgcaaatgcattttctaacatagtttttgagatggcaggtcaggtaagtgagttaatacagcaaagttctttaaaaagacggttttttctgagattacctaggtataaagatgcaaatggtgagagaagtcaggaggattattttaaacttggtggtttaataccttttgtaaatccggcaacaagtgaacctgattttttatctgacgagattatagacatgataaagatagtaccttttaaagttggcgatgaatcaagttacaatccatttaataggaatttttcatttagcaatttaatggatttctgtacaagtggagatgaatatcttattccattgtatttattatccggtgaccaaaaaagccaaagtctcttgagaaaaataatagaaagaatttctgaaaatgtgcagatagatattttgcaggaatacgattctcttagttttgatgaaacagaaagatttatacaggaagttttgacagagtttactttacttacatgcgaagagagagataacgtagatagaagagaattttttcaggatgcattggctcagcaaggtagggaatgggtaagtggaataaatgaatatttacattcatgtcttgataatattcagttaaatcaattgattgtagacaatcatagaagagacagggcaattaatatatatgaaaacttgaacaagggcggaattacgcttggcacatttgagttgataatggctaaatacgcaggagtcagtcaggaaaattattatgatgtgttgctaaataatatgaggaaaaagagaaagtacagtaaggatgtgtttagcgatactttgcgtagaaatgtagatgtgtgtgcctatattgattcggatggttatattgcaacgatagaactaggaggcataagagggctaaaagaaaatgatgagagtattgcaccggcatatatagaagcatatttaaatgtgatgtctttatattcacatgtccatgattttaatagttcaaacattagacttgacctgataaagaaaaataaaattatggatgttacagcagctaatttacgtgattatagtgaagaaattgttgaggcaatggatttagcattattctttttgcagatacgttgtggaattagggacataaaggatatcaattataagcttatgctggttgtgatttcatacatacttcttaataaggagtatagaagcagaagcgaaacatatgattatttagaggcatggtattggtgtagcattttttccgggtattttaattcagatcaaaatatcaatgctatcataagcataaccaagttgattgagactattgaaagtaacaatacatcatggataaaaaatacattaaagccaggtatttttcaaagaagttatttttcaaataaagaatttttattatacaaaataaatgaaggtttgtcatatccgaaagaatttttgcgagatgttttttgtcagtttttgcttgcacagacatacaacggtgtgattgataaaaatgtaaatatgaatccttttgtcagaagaagacttgaaaaacatcatgttattccattaggttctattgtagcaccatcagtccgacttagaaaaggcgaggaaagtaaacggaatgattatacatatttcctgaacagtcctattaattttatatatataactgatgaggagaatacagcaatatcagatagtactcttgcagattacacacgtgatatcaatgattccgcagttaagacaatattaggattaaattgcgatctagatacatcaacagaagaatcgtgcaggactgttcttgagaacagatatgaccatctgatagggatgataaaaaatagaattgatatattagcaccatgaaatatatattttgcacggaggtataacaatggagaagtacgatgaaaaacaaataaaatccgtcatattcgaaatcctgcatcttgagcgaaagaatcttagaagcaaggcgttgactgatttgaagatgtcggaggagattgggaagattatctcagagaatattaagctatgtaaataatggaggcggagagggtacgaatgaaatttaaaacacttagaatgaaaaattttatgcgttataagggtgtaaatgagattaatttcagttgtgatgaaacgcataatgtcacggtagtattaggggataacactgtcggaaaaaccacgattgcacaggcattcagatggtgcctgtatggtgcgattatggttgaacgaggtaagaaggagacggattaccagctattaaataacgatgtgctcgcggcacttgatgccaataaaaaggcttctgttttcgtggagataacagcggtggataatgagcggttatatacagttcatcgcgaagttgagtatatgagggtctatcctaagttcattgcaaaagaatcctacaagatgcttaaaatgtttattgctgacatagatagtcctaatataagacgcgaggtggaaccgggtccgaattacaataagataaatgaacttatcaatgagctgtttccaaagaatctttcacattattttttatttgatggtgagagatggagtgatttttcgataaatggtgtccgggagaacataaaagaatccgtacatattctgacaggtctttcggcatataaatctgccatgtatcaccttaaggatatgggagacaactctgttataagaaaattcaagaaaaatattcagggaaaaggcaatgtgtatgatgaatacgagcgtgagcagacaaggcttgagcgcgaagtggagaaatgccagagacagatagaaagtcttgatgccagcatcagtctttgcaataaaaaatgcgatgagatagagttatatcttgaggaaaacaagaatactgagcagcttcagacggcatacaagcagttacagagaacgttgagagcccagagcgaaagatatgtggcaaattataaaaactttatttcggaatataattcttctgcgtacagattttttgccagaccgcttatcgaggcttcactgaagatggtgaaatcagtggcaggtgagcgcagggacattccacacatgagacaggcaagtatagattacataatcagaagtggcagatgtatttgtggtactcctataacggaggactcgtatgctcttgaatgtctgcttgagcagagaaactatcttccgcctgccgatatgggctctttgctgggggagtttgaaaagacagctaaccgctggaacagagttgaggatgagttatcaaacgatgcagcgagagtagatgacagtgcaagggattatgatgagacagtcatccagcttcaaaagatggagaacagaatgaatgaaaacatagactttgcggaaaagagggtacagctcaagagatataaggatgaagcgaacagggcagcggtgaaaaaaggtgagatacgaggattgatatcatcctatcagaaccgaatccagaacatagagcttcagatgaaaaatcaggaaataaaaaatgctgagaacgaaaaatggagaaacagacttgtgcttgctgaggctgtatatgacaaattgttagcggatttttcggagcgtgagaaaaagatattctacgaactgaatgaagaaatacagacgaatttttaccatatgttcaatgcaaaagataaaaaaatttgtctctcagaaaactatgaaatacagatgtgctataaaactgacataggctatcaggaagaaaagaacctgtcggaaggcgaaaaagtggcaagaaattttgcatttatcgtgacaatcatggattacagcaggcgaaagaaggctgagtataacagagctaactcaaccggtgtgattgcggatgaggattgcaatgacacacttccgattgtacttgatggtccgttctctaagcttggtgaggaaaatatatcgctggttgcaaacgtccttcctcaggtatcagagcaggttattgtatttatgctcagaaaggactgggcatacacagggcttgatgagtatgtgggagctgagtactcgattgacaaaaatcctgacgaaagctttgcatcaataagaaaggtggacagaggctgatggctgattttgaattttttaaaaagcagtttgaatttaaaggaaagcactcaagaatggtgtctgaactgtgtgttgccaatgattttgagcatactttttttaaaagagttattgatgtgtatatatttgccgcaataataggtattcgtcttgacagaaaagcttctgaagattactcgccggtggagaccaaaagtattttcccagagcagatgataaatgcgaaggaagatttggattttataatgcagatgatgataatgttagattccaattccggagcttctgatgaggacagggtgagagaggcattcagaggggcacagacaaaggaagagtacgatagacttatgggagccttcaatgattatgtgcgaggcggagtagaggagctttacgaaaggcttgttgtctgtaaaccggattcggacaacagatactatgatgaaagaactgctaatctgatggcactttacgataggcttgctccaaggcaggaatagaattagactttaactgttgttgaatatttataaaaaagaagtttagttgtttaaaaaaatatcaaaaatttcaaaataatgctttacttttttagatatgtgggatataataaacttacgttatatcataccaagcgataaacggttacaacaataaggtcccgccgctggcggtgtacctcaaagcgataatcccacttaaagtgaatactttaggtgggattatttatttcaaacagaattattattaaagcgaacgaaataatgatatccaatcccttattggtgtgggcttaaaagaattttataattgtgcaaaagatttatgaagctaaatattgcttggtgttaaatgatttaatgagtggtttaatatgctaaccgattgatttaataaggttttggaggaaaggattacatatggaggaaatgaagcagacatgtagaagaaatgaagcacctaagccgactgatttgaattacagaatcgggcttgatattggtattgcttctgtaggctgggcggtgctcgaaaacaaacaaaatgatggggaaccattcagaattattgacattggtgtcagggtttttgattcaccagataaaacaggtgattttctttcttataagcgtcgtgaagcacgttctgcaagaaggaggataaggagacgcaagggcaggctagaacgcatcaagaagctttttcaggcggaagggcttataaatattgatgagtttgaagctcgttacaaaaaagcaggacttcctgatgtctataaactaagatatgaaggtcttgacaggaagcttacagatgatgaacttgcacaggtgttattgcatatcgcaaagcacagaggttttaaatcaaacagtaaagcagaagagactgaaaatgaaaatgacgatacaaagaaaaaagaagcaggagcaataaaagatagtattagcagtaataaaaagattatggaagaaaagggatacagaacagtaggagaaatgctgtatcttgatgaaaaatttaaaatagatagtaattgcaatacaatgggttatgtattctgtccgagaaataaacaaggcgattataaggtaatagtttttagagacatgttggtagatgaggttcgtgcaatatttaatgcacaacgtaattttggtaatataagtgcttctgatgagttgggaaaaaaatatcttgatataatgcttagccaacgttcatttgatcaaggaccgggagcgccgagccagtatgcaatggatggatttgattttggaatgtgtacatttgaaaaaggtaatggtgaaaaacgtgcacccaaggcagcatatacctcggaaatctttgttgctttgcaaaagataaacaatacaagaattgtggacaaggatggaaatataagaaatttttcagacgaggaaagatggaaaattatacgattgattcataagcaacaagaagtaaaatattcttcgatacgtaatgaactttgtctgtctgatgatgaaaaattttataatcttacatatggcaagaagaaagacagcgaacaaagtgtctttgttaaaatggtaaattatcatagtataagaaaagcactaaaagaggaatgttctggcgaattacttgatgataaacatgcagagctgtatgataatatagcatattatcttactaaatacaaaaatgatgatagcagattaaaggaattaagaaatcttgggataggagaggaagaatgtaataatttaattaaactatcgtgtacaaaaacacaaaatttatcatttgttgcaatgaaaaagctaattccatttctgctcgatggaaaagtatatagtgaagcatgtaaaatggctgggtatgataactttaatgaagatagttgtacagagaggttaatattattaaagggacaaaaagtcaaagatgctattaatgaaatttataatcctgtagtaagacgtgcagtttcacagactattaaagtgttgaatgctattattcttgaatatggtagtccgcaggctgtaaacattgagttatcaagggaaatggctaaaaataaaattgagcgcgacaaaatagataacgacatgaaaaagcgaaaaaaagaaaatgaaaaaatacttgatgaaataagggagtttaagcctattccatcgggtaaggatattgttaagtatcgtctttggaaagagcagaaagaaatatgtctgtatacaggaaaaaaaatatcagcagaagaattatttgcgtctgacggaggatatgatattgaccatatacttccatacagtaaaacatttgatgatagttaccgtaataaagttttagtaaggtctgaggcgaacaagaataaaggtaatagaactccttatgaatatttaatatcacaaggtggtgagaaagcttgggaagaatttactattagaattgaacataatattaaggattataagaagaggcagaaattattaaaaaagcatattacggatgaggagacaaatgagtttaaaaggcgtaatttgcaagacacacagtatgccactacatttatatacaatttaatacgccaaaatttgcaattaaagccatacgagaattttaatggtaaaaacaaacagcaggtaatggctttaaacggttcgattacacactatttaagtaaaagatggggattggaaaataaagatagaaaaatagatactcatcatgcacaggatgcagttgtaatagcttgtacaacacagggaatgattaatacaatatcgaattattcaaagttcagagaactggagcttgataagattaataaatccagaagcataaaagtagatgagttatctgacaatgaatttataaccagagagcaatatgataaaaattttggcgtggaatttccaccaccatggaaaaattttaaggaagaacttgatattcgtatgtcgagatatcatggcgcaggtgatgaaaaatttttagagacatcacctagggaatatattcagtcacatggtgatgtacgtaagcgtttaaattatccagattggatgtttgttaaaggaagacctggtcgcagaggcgtacttgatggaatttttgtttcgcgaatgccaaatcataaggtggctggtcaggcacatgaggagactatccgttcggcaaagtattatgaggatggtggaagtgtatttgagagcggtggatatgtagtatataaagtacctattcaagatataaaatatataaacggagagataatgtatggtaaatctgcaagatattttaatccggatagtgaccgaattctgtataaagcattgataagacgtcttgagttatttaatggtgatgcttctaaggcgtttgccgagccattttataagcctaaggcagatggcactcagggacctgttgtcaagaaaataaaagtatttgaaaagcagacattaggagttcctattggaaacgtaaatggtagggcagctaatggtgatatgattagaatcgatgtgttctgcgaagaagataatggcaagaagaagtactattttgtaccaatttacacgtcggatgctgttaagaaaaaactgcctgattgtgcagcaacagcacataagatgtcatcagaatggcgtgtgatgaaagaagaaaactttatttttagtctgtactcaagggatttgatttatattgagagtgataagggagtaccgcttcatacgatatctaaaactgtatattacagaaaatctctttttgcatattacatgggggctaatataagtaaagcctcaattttgggtgaggtacaggataatagtgctaattttgatggtttaggaattcaaggattgaaaaagattttaaaatgtaatatcgatgtattaggaaatatttcatttgtgaataaggaaaaacgtatgccgtttaattaaaccaaggagaagtgtatgggatatcgtaatataaaaatagacagttctataggattacatattaaaaatgaacagtttgttataggcgataagggtattagctttccgcttgaagacatcaactgtgttttaatagaaaatcagtctgttacggtatcggcatatatgcttcaggagtttgcaaaatatggaattgctctgtatgtatgcgacgaaaaacatttgcctaacgctgtgcttcttcctatggtaaagcacagcaggcatttcaagatgcttaccagacaaattgaagttggtaaaccgctcattaagcgtctgtggcagcagattattgtattcaaaataagaaatcaggcattgtgccttaaggaacttgggctcgatgggtatgaaaaacttctttcaatgacaaaagaggtacagtcgggtgacaagacacatgtcgaggcgaaagcggcggcatattattttcgtgttttgtatggtgatgattttacaagggcggacgaatgtattgtcaattctgctatgaattatgcctatgcaataattagaggtctgattgcaaggtcaattgtgtgctatggtctggagccctcattggggatgtttcatcacagtgagctgaacaattttaaccttgcggatgatatgattgaggtgtttagaccagtggttgatttgtatgttgctagtcattttgatgtatcagagcttgatgctgatttaacaccgcagataaaaaaagatttgtttaatattattaactatgatatgtcggtgaaaggagagaaacgcattatcagcaactgtattgagatgcttgtgtacagctatagtggagccattcagggaaacagaacagatttggagcttcccgaattgataccgttgcaagtgcatagctatgaataaatttatgagactgatggtattttttgatttacctgttgtaaaagacagggataggaaagcggcagctaagtttcgaagatttcttttaaaagatggttatgtgatggtgcagtggtctgtgtattcaagactatgcaatggtgctgactcaatagagacacataagatgcgtttgaaacagaatttgccgaaaaaaggctcagttcgttgtcttattttatcagaaaagcaatactcatccattgacatccttttaggaacatccacctttcatgacatggatgaatccacagatttgataaatattttttgaaaaaagagtattttgaaagacgaaaaggataattctagaatatttttttacatgaaaaatccccgtgaacatatatgaacacggggattttctgttccctattataccataccaagcgataaccgggaacaacaacttcaatgctgccagccccgctgctacctttattataccataccaagcgataaccgggaacaacaactaatatgtctcaccatcttcatctggttcaattataccataccaagcgataaccgggaacaacaactgtcttatctgaatcacataatttctatctattataagatccgaagagaaaacctctgaaaacaagtcacattactcgatctcgtatgacgtattatttttg

SEQ ID NO: 3894 - DNA, 15051 bp, synthetic construct
  source 1..15051: mol_type = other DNA
  misc_feature 1..15051: note = Synthetic
ggtatattgcagtgaacagaacagccggacttgatatggtatattcaatgagcactataacgcctgagaaggttatagaaaaatactaccttgataagttggaaggtcagagaggatagctatggcagacagactaaaagattggattaagatagataaaagatttgaaaattccgttaatctttatcttgatttggacaataaaggaaagatagacagctatgtgtatacacgttcttcacagaacattatagactactatcttgaaaatatagaaaaagataaagaccacgcaacaatgcttatcgggccatatggcaaaggcaagtcgcatatgctgcttgtgctgcttgacaggctgaaaaatatggagaagccgtttctcccggtaattatatcgggaacgaatgagaacctcaatcaggcgtttttagtcggaataaatgatgcattaaaaagggaaggacttgcaggcatagctccggagagctattacggggaagcgttaaagaagattgcacagtggaaggaaaagttcccgaaagcatacagccattttgaggaagaaattataaagagcggctgtaaaagtattgatatattatgtgctcagcttgaaaaaaatgataaaaaggcattggatttgttctgcaaaatttatccagctgtaactaacggaagtgaatttaacccgatagtcatgttagagacagtgaggttatatgagcagattaaggctgttctgtcgcacgattacggatatgcgggaatatatataatattcgatgaattcagtaagtatatagaaggtcatgaaaaagagacattttcaagagatatgaaagtgttacaggacatgtgtgagcttgcggacagaggcacgcaggggcgtatgttcataacttttgtggcacataagagcatcaaagagtacggcgctaagctgcctgaggatatgagaaatgcattcagaggtgtggaaggcagaataaaggaagtgctctttgtcgtatcatcgcagaataattatgagcttatcgggaatgtgttaaagaaggatgaagctgtattaaagagaattccgggcatagaaagatattataagaatgcagtgggctcttataggttttcgtgcttttccggcttgtttgatgaggaagattttaagaaatatgtagtgtgtggctgttttccgcttatgcctcttaccgcgtatatgctccttcatataagtgagaaggttgcacagaacgagagaagcatatttacatatctctcccacgatgaaaagggcagcctgtgcaggataatagaggaatgcgatgcggatgaagccgactatggcgtgacggctgacacagtatatgactattttaagaacctgttcagggaggaagcttcggacacgattgtccacaatgaatggctgaaggctgagtatgctctttcaaaaaccggcaatgagcttgaacagaagctgattaagattattgcacttataaatataatcgatataccggatgaattgccggctgatgtgccacagcttgcaggtgcgcttaatctttccgatgatgagtgcaggcagattgtaaaagcgcttacggataaaagaattataatataccgcacaagaaagcattcatacagcttttataataatgtaggtgtggatattcagggagagatttcaaagagagccgcaaagctctcagcagacacagacctcctagagacacttggcataatttctgagtatgactatgtcctgcctaagaaatataaccaaatttattcgatgaccagatattttgaatatgttttcatgtcaccggagcagatagccaagcttccttctccacagcttttgtttgaggaacacttttcagacggtaaaatcgttgtggtcatctctgagcatgagatagattatgcacagctttcagataagcttagggatgacagggttgttgttattgtagcacatggattgtttgacaagagcgacagcatacgaaggtatattgcggcaaagactctcataaatgataaggcatttattgaggacaatgttgtactcgaaaaggagcttatcaactactgtgatgatatcgcttacgagattaacagatacttagaatcagcatacaatcctgagaatggctcatgtgcagtatttcataatggtgggaactataattcgggctttagaaacggaatgacttttaatatgttcctaagcagcataatggaagaatattataataattctcctatagtgaacaatgaacttatcaacagacagaacatatccgcacagaataagaaagcgcgcaacaagattattgatatgcttcttgagaatgaagactgtacggcattcgagaagggaacatcgccggagtcaactatttacagagctgttctggtaaataccggtgttcttagcgatgtggaactagacagaggctgtgacctcatgatttgtgagattgagcgttttatcacaatgtgcgataacaacaaatgctcgttcaagctcctatatgaccggcttatgggcagcggctatggtgtgagaaagggaattattccgatatatatcgctctgtgtatttcaagattgcaggataagcctgtcataagcttaaaagacagagaagtaaatattgatgccgtaatattaggcaatataaatgacgctccgcagaattattttctgtatgtggagcatgagacaatagagaaacgcaattatattgaagagcttatcaagctttttgaaatcaagataaaagtgatgggtacaccgcaggacagggaagtgcttgatggaatcttaagatggttccgttctctgcctcaggctgtctcgaatatgcatcatgtagatattgctgacggcatggataaggcacttagagggctgtgtgctgcattaaggcatcaggattataatccgcatgagttcttatttaaggagcttataagcgtattagaggcggaagagaataattatacggacgcattaaagagaataaaatatctgaaaggatacatggatgggtatttagacatgctttcggacaaagtagccggcatcataaagatgcgctgcaatgcgggcgttaaggacagcttaagagctgtgcttgacgagtattatgcagagcactgcactaagcttaaaaagcaggtaaacagaggaagaacatccgcaatattgtcatatatatcaagtctttcgacctatgaggaaaaggagattgctgcaaagctttctaagctcgtcacggatatatacatagatgactggcgcgatggaatgcttgagaagttcaaggaaggctggaatgaattctgcaatgaagctgagaacagcttgcgagatgatgcacaattaaacagcattatcctaaaaggcggaagcgggagcctgcttgagcgaagctatgaggacattgaggacgacagcacaagctatttcctaaaaaatgctataaaggatgcacttgacgagttcggagacagtcttgagacaaatgagaaggttgcagtgcttgcgagagtgcttgcggagcttgttgctggagagagctgacacacggatatttaatataataagtttggagattacaaatgagcatgatttattttgataacgcagcgacaacatttccgaagccggaatatgtgtatgagcagatggacattgtaaaccgcagtctggcatttaatgccggacgtggttcatatgctctggcgcagcagtctgccaacataatcgacaatctcaggaaagaattacttcgcatgataaatgcggcaaatgtagcagaggtcgtactgtcgccctctgctacatttgcattaaatcagataattggaggacttgggattaggaaagagcattacatatatgtatcgccatatgagcataatgcagtggtgcggactatctataatcagggaatatttaaaaattttagagaggacgttaattgcggaaatcatatcaggattatgcctcttgcggaggatggaagcattgatgcagagaggctttcctatgagtttagcatacatgcgccggcatttgtatttatgacacatgtgagcaatgtcacaggatatatactgcctgtagaacagattgcagtggaagctaaggaatatggtgcgacagtggttgtcgatggctcacaggcacttggacttgtgccatttgatatggcacattctatggttgatttctatgtatttgcagggcataagacaccatacggaccatttggagtaggcggttttttcataaggcaaggaaaaaaaatggattcctttgttgcaggcggaacaggaagcgactcgttaaatgtgcatatgcctgagtcgggaactggcagatatgaacctgcaagccctaatgtgttggcggcagcaggacttctcgctgcgattaagaatgttgacaatgcagagataaaaagacgcttggctttagagaaggaacacacacgctatatggcagacaggcttggcagcctgcacaatgtgaagctgtatcttccgcctgaggacagacatgtaggaattgccgcattcaatgtaaaaggctataaggcatcagatgtagggatgattcttgatgccgattatgatattgcggtgagaacaggctaccactgcgcaccgctcatacatgaatatcttgacgacaaggaatactccggtgttgtcagagcaagcataagcatgttcactacagtggatgagatagatgcacttgtaagagcggttggggagatttaggaggaagatatggatttacgatttgcagagataagaaatataagtcaattatgcatgcctaaggatggaaaggaaaatgtacctttaaaagtggagattccgtattatcagagaccatataaatgggacagagacagaataaagagcctgataaaggattttcatgacaacgaggaaatggatgatgagaatgaggaatattttgcgggctcggttgtcatggttacaggtaaagacggcagatttgaaatagttgacggacagcagagaattaccacactttttttgatgaattacttaagatttcttattataaggggatatatagatgagctgattcatggcagaaaaacatacaagcttgcaaatgggatgaatgagctgatagatactgccataaacatatttgacgaagataaggtcaaaaagctcagagaaattgacgctgtaataagtgattatgtggataaaattgaagggaaaagcgcagagcaggttgatgaaaaggaagaattatggaatgtattgacaaattattatcaatcaagccttggtcttgttgcaagaagtatttcggatgaggaacattataggactgcatgtgtggaaaagaacagaagattcttatcggatgtaaagcttgcacttacatacagcagaagcagctacaatgaaagattaaaggaagctttatcgaggatggtaatgaatttcacgaatttgactatgcccggattggataaagtaccctttgacaagaactcaagcaaagaaaattctgtcaccgagcaatatatgaatgctatggaagcaatatatgatgaactctatgatacatatattgtcgataagggaatcgtttttgaagaatatattaaaaagttaagtcaggctatcaaaaaaatattagaaaaaattaaactctgcgttgtcgtcacaggaaaagagaaggacgcttacacattatttgaggtgttgaatgacagaaattttcctgttgaagatttggagcttatcaaaaacctgttttataagtggtattgccatcacacggacgatgaatacagcacggatgaatatattgagcaggcagacaagctgtgggtggaaaaaatatttcctgataagggggcaaaggaacgctctaagcttatttcatatcttgcggcacagtattttaccgcagatagcagcttaaaatataatgacaacgaaaagtaccgtgaagcgattgagagaaaatatttaatcaacaaccctgattatgacggaaaggcattgttaaaggatatttacatatatgagatgctcggcattgtcttagatgagtttgattttgcatacaggaataaaacagatattgtcataaaaacagagagggaaaattctaaatccattacttacaaagcattaaatctgttaaatgcacttacaatgtacggtgttataccggcaattaccaatatcattatcaagaaatatttggacaagcacccgtttgataacattgacagcgatgaactaatgacaaatttcaggttatatgtccgtgggataaaggaagatggtgaaaataacaatgatgagtatgcacagatacataatgtagcttatgagttctggcgctttgcacttcttgcaaaggattctaataacccaagaagcatagcaaaagattacattgaaagaaataatgttgtcgaaacggattatattttaaaagtgagcagcagaagcattgatgcacttaatgcggaatttaaaaagtggattgatgaatggagatatggcaatgaaaagtcacagttaaaagtaaaagtattgtttataaacttgttttattctaataaggcaggaaacacgcttatttttaaaactggtacaaaattcggaagcaacaatatccagttagatcatctagagcctgacaggaaaaataattcggcactggaaaggtattttgaaccttcaaccaatattgcaagggaaaattataccgatggactcggcaatttcatgattatggatggcagcagcaataatgataagagtgcgatgccattgcaggatgcacttggaaaatcaggactttatgatgagatgagcgggcattggcttatccaggagatccatgagatttttgatgctgctgaatgtggaatcgacaagcatgttgacaatgatattgtatatagaataccgaatgaagagttttttaacagaagaaaaaagcgtttgataagctattttggcgcaattttaaataaaaggctggatgatgacagagtggaaataagagagcaatgataaattctgaaaggaggcacttaagatggcagaggcagatgaaaagcttgtaaaatcggttatgtttgaaattcttcacattgaacggcagaatatcagaagcaaggcaaagacggatataaagatggtggaggagattggaaaggttatttgtgaaaatctgaaattgagcagatagtggcgaggagaaggcacgaatgaaatttaaaacattaaaaatgaagaattttatgcgctacaagggtgttaatgaaattgaattcagctgtgacagtgaaaaaaatgtgacagtgatattgggggataacactgtaggcaagactactcttgcacaggcattccgctggtgcctgtacggagctattttgaaggagcgtgataagaaggagagtgactatcagctccttaacaatgatgtattgtcaggtcttgacgcaaataagactgcgactgtgtttgttgagataacagcgatggacagtgaaagcttatatacaatccacagagaagttcaatatatgagagtgtatcctaagctgttagctaaagaatcgtataaagtgctgaaggcatttgttgcggacattaacagtcccgatataagacgtgaaattgagccgggacctaaatatgctctcatgaatgagtttataaatgagctttttcctaagaatctttcgaattattttttgtttgacggcgagcgttggagtgattttgcgataaatggtgtgaaagaagacatcaaggaatctgtgcatattctcaccggattatcggcataccgcctggcaatgatgcatcttaaggattcgggggatacttcggttattaagaaatttcggaaaaatatccaaggtaaaggcaatatatatgacgattatggaagagaactgacaagattagaacgagaaatcgagcaatgtaagcatcagcttgaaagcctggatgcgacaatcagtcattttagtaagaagagcagggaagtcgaggtatatcttgaagcaaataaagatacggaggagcttcagaaagcttacaagcagtatcagagtatacttagagcgcagaacgaaggttacatagctaattttaaaaattttgtaacagagtatgaccggactgcatacagggagtttgcaagaccgctcatagaagcttcgcttaagatggtgaagttggttgcaggcgagcgccgtgatatcccgcacatgaagcaggcaagtattgattttataataagaagcgggcgttgcatatgcggtacgccaataacaaaaggctcgcatgagcttgaatgtctgttagaacagagaaattatcttccgccggccgatatgggttcacttcttggtgaattcgagaggacagccgggcgctggaacaggactgagaatgaacttagtgagactgcaaagcaggttgatgattgtgcgagaaactatgaagatacacttattcagcttcacaagcttgagcagaagatagaagagaatatcaattttgcagagaagagaagtgagcttagaagatacaaggacgaagcggacagagcagcccgcaaaaagggtgagataagagctcttattgaatctaagcaaaacagaatccacagtatagagcttcagatgcataatcaggagcttaagaatgccgagaatgagaaatggcgcaggagagttgagcttgccgaagctgtgtataacagaatcagtgcagatttttcaaaggaagagaaaaaaatctttaatgaattgaatgaggaaatacaggctaattttcaaaaaatgttcaatgcaaaggataagaaaatacagcttaccgagaactatgaaatacagatgtgttataacacaggcgttggttacagagaggagcgtaatctttcagaaggagagaaggtagccagaaattttgctttcattgtaactataatggattacagccgcaggaagaagcttgaacgaaatgcgggcaagcatgaggagaacagattaaatgatgatgatacgcttcctattgtacttgatggtccattttcaaaattaggtgatgagaatatttcgcttgtggcaggtgtgcttccgaaggtttctgagcaggtgattgtatttatgctccgcaaggactgggtacatacaggtcttgacagatatgtcggtgcagagtatttgattgataagaagcctgaggaagcatatgcatcgattagaaaggtggagagagcatagtggcagattttgaatttttcaagaaagagttcgagtttgagggcaaacacgcacgcatggtgagtgagctgtggtcgaaagatgattatgagcatacatattttaagagggttattgatgtgtatgttttcgcagccataataggtataaggcttgacagaaaagcaccgagagattattcacctgtcgagacaaggagtattctcccggatcagatgattaaagctaaagaagacttggactttataatgcagatgatgataatgttagaatcggactccgataagacagatgaggaaaaggtgcgggaagcgtttaagggagcacagacaaaggaagaatatgacaggcttatgaaaagcttcaacgactatgtccgtggcggtgttgaggagctatacgagagactcattgaacaaaagcccggctctgagggaagattctatgatgaaagaacggcaaatcttatgggcttatatgagagatttgtgccgagggaagagtgaagctgtaatatacatcaaaaaataataaaaaaatagacaaatttataaattgagtctttacttttgtaaatatatgggatataatagactcacgttatatcataccaagcgataaacggttacaacaataaggtcccgccgttggcggtgtacctcaaagctctaatcccatctaaagtgaatactttaggtgggattatctattttatgcagaaaggaatacttatggaggaaatgaagcatttaaacagaaaagcagaggtacctaagccgacagacctgaattacagaatagggcttgatataggtatagcatcggttggatgggctgtgctggagaacaatagtcatgatgaaccattcagaatcattgatatgggagtgcgtatttttgatacggcagagcagccaaagaccggcgcttcacttgctgcaccaagaagggaagcacgttctgtaagaaggaggttaagaaggcgcggacacagattagagcgcatcaagaagctttttcaggcagaaggtcttatcaacatagaggagtttgaagcgcgttataagagggcaggactgcctgacgtgtataggttaagatatgaaggacttgacagaaggcttaccaatgatgagctggcgcaggtattattacatatcgcgaagcatagagggtttaagtcgacaagcaaggcggcagacaatgagaataatagtgatgatgcaaagaaaaaagaaaatggagcgataaaagaaagtataagtaataataaaaagcttatggaagaaaaggggtacagaaccattggagaaatgctgtatcttgatgaaaaatttaaaatagatagtaattggaatgcatgtggatatatcttttgtcctcgaaataaaatgggcgaatataaagtaattgtacttagagatatgctggtggatgaggtacatgcactattcaatgctcaaagaaaatatggaaatacagtggcatctgacggggttgagaaagcgtttttggatataatgttgggtcaacgttcatttgaccttggtccggggtatcctagtaagtatgccatagatggatttgaatttggaaagtgtccttttgagggtaaaaatggaaagagatgtgcaccaaaagctgcatatacatctgaattgtttgttgtcctgcagaatataaatcatactagaattgtagatgatggtggaaatgtgagaaattttacggaagaggaaaggaataaaattattgaactggttcataaacaaaatgaagtaaaatattctgcagttagaaaagagattggtcttaaagacaatgaaaaattttataatcttacatatagtaaaggaaagaaaaaagatagtgaacagagtacatttataaaaatgataaattatcatagcataactaaagcattaaaaagggaatgtactggtgaaatattaagtgatgaatgtgcagatttatatgatgaaatagcatataatcttgccagatacaagaatgatgatagtagactgaaagaattaagagatttggggatagaagaggaaaaatgcaatgatttgcttaaattgtcatgtaacaaaccacagggcttatcgttggatgccatgaaaaagataattccttttctgcttgaagggaaagtatatagcgatgcatgtcaaatggctggttatggtgattttgcggcagatatatgtactggaaaatcaatattgctgaatgataatggaggagaaaagattagagaaacattaaatggaataactaatccggtagtaagacgtgctgtttcacagactattaaggttataaatgctattataaccgaatatggaagtccgcaggctgtcagtattgaattatcaagagagatggcaaaaaataaaaaagagcgtgacaaaatagataatgatatgaaaaaaagaagtgaggaaaatgataaattcattgatgaaataagggaatataagccaattcctacagggaaggatattgttaagtatcgtctttggaaggaacagaaggaaatatgcttgtatacaggtaaaaaaatttcggctgatgaattattttcaggagatggcggttatgatattgaccatattcttccatatagtaaaacctttgatgacagctatcgtaataaggttcttgtaagggctgaggcaaatagaattaaggggaatagaactccatatgaatatttaatatcacacggtggagagaaagcttgggaagaatttactatcagagttgaacattgcataaaggattataagaaaaaacagaagttattaaagaaaactatcacagatgaagatacaaatgaatttaaaaagcgtaacttgcaggatacacagtatgctacaacatttgtatataatttaatacgaaaaaatctatatttaaagccatatcagaattctacgaataaaaaaacacagcaagtaatggcattaaatggttcaatcaccaattttttaagtaaaggatggggactcgagaaaaaagatagaagaacacatcttcatcatgcacaagatgcggttgtcattgcatgtacaacacaggggatgattaattctatttcggattattttaagtgtagggaattggaacttgaaagaattaacagacatgtaaacaaggagtcaaagaaggaatttgacgacaatattgttaccagggaacaatatgataagcaatttggtaagaaatttcctctgccatggcagcattttaaagaggaattggatattcgcatggcacgctatcatggagtatcaggtgcaatagattttgagacatctccattagaatatctcacgtcacatgcagatgtttgcaatcgtattaactatccagagtggatgtttgttaaaggaagacccggacgcaggggcgtgcttgacggaatatttgtctcaagaatgcctaaccataaggtgagcggacaggcacatgaggagactatacgctcggggaagtattatgagaatggggggtgtggattagatagtgggtatgtggtatataaagtacctcttcaagagataaaatatataaatggtgatataatatataatagaagtgcaaggtactttaatccagatagtgatagattactgtacaatgcattgatttcgcagcttgaacggtttaatggcgatgctaaggttgcttttgcagagccatttcataagccaaaggcagatggaactcagggaccagttgttaagaaaattaaagtgtgtggaaagcagacattgagagtgccggttggtgaaaatggaatagcatctaatggtgatatggtaagaattgatgttttctgtgaagaaaataaaggtaagaaaaaatattactttgtccctatttatgtatcagatgtggtaaaaaaaagattacctaataaggctgttgtagcacataagagtgaatctgaatggaaggttatggacgaaaataattttttatttagtttatattcaaatgatttaatttatatagagagtagaggagatgatggcgtaaatttttgtgatattgataagagtagtttcactttaacatctttttttgcatattataaatttgctgatatagctaatgggaatatagcaggtgttttagattacaaagatgcgaaatttaaaggtcttggattacaaagattaagaagatttgaaaaataccaggttgatgtgcttggaaatgtatcttttgtaaaaaaagagaagcgcatgccatttaactaaatcgaggtaaaatgtatgggatatcgtaacattaaaattgaaagctccataggcttgcatataaaaaattcacagttaatcattggcgataaaggaatcagttttccgcttgaagatattaattgtgttcttatagagaatcagtcagttacggtatcttcatacatgcttcaggagtttgcaaaaaatgagattgcattgtatgtgtgtgatgaaaaacatctcccaaacgcagttcttttgccattagtaaagcacagcaggcattttaagatgcttacaagacagattgaagttggaaagccgcttatcaagaggctatggcagcagattattgtgtgcaagataaaaaatcaggcattgtgtctaaaagaaatggaattagacggttatgataagctcttagcaatgacaaaagaggttcaatccggagataaaactcatgtcgaagcaaaagcagcagcgtactattttcgtactctgtatggtgatgattttaccagagataatgaatgtataataaattcggcaatgaattatgcatatgcgataataagaggtttgattgcaaggtcgattgtgtgctatggtctggaaccttcgcttggaatgtttcatcatagcgaactgaacagctttaatctggcagatgaccttattgaagtattcagaccgttggttgatttgtatgtggcgagtcattttgatatagctgaagttgattctgacctgattcctcagataaaaagagatttattcaatattattaattacgatatgtctgtgaaaggggataagcgcattataagcaactgtattgatatgcttgtgtacagttatagcggagccatacaaggaaacaggacagaccttgagcttcccgaattaataccgttgcaggtgcatagctatgaataaatttatgagattgatggtattttttgatttgcctgttgtaaaagataaagacagaaaagcagcggctaaatttcgcagatttcttttgaaggatggatatgtcatggttcaatggtctgtgtattcgcggctttgcaatggtgccgattcaatacaaatgcataagcagcgcttgaaacaaaatttaccgcaaaaaggctctgtgcgctgccttgtcttgtcagaaaagcagtattcgtccattgatattcttcttggaacatcgacatttcacgatatggacgaatccacggatttaataaatattttttgaaaaaagaataattttgcttacgaaaaagaaacttttgccatctttttttacatgaaaaatccccgtgaaagtaataaacacggggatttttcgttccctattataccataccaagcgataactgggaacaacaacgtcacacacgaaagagaacgctcatgagctattataccataccaagcgataactgggaacaaca

SEQ ID NO: 3895 - DNA, 14818 bp, synthetic construct
  misc_feature 1..14818: note = Synthetic
  source 1..14818: mol_type = other DNA
ttcgattgcagcggattgtgacttgattctacgaatgtatgcgccggtggagaatagaaatcacaatccggaggagaaaaatgtaagtccgtttggaaagcttggattactaaaggtatccggtactctgtatgagagaaaacagccggatttaaatcatttgccagtggaaatggtggagtatcttctgacggaactattggagacaagagattccatttacctggaggatttgcttacgttaccgaaaggtcccggcagacttctgggactaaagagaacggcactgatggaatatttggaaaaactagaggaacgggaaatcattacggtcaatcggactgcgggacttgatatggtttatcggaagaataaagaaacgtctgtggatgttataaaaaaatactacgaaagtcgcaaaaaggaataagacgaacaaaggaaaggtataacgataaaatggaacaattaatgaatctgatacaaattaaccggaattttcaaaagtcagtaaatctgcaattggatttaggggatacaaagcggatagccggttatattccgacacgttcatcgacggccattttacgttgttatctagagacggttgcgggaaaaacaaaagaccatgcaacaattttaattggaccttatgggaaaggaaaatcgcaccttttactggtattgttagcgcttcttcacggagatttgtcggaagaactttggaagaaattaaatgagacggaaccggaactttcaaggttgtatccagtggatgttacagacggaatggtaaaaggatgcaaaaaatatctgccagtgctcgtctcttctggttatggggtggacttgaaccagtcatttttaattgcgctgcaggaagcgcttgagtgtgaaggattttcagagattgctccggaaacatattttacacaggcacagaaggtaatagaagactggcggaaggactatccggcagtctatgaggcgttggaagagacgttaaaagcaaaggggagcagtatcccagagttaaaaaagcagtttgcacaccagaacggaaaagcacttgctctgtttcaggaaatttatccgatgcttaccgccggaagtacttttgcgccaatgctgcaatctgaggcattaaagacctatttgcaagtcaacaggattctcacagaaacttatggttacgcagggatgtttctggtatttgatgagttcagtaaatatatagaagggcatgagactgccggattttctgcggacatgaaaacacttcaggatatgtgcgaacttgcagacaactccagaggtacgctgtttcttacaatggtggcgcacaaaagcatccatgagtacggaagaagtattcccgaagaattaaaaaatgcgtttcgcggtgtggagggacgtatcaaagaaatttcatttgtagtatcttctcgcaacaactatgaattaattgcagatacaatccaaaagaaagaacctgatttttcaaaagagtatgaaaagatgtgtaaaaaagatgaggagtttgtcagaattatagcagattcttatgaacattcttttttggcaaaattattttccccagaggagtatcacaaaatagtcggcattgggtgttttccgctgacaccgtttgccgcatatgccctgcttcacatcagtgaaaaggttgcacagaatgaacggaccgtttttacatttctttccggggaggagcagggaagcctgccatggctgttaaaacggggaatagcatcctatgtcggaattgacaaaatctatgattattttaaaaatctgtttcgggaaaatatagacgcagtgcagcttcataatgagtggctcaaggcagagtatgcgatttctaggattaaaacgatatgtaaaaaggaaaacgcagagacagagattgcaattgtaaaagcagtatctgttattcgtatgattcacagggaagaggaattcccggcgcaggatgcggttatccgtcttgcacttgggatttccggagatatatatgcggaggcgattggagaactcaaagcaaaggatatcttaatttaccgcagtagtcgcagtgtatacgcattccgtagcaatgtcggtgttgacgtagaaaaagaaatcacgcgcaaaatggaagaataccggggaaaaataaatacttgtcagacggtacaggaaatatcggagcttgattacgaattgccgaagcaatataaccaggaatatgcgattacccgctatttccagtatgagtatctgttggaagaggaattttacaaactacaaaatgcagagtatctgttttcagagaaattttcggacgggaaaatgattcttttaattgcaaagggtgaggtaaatctaaaacaggttcaaaagcatctcgatgagctttcggatgaaagggttctggtgctggtatcggagcatagatttttcatggatgatttgctgtgccggtatgaggcagtcagcgcattgatgcaggatgccggatttatggaagaaaatcaggtattgttccaggaacttgagctttgcagagaagatattgcatttgaggtaaatgtctgtctggaacagaattttttgccggaatatggaaatgcaagtgtacttcgggcgggagttgcgccgcaaaagtgcaaaaatagtgccggatttaatgcaattttgagtgaaatctgccgggaatattacggattttcgccaaaagtcaaccatgaacttttgaatgtggagcatatcggaagccagtatctgagagccagaaatcaggttgtgcagataattttgcagaaaaaagatacagaagagtatttgacaggtacgacaccggcggcgatggtttatcgtgcggcgttcgtgcatacaaaatcggacgccggctgtcggcagatttatgaggttatccgtgaatttttcctatcctgcgcggggacgcgaaagtcgtttaaagagttatatgagcagttgcagggaaaacagtttggaatgagaaaagggatttttccactgtttctggcaaagcagattgcagatacagaagggacggcggttatctatattgagcataaagagcacggaattgatgcggaaatactcaataaggtaaatgagtttccatggcgctatgagttatatattgagccggagtctgcggcaaaggaacaatacatactgcaattgtcaaaactgtttaaaatttcaggagaaaaaacagagagtcaaaaccggatagcttctattgccgcagaaatgcagaaatggtaccggggtctgccacagtatacgatggtgacaggggattttcctgcggagtggaaaaaaccggtcgtaacgctgcgcaatttgctgcgcaaggcagaagtaaatccgcgcgaacttctttttgagcggttgccagagtgtttctccggacatggctatgacaagacaatcgagggactttctcatgcaatgaagttattagaagagcggagggacaggctgaaccaggagatggcagtgcgtataaaaaaagaatttggagcaaaagaggaggaaagtctgaaaggatgtctgacagagtggtatgacagatgtggaagaatggcaaaaaatcacgttctcacggcgtctatccaggcatttttgaattatatcgagagtattgcaacaaatgacgagaccatgataacagagcggattgccaaaatcgtttcggatttatacttagatgactggaatgacaggacgtcagaacagtttgctacagaacttcatgccattcgtgaagaggttgaacttacgggcacaaaagagactgagctggcagcaggaaattgtattatcttaaagggagcagatggcagtgagatgcagcggttttatgatgcggatacgtcggattccaccagtctttatttcaaaaatatgctggaagaagcaatcgaagactttggcagtacgcttgaggtcaaccagaaggttgcaattttagtacaaacgctggagggattgctgaaatgatggagaaatgtatatatctggataacgcggcgacaactttcccaaagccagagacggtttatcaggcaatggacgaagtcaaccggcagtatgcggtaaatgccggacggggaagctatgcccttgccagtcatgctaccgcggtgattgcggagacaagaacacttctaaaacagatttctggcgcagatgaaacgatgcaagtagttttagcgccttctgcaaccattgcatgtaatcagctgctaggagggattgaatggaaatcggaagatacggtgtatgtgtcaccttttgaacataatgcagtcatgcgtgtgctagcgttgcaacaggaaaaatatcatttttcgatagaggagctggcattggatgaggagtcattattgcttgacctggagaaaatccagtttcagtttctaaggaaaaaaccatccgttgttgtattgagccatgtcagcaacgttacggggtatgttcttccagttgagcaggtggcatcttttgcaaaagagtatggtgctctggtggtggttgatggagcacagggattaggacttgtcccggtctgtttgtgtgagacggacattgatgcctatgtatttgcagggcataagacattgtatggaccgtttggaacaggtggatttctgattcgggagagtatctgtgaagcagggtgtgtaaaaccgcttcttgcggggggaacaggaagtgattctttaaatcttaagatgccgcagacgggggagctggcatttgaaccaggaagccccaatatagtggcaatagcagggcttcgtgcagcattacaggaattatgcagcagaaaaaatgaaagtctgtttacgcaggaaagaagactgacagagtatctcatcgaaaagctttccaatattccggaagtaaaattatattttccggcagataaagaaaggcatgtgggaattgtctcattttccatggaggggtatcagccgtctgatgtgggaatgattttagaccaggattatcggattgcggtgcggaccggctatcaatgtgccccgcttattcataagtatttgcgggatgaatcatccggtggagttgtgcgagttggtattggcaggtatacaacaatggaggaacttgatgcgctggtggacgcagtccgtgatatgatttaggtttcggaaaatcgctgaggaagaaggaatcgtatgatagcaaaagaagcatctttaaaagaaattattgagagtgaaccgcatttactggaaattccctttttccagagaagatatgtctggaaagaggagaactgggaggagcttttgggagcgttggagcgtgtcggagaggaaaaaatcttctggggctcggtcatcattaaacgtgcgaaagagcgtgacccggaatatcatttttcaaaaggctatattattgatggacagcagagattaactacgattgcaattttaacaaaggcaatttatgacagtcttgatgataaggcgaagcaggactggggtaaaaaaattgttgactcggatttgttctttaagccgtatacctctgcgcctgcagaaaagcagcagattatcatacgacattcaagagtcgaccgtaaagagtatgaatatgttatccggacaggtatttctgacaataagactgtggaaattgcggaggacggcggacagattatgcgttgctatgcgtattttaagaagatgttagagcagaaaacgcaaagtgatgtggcgaaactggcagataacctttatggtgatgaaaaggtgtttgtgcaaatttcattagatgaaaatgatgtaaacgagcaggcaatttttgactccattaaccgggccggacagaaattgtatacatcggatattataaaaaataatttgtttaaaaaactggtcagccttacggagagtgatgatgaggcgggaaaactctgcgataagtattgggacaatcttttctggacggaggagttctgggatgaaaagagacagtttggaaatgtgggaaagagccacctcgactttttactttatgcagttgcctgtatcaagtggacggatgagccattgcagaatattaatgacaatctggagagtgtttttgagaagcggacagccggttatgatgaaacgcaaataataacgcttattgaggagattgccatatatgcgcttatttataaaaaatatatctacgaatatagtctgaattgggaagatatttcatttggggcggaagagcatatgaagcgtcttttactgattatggataaatttaaaatacagatgttttatccgtatattttaaagtgcctgtttgacaataaaacgagcgttaatattgaaaagaaagagattgagtgtaatctgcttgatgaaaaaatgaactgtgaaattaaagttttagaagcttatatcgtgcggagaaaaattgccggtgcgggcacatccgcctattccaaaaagtgtatggacattttgaaaaatggtatcaaacaactttattctgattacaaacttggtacacaggaagattcactaaatgacgaaagtaaccagataagagaggcattaaaagatattcggcagcaggaagttgccaaaatcgtacttttctgcctggagcttaccagatggaacgataaggatgaccttgaaaaactgatttatcactatcagattgagcatattatgcctaaaaagtgggagaaatattggaagcgtccatcttctatggcggaggatgaaagggaccgccgcatccgggaaatcggaaatatgattttgctcagtcagaaactcaacggtcatttgcagaacagggaatatgttgtgaagatggaaggagagcatgacggcaaaacacagaaagaaggatacaaggcaagaacgcagttaaaaatgacaaaagaagtgattgatgcgtatgacgggggagataaagtctgggatgaggagcatattcgcaagcggacagaaaaaatttcagacgaagtcattgcgcattggaatgtacggaagctgttaggggaggtagttttatgaaaatagaagaaaatattatgcgtcagatgattttacaggtattgcagttggaaaagagaaatctgcggagcaaggcaaaaacagaccagaagatggttgatgagttgataaaaattatcagtgagtatgcaaaaatgacttcataacaacacaggaggggtggggatgaaatttacaggtattacaatgaagaattttatgcgctataaggggcttaataccatagagttcagttgtgcaccggacaaaaatgtaacagtggtactgggggataatacggttggaaaaacaaccattgcacaggcctttcgttggggactttatggagcagtacttgcagaaaaaggaaagcggcaggaggactatcagcttttaaacaatgacatccttgctgctatggatgcaaacagccgggcagaagtttttgttgagatttcagcggaggatgaagaaaaacattatatgcttcgcagaatcaaacagtatacaagaatgtatccgcaaatggttgcaagagaggcatccagtaaggtagaactgacgatatctgaccgtaaagatttagaagcctgtgtttcagttgaaccggataaaattgatgaagtgattaacgaaatgtttccgagaagtctgtcacattattttttgtttgatggcgagcgctggaatgatgtcacggtaaacggtgtccgggaaagtatcaaggaatcggtacatattctgacaggattgtcgacatatcaacaggcaatctggcacttaaaggatatgggaagcaattctgtcatcaaaaaagccaggggaaagatatccgggagcggaaatttctatgaccagttagaacataatagaaaagaagcggaacgagaggtagaacagcttcaggacagaatcaaaaatattgaaattacaattgaaaacaataacaagaagagtgaagaaatcgaacattatctggaagaaaaccgaaatacggagacgatgcagggcagatataaaaatcttcagaaagtacttgtaacgcaacaaaaatatgctttgaacggttacaagaatctggtcgacaaatttagtgagaaagcggcaatgctttttgccagaccgatgattgatgtggctgttaaaatggtacagtccgtagaaggggaacgacgggatattccgcatatgcaccagagcagtattgactatattcttaaaactggaaaatgcctttgcggcacagagataaaaccagattccaaagaactggaatgtttattggaatggcggaattacctgccaccggcggatatcggttcgctgcttggagagtttgaacggacgggtaaacgttggaggaacaccaccagagatacgtgggaagagttgacaaaagaggcggagaatacggaccggggcataatagaatatgaagagacgttaaatcagattgcccaactggagcggcagatggatgagcggatagattttgcagaaaaaagagcacagctaaaacattatcaggagacgatacgtagactttctgcggagaaaggaagctgtgaggggagaattgaggatgcaaaacgcaagattgccaatatagaatcggagatgcagttgcaggaggcaaaaaacgaggagaatgcacgttggagaaaacgagtggatgtagcggaagcgttgtatgagcgtttgcgacaggactttgaggaacgggagaaaaagacgttccaagaactgaacacaagcgtgcaggagaattttgaacggatgtttaatgctaaggataaaaaaatccagttgacgaatcagtatgaaattcagatgctatatcgcacagacattggatttagagaagagaagaatctgtctgagggggagaagattgccagaaactttgcatttattgtcacaatcatggagtatagcagagaaaagaaagcggaaaagctcggaacggagattgtgggcgatacgctgccaattgtgcttgatggtcccttttccaagcttggagatgaaaatatacggctgattgcaaaggtgctgccggaggtgtcggagcaggttatcctgttcatgttggataaagactggaagtatacagaacttgattcgtatgtgggtgcggcatatcgaattgaaaaggcggcagatgaggcatatgcatccataaagcgtgttgatacgatagcggacaaaatgccttaagagaagggcaggaatggagattagtatggcagattatgaatttttcaaaagggagtttgaatttcgtggaaggcatgctcggatggcaggggagttgtggataaaagatgattatgaacatacttattttaaacgactgatagacttgtatgtaattgctgctgtagttggacttagaattgaccgcagagcagaggaagacttgtccccggtaccaccaaagagtatatttccggaacagatgcttggagcgaaagagaatcttgactttatcatgcagatgatgataatgctcgacagcagagtcggtttaagcaatgaggaacgtgtaaaaagagcatttcgtggtgcggaaacggcggaagagtttcgatactatcaaaatatgttcaattcttatgtaagaggcggtgtggaagaactgtatgagcggctgattgtaagaaagtccgagccgggggatgaatatcaggataaccggacggcaaatctgatggaagttgtcatgcggtttggcgaaaaattgtaaaaataaatgtattttgtcatatttttagagaaaaggactttacaaatgtaaataggacgattataataaagaagaattatatcataccaagtagtaacaggtttctacagtaaggtagaatacctaaaagctctaatcccattcttcggaatgggattatcttttatccggaaaggagaaggttatggaacgtagatttgattacagaattggacttgatatcggaattgcttctgtgggatgggcggttttacagaataacagcaagggtgagccggtgcatatcattgatatgggagttcgtatttttgataaggcagaacagccgaagacaggcgaagcattagcggcaccgagaagagatgcgcgcacgagcagacgacggcttcgcaggagaagacaccggttagagcgtatcaagtggctttttgtgcaggaaggactgcttgaggatgcggaaaaatttatggagcgctaccacaaagcggggcttccggatgtttaccagctcaggtatgaggcattagaccgggtattagaggatgaggaatttgcacagattctgattcatattgcaaaacacagaggttttcgttctacaaggaaggcggaaacaaaggataaagagggcggcgctgttttgaaaggcaccgctgaaaacgagaagctgatggaggaaaaaggatatcgcacggttggtgagatgatttactgtgatgagaagtttcattcggaatgtctctggacagaaaagggatatgttctgtctccgaggaataaaccggatgactatcagcataccattttgcgccggatgcttgaggatgaggtgaaacagatttttgaaagccagcggaatcttggaaataagaaagcaactgtcagcctggaagaaaaatatcttgagatttttaacagccagcgctcgtttgacaagggaccgggcttacagccggacggaacgccaagtccgtattccatggaaggatttgagggaagggttggaaactgttcgcttgaaaaaaaggaactgcgtgcagcaaagggaacttacacggcagaatattttgtggcattgcagaagattgcacatacacgacttgtcgatatagctggggaagttagaaatttcactgatgaggaacgggagactttaatcgaactgcttcatacacaaagagaaattaaatatgaaacggtgcgtaagaagttaaagctggatattgaaacacgtttttataatttgaactacaaaagcaaaaaagatggcagcatagaagagaaggtaaaagagacagaaaaagcgaagtttctcagtatgccgttttatcatgattataaaaaatgtctgggagaacggacagagggtatgacagccgaggaagtggcagatttgatggatcaggtgggacatattctgacctgttttaagaatgacgacagccgcagggagcgcctgctggttttgggacttgatgaaacggaaatcaatgcattgttggaattgaatccaacaaaatttcagcatctgtccataaaggcaatgagaaacatcattccatacctggaaaaaggaatgacctatgataaggcttgcgaggcagcaggatatgattttaaggcggacagtggaaatacgaaaaaggttcttttaaaaggagaagaggttactaatattatcaacgagattaccaatccggtggtaaagcgttctgtgtcgcagactgtaaaggtcatcaacgccattattttaaaatatggcagtccacaggcgatcaatattgagcttgccagagagatggcgaagaattttgaggaacgcaagaaactggaaaagggaatggaagagcgccagaaagcaaacgaaagggtgaagaaggagcttgaggaattaggtgtattttctccaagcggacaggatatcatcaagtatcgtctctggcaggagcagggaggcatctgcctttattccgggaaaaagattccgattgaagagcttctcagtcgtcgtggaggatatgatgttgaccatattcttccatatagcattacatttgatgacagcttccataacaaggtgctggtggaggcagcagaaaaccgccagaagggcaaccggacaccatatgaatattttggacacgaagaggagagatggaaagcgtttgaagtgcgtgtatttaacacggtaaaggattataagaagcagcagaagcttttaaaacattctatttcagagcaggagtgcaaggagtttaaggaacggaatcttaccgatacaaaatatattacaacagtcgtgtataatttaattcgacagaatttagagtttgcactgttaaatgatacaacgaaaaagaaacaggtgcgcgcagtcaatggagcgattacggcgtatttaagaaagcgctggggacttccgcagaaaaatcgcgaaacagatacacatcatgcggtggatgcggtagtgattgcctgctgtacagacgggatgattcagaaaatcagtcggtatatgaaggcgacagagttacgctacacaaaagactttacattcgtggatgaagagacgggagaaatcatacgaccaagagagatggacagagacgaatgggataagcgttttggggtacgtattccgcttccatggagtgccttccggatggaacttgatgtacatatggcggatgatccgaagctgtttttggaaaatagtgtagatgtaagtatagcaattgattatccacctgaaatatatgatgaaatccatccaattttcgtttcgcggatgccaaaccataaggttaccggagcagcgcacaaggataccattcgcagtccgagacactacaaggaaagagggactgtccttacgagaactgcaattacagacttgaagttaaataaagctggtgaaatcgaagggtactataataaggaaagtgactggagattgtaccgtgcattaaaggcacagcttgcagcctgtgaaaatgacggaaagaaagcctttgcaggaggatttcataaaccgaaggcagatggtacggatggaccagttgtaaagaaggttttgattgagagcaagcagacctctggagttgcggtaaataacagccacggcattgctgaaaacggttccatggttcgtattgatgtgttccgggaaaatggaaagtattattttgtgccgatttatacagcggatgttgtgaaaaaggtgcttccgaataaggcggcaacggctggaaaaattcagaatgagtggagagaggttcaggataaagattttgtatttagcctatatcgtaatgatgtagtacatattgttagtaaaaagggggtaaaagttgttcctgtaacaggaggacaggtagtaaagaatgagatttactcttattttaaaggggcagatattgcaactgttagtataactggaataggtcatgacagtggatttaaatatcgaagtcttggaattcaaggtctcgatttaattgaaaaatgtcaggtggatgttttaggaaatatatcagttgtgcggcacgaggtacggatggggttttcataggatatcttgtgtcatggatgaggtaacaggaagggaaggtgtccatggggtttcgcaacataaaaattgacggtcacgtaaaactgcagattaaaaaccagcagttgctgattgatgcgggggaagaaatacaaattccgttagaggatattaactgcattttgattgaaaatcagactgtgacattatcggcatatcttttacagaagctggcagatatgggaatcgcgttgtatgtgtgtgacgaaaagcatttaccgaatgcagtgctgcttcccatggtgcgccacagccgtcatttcaaaattttaaaataccagatggaggcagcaaaacctctgcaaaaacgtctttggcagcagattgtgatacaaaagataaaaaatcaggcgctatgcctggagttgttgggacgggaaggggcaaaagaactgtttgccatgtgcagggaggtacagtcaggtgacaggacgcatgtggaggcaaaagctgccgcattttatttcaagagcatgtatggaattggtttttccagaggaaacgatcatattattaactcggcattgaattatggttacgccattgtgagagggctgattgcacgctcaattgtctgttacgggttagagccgtcgattggagtttttcattgcagcgagttaaacagttataatctggcggatgatttgatagaaccttttcgaccgttggttgacctgtatgtttcacagcattacgatatctcagaaatagactccgtattgacaccagaggcaaaacgtggaatttttggaattattaattttgacatggatgtgaaaggggaaaaacgtattatcagtaattgcgttgatatgctggcggcaagttatagcagtgcattgcaggaacggcgaacagatttggatttgccggagttaatacagttgcaggtacatcgttatgaataagtttatgagaatgctcgtattttttgatttaccggttgtaacagcgaaagagagaaaagcagcgacaaagttccgtaattttttactcaaggacggttatcatatgatgcagtggtccgtttacacgagaatctgtaatggaacggatgccgtggcaatgcaccaacaacgtctgaagctaaatttacctgaaaaaggttccgtgcgacttctgacactgacagaaaaacagtttgaatctattgaggtgcttcttggaacaaaaacttttgatgatggctcacaatcaacagaattgttaaatattttttgaaaaaagaacaatattaggaaaaaaattattggaaacaagagatttttccaaaggaaaacccctgcataatcccagtgttatgcaggggtttgtgttccctattataccataccaagtaataactgggaactacagctttaattatcctttgaacatactgataactat

SEQ ID NO: 3896 - DNA, 13825 bp, synthetic construct
  source 1..13825: mol_type = other DNA
  misc_feature 1..13825: note = Synthetic
tataaaaaattatcaaaagaaatgtgatgagatcgaacaatatctggaagaaaataagagtacagaaatgctgcagggcaagttaaaaaatctgcagattgtgagggaagaacaaaggaaaagggcaaataatcattataaaactttagtgtcacagatcagtgacaaagcctatatgatgttctcacagccgctcattgaagcgtgtgtgaaaatggtgaaagctgttgccggggagagacgggatattccgcatatgcggcagggaacgatcgattacattattaagacaggcagatgtatctgtggcacgccacttacggaaggctcccatgagctggaatgtcttttagaacagagaaattatcttccgcctgccgatatcggatcgctgttaggagaatttgagagaaccggaaatcgttggaaaaaccgtaccgatggaagttatgaagaattaattgaaatggcgcagaatgtggatgacagtgtccacgattacgaagaaacctgtaatcagcttgaaattttgaaccggcagatggatgcgtcatttgatttcgcagaaaaaagaagattgttaagacattaccgctccgaaatggaaaaaacgagtgtggaaaaaggagagtgtacaggaaaaatttcgaactacaaaaaagagattgaaaatattgaaaacaacatgcgcaggcgggaagctgcaaacgaagagaaccgcaagtggagggcacgtctggaagttgcagaagcgctttatgccaagatgaaaaaagaatttgaacagaaagagcggaaaacatttctggaactcaataaaaatgtgcagcttaattttgaaaagatgttcattgcgaaagataaaaagatccagctgaccgaacagtatgaaatacaaatgctttatcagacggagcgtggctaccgggaagaaaaaaatctttccgagggagagaagatcgcccgtaattttgcatttattgtgactgttatggagtacagcagacagaaaaaggcggaaaagcttggagtcagtgaacttgaaggagatacgctgcctatcgtgttggatggtcctttttcaaaactgggagatgaaaatatcaaactgatcgcaggtgtattaccggaagtctcggagcaggtgatcctttttatgctgaaaaaagactggaaatataccggtcttgattcttatgtaggcgcggcttactgtattgataaaaaagctgaggaagctttcgcatcgatcagaaaaatggaggaactttaaatggctgattttgagttttttaagaaagagtttgaatttaaaggaaagcatgcaaagatggcacaggaattgtgggtgagagatgacacagaacgtacttattttaagcgactgatcgatctgtatgtggcggcagctgttgttgggtttcgtgtagacagaaaggcagaggaagattattcgccatttgagacaagcagtattttcccggaacagatgttgaaagaaaaggaaaatctggattttatattacagatgatgatcatgctgaattacagaggaacactgacagatgaagagtgtgtgaaaaaagcttttcagggggcacagacgaaggaagaatttgagcagtataaaaagatgttcaatgattatgtccgtggcggtgtggaagaactatacgaacagcttatcatacgaaaggcagatccggatgacaagtttcgtgataacagaacagcaaatctgatggcactgatggaaagatatggtgcagggaaaatgaacgttattccggaaaatgaagatgaaaccgtgagaattcagatttaaaatgaaaaatattgtcaaaaaacaggaaaaagtatttacaaatgtcggaaaaaggattagtataaaggggaattacaacataccaaataataaccggttactacaataaggtagtaaacctaaaagctctaatcccattcttcggaatgggattatcttttacccgtatttattcaagcgtatgaaataaatggcattgtcccgaaagaggttcaatgtagaacggaagtgcaaaaacatttttacatgtaacgttatgtctgtagttgatgaatgcagaacatggaaaggaagggttacttattatggaggaaaaatttcagtacagaatcggattagacatcggaatcacatcggtgggatgggcagttttacagaataacagccaggatgaaccggtacggatcacagatctcggggtaagaatttttgatgtggcagagaatccaaaaaatggtgatgcgttagcagctcccagacgggatgcaaggacaacccgcagaagattgagacggagaagacacagattagagcggattaagtttttattacaggaaaatggattgatcgaaatggattcttttatggagcgctattataagggaaatcttccggatgtctatcagttgcgatatgagggattagatcgtaagttgaaagacgaagaactggcacaggtgctgatccatattgcaaagcaccgcggtttccgctcgaccagaaaggctgagacgaaggaaaaagagggcggagcagtattaaaggcaacgacagagaaccagaagatcatgcaggaaaaaggctatcgcacggttggggagatgctgtatctggatgaagcttttcatacggagtgcctctggaatgaaaaaggatatgtgctgacaccaaggaatcgtccggatgattacaagcacaccattttgcggtcaatgctggtagaggaagtgcatgctatttttgctgcacagcgggcacttggaaatgagaaggcagctgaagaattggaaaatgcgtatgtggagatcatgacgagccagcgttcctttgatatgggaccgggattgcagccggatggaaagccaagcccatatgcgatggaaggattcggcgaccgtgttggaaaatgtacgtttgaaaaagacgaataccgggcaccgaaggcaacctatacagcggaattgtttgttgccctgcagaaaataaatcatacgaagctgatcgatgagtttggaactggcagatttttttcagaagaggaaagaaagactataattggtcttttgctttcaagcaaagagttgaaatatggaacgataagaaaaaaattaaacattgatccgtctttaaaattcaacagcttaaattacagtgcaaagaaagagggagagacggaagaagagagagtccgtgataccgagaaagcaaaatttgcaggtatgccgtggacttatgagtattccaaatgcctgaaagaccgaacagaggaaatgcctgttggagagaaggcagacttatttgaccggatcggtgagatactgactgcttataagaatgatgacagcagaagcagccgcctggaagaattgggcttatcaggagaagaaatcgatggattgctggatctttcccctgcaaagtatcagagagtatcgctcaaggcaatgagaaagatgcagccatatttagaagatggtttgatttatgataaagcctgtgaagcagcaggttatgatttccgtgcgttgaatgatggcagcaaaaagcacttattaaaaggggaagaaatcaatgctatcgtaaatgatatcacaaatccggttgtaaaacgctccgtatcgcagacgatcaaagtcatcaatgcgattattcagaaatatggaagtccgcaggcggtcaacattgagctggcaagagagatgtcaaagaactttcaggatcgcacgaatctggaaaaagagatgaaaaagcggcagcaggagaatgagcgtgcaaagtagcagatcatcgaattaggaaaacagaacccgaccggacaggatattttaaaatatcgtttgtggaatgatcagggaggttactgtctgtattccggcaagaaaatcccattggaggaattatttgatggagggtatgatattgaccatattcttccgtacagtatcacatttgacgacagttaccggaataaggtgcttgtgactgcacaggaaaaccggcagaaagggaatcgtaccccatatgaatacttcggagcggatgaaaaacgctgggaagattacgaaacgagcgtccggttacttgtccgggattataagaaacagcagaaattactgaagaagaattttacagaggaagaacgcaaagagtttaaggagagaaacttaaacgataccaagtatattacaagagtagtttataatatgatccgccagaatctggaattggaaccattcaatcatccggaaaagaaaaagcaggtgtgggcagtcaatggagcagtgacatcttacctcagaaaacgctggggactgatgcagaaagaccgttcgactgacagacatcatgcaatggatgcggttgtgatcgcatgctgcacagatgggatgattcataagatctcgatgtttgtaaaggggagagaacttagatttaacagaaatttaacaatagtagatgagaaaacaggtgaaatttttacaagagaacagtgggacgagaagtttggcgtgaaagtgccacttccatggaattctttccgggatgaattagatattcggttgctgaatgaagatccaaaaaatttcctgctgacacatgcggatgttcagagagagcttgattatccgggctggatgtacggagaagaggaaagcccaatcgaagaaggcaggtatatcaattatatacgaccactttttgtatccagaatgccaaaccataaggtgacaggttcggcacatgatgcaaccataagaagtgcgagagattatgaaacgcgtggtgtggtgataacaaaagttccgctgacggatctgaaactgaataaagacaatgagattgaaggatattatgataaagacagcgacaggcttctttatcaggcattggtaaggcaactgttattgcatggaaatgatggaaagaaagcattcgcggaagattttcataagccgaaagctgacggtacagaaggtccggttgtacgcaaggtgaagattgagaagaaacagacttccggtgttatggttcgtggtgggacaggaattgctgcgaatggtgagatggtgcggattgatgtgttccgggaaaatggaaaatactatttcgtgcctgtgtatacagcggatgtggtacggaaggtgctgccgaacagggcggcaacacacacaaaaccatattcagagtggagagtcatggatgatgccaattttgtttttagtctgtattccagggatttaatccatgtgaagagcaaaaaggatataaaaacaaatctggtaaatggtggattattgctgcagaaagaaatatttgcgtattacaccggggcagatattgcaacggcaagtattgccggttttgcgaatgacagtaattttaaatttagaggacttggaattcagagtctggaaatttttgaaaaatgccaggtagacatcctcggaaatatttccgttgtccgccacgagaaccgccaggaatttcattagaaaaattgagggaaacatatgggatttcgaaatattatgatcagcagtaatatgaaactccgcattcaggatcagcagttagttgtgactgccggggatgaggtgcatattccactggaagatattaactgtattttaattgaaaatcagtcggtcacattatctgcctatctgttacagaaagttgcggatagcggtattgcgctttatgtctgtgatgaaaaacatttgccaaatgcagtgttattgccaatggtgcgacacagccgtcattttaaaattttaaaatatcagatggagacgggaaagccattgcaaaagcgtttgtggcagcaggttgtgatccagaagatacgaaatcaggcactgtgcctgcaattactggagctggatggacatgaggaacttctcagaatgtgtaaggaagtacagtccggcgacaggacacatgtggaagccaaagcggcagcatactatttccgatgtatgtacggacttgggttttcgagaggaaatgatcatattattaactcggcattgaattatggatatgcaatcatccgtggaatgatcgcacgttccatcatatgttacgggttagaaccatcgattggtatctttcatcacagcgagctgaataattataatctggcagatgacatgattgagccattccggccattggtggatctatatgtttccagtcattttgatatttcagaaatagacagtacattgacaccggaaatgaaaaagggattgtttggaattataaattttgatatgtcagtgaaaggagatatgcgtattgtaagtaactgtattgatatgttgattgcaagttacagcagtgcattacagggaaaccggacagagcttgatctgccggaactgatacagctacaggtacacagttatgaataaatttatgagaattgttgtcttttttgatcttccggtcgtcactgcaaaagagaaaaaagcagccgcaaaattccggaaatttttgataaaagatgggtacaatatgatgcagtggtccgtgtattcaagaatttgtaatggaacagattctgttgcaatgcacagacagaggctgaaacagaatctcccggaaaatggctctgtccgggcacttacgctgacagaaaagcagtttgaatccattgatattttattgggagaaaaaacatttgcggattcaccggaatctacggaactgatcaatattttttaactaacacacaggcttgccatctatcggtagctcctttactattttgatagaaacgagacatatgcatataattataaaaagcgaaaaaggatagcaagtaattgagatggaagaacagacgatgagtgcaagagagaaaaataatgttaagaattatgtgaaagtgaggtgaggtgtgtgctaatgaatacatctgagtatctttctattattgaaaatattaagagtgaaatcaaggctgcgcaataccgtgcagcagttcatgcgaacgtagacatgctgctcctttatcatgatataggctgtgtaatcaatgagcataaatcatggggcaacaagtttattgacaatcttgccactgatattaggatcgcattcccggagagtaaaggatattctgttcgtaatctaaaatacatggcaaaatttgccgagacatatccagatcggaaatttgtgcagacggtgtctgcacaaattccgtggtctcataatattgcaattttggaaaaagtcaaagacccgcaacagcgtatatggtacattgaaaaaacggctgaaaacggatggtcacacaatgttttgattcatcaaatcgaaagtagtttgtatgaacgtcaggttctggcggataaggttacaaattttgaacaccgtctaccgtctccacaaagtgagttggcagtacagactatgaaagacccatatgtatttgatttcattccttttcgggaaaatatgcttgaacgggacattgagcaggcactggttcgggatgtcacaaagcttcttttagagcttggaacgggatttgcatttttgggaaatcagtatcccctgaatgtaggtggtgatgatttttacattgatttactgttctataatctgaatcttcgttgctatgtggttatagaactgaaaacgggtgacttcaagccggaatatgccggtcagctaaatttttatctgtcggccgtagatggtattttgaagaaagaacaggacaatccgtcgattggtttgcttctgtgtaaaagcaaaaacaatgtggtcgcagaatattcgctcaaggatatttcaaagccgattggtgtaagcgaatacaaaataactagcagtttgccggatgatctggaaaagcagctgccgtctgttgaagatattcagaaacggattaaataagaaaattgtaacaaaatttctgtttgacttttttcaaatcaatcaatataataattcctgaacgagtagcagactagcgtaaatccagttatgttactcgtttttttattttaaagttaatagaaagacatgaaaaaagtgtgtagcctatcagcgtaagtccagcttattgtgataggagcacactttttttgtgccgcaaacaaggaggtcaaatcctctgctcctgcaagggcagtcgcatttgcttcgcaaacaaggaggatgtatgtcagaaagtaacaaaatgaaggagatgccggtcaataggcttatggtgcagatgggaataccgatgatcttatcgatggcattgcaggcggtctacaacattgtggacagtgcctttgttggaaacatgaaggtgggaagtgaagcggcgcttaacgcactgacactggtgttcccggtacagatgcttatggtggcagtaggaattggaacgggtgtcggaaccaatgcgcttctctcaaggacactcggacagggaaatgcccaaaaagctgcaaaagtggcgggcaatagtttatttctcggagtaattatttatgtggcatgtttcttatttggaatttttggagtaagagcatacatttcatcacagaccattgatccggaagtgatttcaatgggaatgagttatttaagaatatgctgtgtggtttcatttggaatcattttcttctcattatttgaaaaattattacaggcgaccggacgttccatttattctacgatcggtcaggtggtaggtgcggtcgtaaatataattctagatccggtcatgatttacggtatcggaccggttcctgaaatgggcgtggagggtgcagcctatgctactgtaattggtcaggtcgcatcggcagcattattatttatttttcatatgaaattaaataaagagtttgaacatggtgtgggatacatgaagcctgataccggaattataaaagaaatctatgcgatcggtcttccggcgatcattgcacaggcattgatgtctatcatggtttatgtgatgaatctgatcttaaaattcagtccttctgcacagaccgcatatggattgttctataaagtgcagcagtttgtattgttcctcgcatttggactcagggatgcgatcacaccgatcattgcgttcgcctacggaatgcatagcaaaaagaggattcaggacggaatcaggtatggactgatttatacgatcgtacttatggtcgttggtgtggcaatcacagaaattttcccgggtgcttttgcgatgttatttaatgcggggcaatccagagagtatttcattggagcgatgagaatcatctccatcagcttcatttttgcgggaatcaatgtggcatatcagggaatttatcaggcactggacggtggtatggaatcacttgtgatctcgctgctcagacagcttataattatattaccgctggccggtattttctctgtttttgtcagaaacggtcagatgggagtttcgttgatctggtgggcatttccaatcaccgagcttaccgcatgtctggtgggatatgtattgttgaagaggatcagaaaaaacaaggtagaaagtttaagttaaggaggagtcagttatggaaaagacaatcataacgatcagcagagagtttggaagcggcggccgctttattggtgaagaagtggcaaagaaacttgggatttcctattatgacaaggatatcatcggacagattgcggagcagtcaggattttcaccggaatatatccgggaaaatgcggaattatctccgaagaaaggcttatttgcctatgcattttccggacgtgatatcacagggaaatcagtggaagatatggtgtatgaagcacagagaaacgtgatcctgaaaattgcggaaaaagaaagctgtgtgatcataggaagaaatgcggattttatcttaaaagaccgggaggatgtgctgaatgtttttatacacggggatatgccggaaaaagtgcagcgtatctgtaaactatacaatgtcgcagaagctgatgctgcaaaaatgataaccgaaacagataaaaggcgcagaacaaactataatttctacacagaccagaaatggggaatggcgaaaaactatacattatgtttgaacagctcgcagcttggatatgaaaggtgtgaggaaatcattatggagtgtgtaaaatagagaatagtatggatcaataaaaaaactggtttttgaggtgccccctcaaaaaccagttctttttttatgatgtctgaaattctgttaaattaacacttctcaggttccggataatcaaccccgaacgtttcaactgtcacggttttcattacctgtggctgtaatggacggtcagagtaatcagttgctgtttctgcaattttattgacaacatccataccatcgatcactttaccgaatgcagcataagcgccgtctaagtgtggagagttcttgtgcatgatgaaaaactgggaaccggcagaatccgggatcatagttcttgccatggataaaacaccttcagaatgttttaagtcattcttgaaaccattctgggagaattctcctttgatctcatagccaggaccacccattccggttccgtctgggtcgccgccctggatcatgaaaccattgatgacacggtggaagatgacgccgtcataaaaacctttttttactaaactgataaagttgtttacagtatttggtgcgatttcaggataaagctctgctttcatgatatcgccgttttccatctcgattgtaacaattggatttgacataataattgattcctttcattgaatatgatatcgtgatttttcatatacacaccatattgtaacgaaaaaatatgttttcgtaaagataaaacgcaaaaaatcagatcgttgtattctgaaagcagactctgatcttttgtgcaatgcctgcatcaataaaacctttatctgccatatcatcaagaatatcgcaggttttttcatgcgaaaagccctgcttataagggcggctttcggtgagtgcctgataaatgtcgatacatgccataatgcgttccggctcgtttaattcggcggcagttttgccgaaaggataaccttttccgttcagtttttcgtggtggaatgcagcccagtcacggatgtcttcaaaatcgttgatattggacagaatcagataagtataacctgcatggtttttcattttagaaaattcttcgtcggtcagcttatccggtttttccaaaatatcattgtcgattgccattttgccgatatcatgaagtgcgccagccagatacattttctgaacctgtgtggaatcgtagccggtgtacgctgcaaatgcggcggctttctctgcaacaccgatggagtgtctgcttgtaaaagaagatttatagtcgacgatctgcgcaaaaaagtcggcaatatttttgcaggtttcccagtcaaaggcctgtttttctctcggaacgatctcccagagtttcgtttcaaaggagtcatccctgaaagctgcaaattcgttatctgaaaatatatggaaaaaagcatccacacatgcggcgtcaaaaagtttatccgtatgccggatcaggtactgttttaccatatcccatctctgtgtttcaaatgcaccgctgtgcccgatgatatccaccacatcggcaaggtggataatgcgcgcagacagaggaacttcatcccattttttgtgaaatggtcctgtgccgtccgcatgctcatgatggtataggattgcattggtaacgtcagttttaaaagggatttttgcaagattccgttcaccgtagatgcaatgcaggtttgtagtgtttgccacaaggtcagcggtcaggtctgccgcggaatgctcctgcaattcctcggaaatatattgtgtgagggcgttgtcgtgcaacagagcgcagattgcgagatcctgcagggcatcctccggcagatcaaaatactgccccatgcgcacactgatataggccactcgctttccatgtttatttttaatattcaccagttctgcctcgatgcagtcgagagcataggaacaggcactgatcaaaccgataatatctatctccataatttattttaatgaaatcggacggcatacaaagccatgccttgcgatttcataacctccttaaattagtaataattcctattattgaattatagaatcagttacccctattgtcaatatgttacagttcacaggttaccctgcgaactgtaacttcgcagccccatataaagttttgcttcgcaaaagagggctgctcacacccacatcacgttcatacgcacctgaacagcatggtgttcaggtgctgagtgaacagtaacgtcaatatttgttacagtattcatatgaccatgattagttttagcaggaatagcagaagtttcatatttataggaagtatatcgaaaaacttccttgtaaatttttttgttttatggtttgataagtacagaaaaagagtatcggagaataaaggagagaaaaagtatgccagtttttgatttcagcagcgcttcagaggaaaaagaagcgtttgtatgtacatataccgcatttacatcagacagttccgaaaaaacaccggacaatccgatcctggtgttagacaatcagcaaaaacagtggagccatcattccaccggagtattttgcaaccagagccagtggacagcatttgagtttaaggaggaggacgagacattccgttccaatatcctgcggatcgatgcacgttttgtgaatctgatcaaatggcttggggagaaccgtatcaacgttcttttgtccggggaaaacagggcggacggctatgccgtgtacaagatcagggaaaatgcttttcacggtggaacgaaactctctgcggcggatggatttttacagtatgtgatggaacgccttttatcgagcagtgcaccggagcaggaggatgaggacgaagagttagacgagagcggtgacagcatgaagcttaccagtatccagagtatttcggatttcttaaactgcgcaggaagaaccatgccggacaatatcagactgtgggcgagaagaaatttagcagttgcacgttccagcgaagtgtctgccgaggaacgccgccacgcgcagcgtgcactttccattatgacgaatatccagtggaaaaataattattttgaagcaatcgatccggtggaagcgcgcagaatcttagatgaagaactgtacggaatggaaaaagtaaaacagcgtatcatggagactattatccagatcaaccgtacccatacgctgccagcttatggactgttgttagtgggaccggcaggaaccggaaaatcgcagattgcctatgcggtggcaagaattttaaaactgccgtggacgacactcgatatgagttccatcaatgacccggagcagttgaccggaagctcccgtatctacggaaatgcgaagcctggtattattatggatgcatttttcatggctggcgagtcgaaccttgtattcatcatcaacgagcttgataaggctgcatccggaaaaggaaacggcaatccggcggacgtacttcttaccttattagataatcttggatttacagacaactatatggaatgtatgattccgaccggcggtgtctatccgattgcaactgccaatgtaaaagaagatatcagcgccccgctgatgtcacgttttgcagtgattgatatcccggattatacgcaggaagagaaaaaaatcattttctccaaatttgcactgccaa

SEQ ID NO: 3897 - DNA, 12586 bp, synthetic construct
  source 1..12586: mol_type = other DNA
  misc_feature 1..12586: note = Synthetic
ccggcgaggtcaaggagggcgtgcttgtcgtactggacaagaccccgttctatgccgagatgggcggtcaggtcgcagaccgcggctaccttgtcagcggtgatgccaagctgaaggtcacgcaggtcaagtaagacgattggtttagcggaggaggataagttctataatcttaattatagtcagaaatcgggaagcaaaaaatctcctgaagatacagatttcgtgaaaatggagaactatcacaagatacgcaaggctctcggggaagaggttgtatcggaacatttgtcaccggataagataaagctgtatgacgacatagccaggatacttacattgtacaagaatgatgacagcagaataaggcgtttggctgaacatgatatcgcttcagaatgttatgacgcattgcttgaaatgtcaccgagtaaatttcataatctatcactcagggctatggggaaaattattccgttcctgcttgagggaaatacttacgataaggcttgtgagcttgcagggtatgatttcagggctgagaataacggcgaaaagtcgattttgttaaaaggtaaaaatatcaccaacattgtaaatgatatcacgaaccctgttgtcagacgctctgtatcgcagaccatcaaggtaatcaacgcgattatactcgagtacggcagtccgcaggctgtgaacattgagcttgcgagggagatgtcaaaggatttcgatgagagaagaaaaatcaagtccgatatggaggcgagagagaaggaaaatgacaaggttttaggtcgtgttagggaatacaagccaaatccgaccgggcaggatatagtaaagttccgtctttgggaggagcagggaggagtatgtctttattcaggcgaaaagattgatataaatgaccttttctcatcaaatggaggatatgatgttgaccatatattgccgtacagcattacctttgacgattcatatcgcaataaggtacttgtgaaggctgcagagaacaggcagaagggcaaccggacaccttatgagtatatcatggctgaaaaaggcgagatggcgtggaaccaatatgagactttggtcaaaaataccgttaaggattataaaaaacagcttaagctcctaaaaaagcatatatctgacgaggagaaagcagaatttaaggagcgtaacctcacagacacaaaatacataacaagaattatttacaatatgatacgccagaaccttgtgttaaaaccttacctcaatctcgagaggaagagaaaaaagcaggttatggctgtaaacggcgctataacacattatctcagcaagagatggggactcgcaggcaaggacagacgcaccgacacccatcacgcacaggacgctgttgtcatagcatgtacaaccgatggaatgattaacaggatatcccgctattcaaagggcagagagttggcttattcgagaggcttcgagttcgtggacgaggagacgggagaaatattaaaccgcgacaatttttcgcgcgaggactgggatgagaagttcggcgtaaggcttccgatgccatgggagcatttcgtagacgagctggatattcgtatgtcaagatacagcacaatgggagaaggtgtttcctcgggaacgtcgccgagggaatttattctgtcgcacagagatgtgtttaactggataaattatcctgagtggatgtttgttgagggcagaccgggacgcaggggcgtacttgacggaatatttgtctcgcgaatgccaaatcacaaggtcagcggacaggcacacgaggagactatacggtcggcgaagtattatgaggacggaggaagcgtctttgaaaccggcggttatgtggtgacgaagaaatctattcaggatatcaagctgaaggatggcgaaataaaggagttttttaacccagacagtgacagactgctctacgaggcactggtcgaccgacttaatcagtacggaaatgaccctaaaaaggcttttgcagagccgttccataagccaaagtcggatggaactccgggacctgtggtcaagaaaattaaggtgtttgaaaagcagacatcaggagtgcttgtaagagagggaaatgggatagcagccaatggctccatggtcagaattgatgtgttctgcgaggaaaacaagggtaagaaaaaatactattttgtcccgatttacacggctgatgtggtgaagaaaaggttgcctaatagggcggcgacacaggcaaaaatgccttcagagtggcgtttgatgaatgacgagaattttattttcagcctttattcgagggatttgatttatattgagagtgataagggagtccagacgaaggatattgacaatgtgacgggcaaagtggaaaaaatgtatgcttattacactggagctgatacaagtactgcgagcattgcgggaaaattacatgatagtagtgccatgtttagggggcttggtattcagagtttgagaaagttacaaaaatgtcagatagatgtattaggaaatatctcatttgtaagtaaagaaaaaagaatgacattcaattagttttcgggaggtatatatgggatatcgtaacataaagattgacagttctgtaggtctgcatatcaaaaacgagcagttggtgataggtgaaaagggcgtcagttttccgctggaggatattaactgcgttctgatagaaaatcaggctgttgcgatatcagcatatatgctttcggagtttgcaaaacagggaattgcattgtatgtctgcgatgaaaaacatcttccaaatgcggttcttcttccgatggtgaagcacagcagacatttcaaactgctcatcaagcagattgaggttggaaagccgttgattaagcggttgtggcagcagattattgtgtgtaagataaaaaatcaggcattgtgtctcaaagagatggggcttgacggatacgaaaagcttctttcgatgacaaaagaagtgcagtcaggggacaaaacgcacgttgaggcaaaggcagcggcgtactattttcgtgttttgtatggcgatgaatttacaagagcagatgagtgtattgtaaattctgcgatgaactacgcatatgcgataataagggggctgattgcaaggtcagttgtgtgttatggtttagagccctcgctcggaatgttccatcacagcgaactgaatggttttaatctggcagatgaccttattgaagtgtttagaccattggttgatttgtatgtggcaagccattttgacatttcggaggttgatgccgatttgacgccgcagataaagagagggttatttaatataattaactatgatatgtcagtgaaaggagagaagcgcattgtcagcaactgtattgacatgcttgtctacagctatagtggggcgatacagggaaacagaacggacctggaactcccggaattgataccgttgcaggtgcatagctatgaataaatttatgagactgatggtattttttgatttgcctgtcgtaaaggacagggacaggaaagcggcagcaaaatttcgcagatttcttttaaaagacggatatattatggttcagtggtctgtatattcaagattatgtaatggcgcggattcaatcgagacgcacaagcagcgcttaaagcaaaatttgcctcaaaaaggagcggttcgctgtctgatattgtctgaaaagcagtattcatctatagacattcttttgggaacatcgaccttccacgatatggacgagtctacggatttgataaatattttttgaaaaaagaatggtttgaggattaaaaatcataaatgtgacttgtttttttgcatgaaaatccccgtgagtataagtaatcacggggatttttcgttccctattatatcataccaagcgataactgggaacaacaacaataccagcgaacggatatttgatgcgaaattatatcataccaagcgataactgggaacaacaacactggcagggggactggggcaggcgctaccattatatcataccaagcgataactgggaacaacaacaaatgccggaaagaagaacagccagtttgaattatatcataccaagcgataactgggaacaacaacaggcgttattaacggcataatcattcttgtattatatcataccaagcgataactgggaacaacaactgttcaagagaatgcagcggattgcaggtgattatatcataccaagcgataactgggaacaacaacctttctggcagtggtatattaaataattctattatatcataccaagcgataactgggaacaacaactggagcggttattgacataccgtcctgtggattatatcataccaagcgataactgggaacaacaacaagctggatgtaagaaagtattatcccagcattatatcataccaagcgataactgggaacaacaacttgtcctcctgttttctacttctttgcgtaattatatcataccaagcgataactgggaacaacaacagtataatatatacaagcaaaggagggtttattatatcataccaagcgataactgggaacaacaaccctccgctttcttcggacaccatgctggagattatatcataccaagcgataactgggaacaacaacggaagcaaagagacaggggtacaagagccgattatatcataccaagcgataactgggaacaacaactatccctctgctcctgtggcgtgttcgttgattatatcataccaagcgataactgggaacaacaacaagtaccgcccaccaaatctccgacaaaaattatatcataccaagcgataactgggaacaacaactaactgctcaaagctgcttgagcttgatgaattatatcataccaagcgataactgggaacaacaactgtcggaaaacagcagttgaagaacctcttattatatcataccaagcgataactgggaacaacaaccggacaaggactggctttgactgtattgcattatatcataccaagcgataactgggaacaacaacccgtgtcaatgcggttaaaactgcctatgcattatatcataccaagcgataactgggaacaacaactctgcgtgctgatttggcagatattttaaattatatcataccaagcgataactgggaacaacaacacacggcacccaaaatagaacccacggcagattatatcataccaagcgataactgggaacaacaacactgcttgagtatataaaaggcaaaacaccattatatcataccaagcgataactgggaacaacaacgataccgacacttacagagagcgccgtagaattatatcataccaagcgataactgggaacaacaacttgcaaatcgctaaagcgatactctgccagattatatcataccaagcgataactgggaacaacaacaataaatgctaaagaagaggagaatggtgaattatatcataccaagcgataactgggaacaacaacagcttttgataacaaagtttataatcaaaattatatcataccaagcgataactgggaacaacaactgtgggcttccgcatttggtcaacacacgtattatatcataccaagcgataactgggaacaacaacggctggcatcctctacggcggctattttttattatatcataccaagcgataactgggaacaacaactgataattgatgttttatcacattgagtttattatatcataccaagcgataactgggaacaacaacactagcaagggcttattataatgtagccaattatatcataccaagcgataactgggaacaacaaccggttcgttcttggtaggggcgaccgccttattatatcataccaagcgataactgggaacaacaacaggaactggcagtagtggtacttctggcggattatatcataccaagcgataactgggaacaacaactttttgattgcaattattatatttgcaattattatatcataccaagcgataactgggaacaacaactatatctgttatgcggaaaggggagaaaaattatatcataccaagcgataactgggaacaacaacttcttatttctttaatgaccgaacgccaaaattatatcataccaagcgataactgggaacaacaaccaacatgattgctttgtatgagtatatgcgattatatcataccaagcgataactgggaacaacaacttatctggcaagcaatacactttttcgccaattatatcataccaagcgataactgggaacaacaactgtgaacctctcacatctaccagttcccaaattatatcataccaagcgataactgggaacaacaacattttctgctcgtctctccgtttcttcctattatatcataccaagcgataactgggaacaacaacaaagccatcagctataccactacctaaatattatatcataccaagcgataactgggaacaacaactttatatcttcgtgatcggctgcgtcatcaattatatcataccaagcgataactgggaacaacaaccactgcgccagcttgaagcgattgcagctgattatatcataccaagcgataactgggaacaacaacgtggttaggcggtttggaaggtcattctggattatatcataccaagcgataactgggaacaacaacagttggtgcatctgattatgcggttgaaatattatatcataccaagcgataactgggaacaacaactataagagatagattgtcgtcagcacgattattatatcataccaagcgataactgggaacaacaacgcacgaactttttcatccctcgtgcaatttattatatcataccaagcgataactgggaacaacaacatttaatgaaacataaatctctatgacctattatatcataccaagcgataactgggaacaacaacaaattaaaaatataggtttattttaagtaaattatatcataccaagcgataactgggaacaacaacaaaagacatgcaaaaaagacattgaaaaacattatatcataccaagcgataactgggaacaacaactgttttacgtcgagagtaatgactgtttaaattatatcataccaagcgataactgggaacaacaacagaagatggtacaaaggaagtacttgacatattatatcataccaagcgataactgggaacaacaacttacattcgcaagtcatacaaaggtggttgattatatcataccaagcgataactgggaacaacaaccgaaaatctttctttatagcgtttactccaattatatcataccaagcgataactgggaacaacaacttatgatatgttgtttattatggcttcaaaattatatcataccaagcgataactgggaacaacaacacaaagctaaagaaatgggagccaccacagattatatcataccaagcgataactgggaacaacaacactcaatccactttatgagaaaacctatatattatatcataccaagcgataactgggaacaacaacttgcatgggaattgcagacgacgcagaaaaattatatcataccaagcgataactgggaacaacaaccgaaaattcattgatgctctcactcggataattatatcataccaagcgataactgggaacaacaactaacagtaatttatataatatacagaacacattatatcataccaagcgataactgggaacaacaacaactcgttctcttgcttgcggtaatccgaattatatcataccaagcgataactgggaacaacaacctgcatcgttggcgttgccccggcattgttattatatcataccaagcgataactgggaacaacaacatcagaaaaaatagcataaaaaatttaaaattatatcataccaagcgataactgggaacaacaacacagtagcagtgcagaatacatctacacaattatatcataccaagcgataactgggaacaacaacttactgcggcaatatctgcaagactaactattatatcataccaagcgataactgggaacaacaacgcttcgggagtattttcatgggattataacattatatcataccaagcgataactgggaacaacaaccggcgacacagattcgacaggatgtgtcacattatatcataccaagcgataactgggaacaacaactcaggcgagcattaaactctcagcggatgaattatatcataccaagcgataactgggaacaacaacttagtaaaggattttttcacagaatattttattatatcataccaagcgataactgggaacaacaacatccattttggaaaagaatggaaacttataattatatcataccaagcgataactgggaacaacaacatacggaagtggcaatataggcgattacatattatatcataccaagcgataactgggaacaacaaccggcgagtacatcgacaaggcaatgactgaattatatcataccaagcgataactgggaacaacaactggctatcaatcctcgacaagtatgtatctattatatcataccaagcgataactgggaacaacaaccattgatcggagccttgaaaatatttgcaaattatatcataccaagcgataactgggaacaacaacacctctgatacggctttatcaggttttgcattatatcataccaagcgataactgggaacaacaacaaccgcagcatcttaatataatgtagtcaattatatcataccaagcgataactgggaacaacaacaattgctttcctgtcatcccaacagacacaattatatcataccaagcgataactgggaacaacaaccttctttgcaccaaccgcttcctgaagcctattatatcataccaagcgataactgggaacaacaactgaaccctgatacggtacttgccgtttacaattatatcataccaagcgataactgggaacaacaacaacgctatgcggatgaagtccttaccaacaattatatcataccaagcgataactgggaacaacaacatatctgtcctgtctgtgctgccgtaaataattatatcataccaagcgataactgggaacaacaactgagaaaaacgagggcgagaaaatcgcctaattatatcataccaagcgataactgggaacaacaacaacaagccacctgctgagggctgttatagtattatatcataccaagcgataactgggaacaacaacccgcattgatgatggcggttctatctgttgattatatcataccaagcgataactgggaacaacaactatcaagcttcttgcttattgcctgcaatattatatcataccaagcgataactgggaacaacaactaaaaagtacaacgaaattatgaacgatatattatatcataccaagcgataactgggaacaacaacagcgtgcgctaaatatcatatagacaacctattatatcataccaagcgataactgggaacaacaactgctcgggctaatgattgggaatggttttcattatatcataccaagcgataactgggaacaacaacaggaacgggcagtaaccgtccttctggcggattatatcataccaagcgataactgggaacaacaaccaaaaagtcaccatacgttacattctccatattatatcataccaagcgataactgggaacaacaactcgctatgcctatggcaaagggtatggatgattatatcataccaagcgataactgggaacaacaacagcagcaattataactattgcaagcgtattattatatcataccaagcgataactgggaacaacaactagcggtgtatatggtaaatcttatgtagtattatatcataccaagcgataactgggaacaacaacaaccctcgataaaatccaaaaagcctgtgcattatatcataccaagcgataactgggaacaacaactcatggtgttctgcaatgcgcaagtgttctattatatcataccaagcgataactgggaacaacaaccggaacgggcgtcacaactattccggagaattatatcataccaagcgataactgggaacaacaaccggcgtgttgctatataaaaactgggacaattatatcataccaagcgataactgggaacaacaactcttccctctgccatgcctgcacctcttaaattatatcataccaagcgataactgggaacaacaacccagcccgaaaagaatttcgaaacatcaaattatatcataccaagcgataactgggaacaacaacactattaaagtcaataatcgtttaatagtattatatcataccaagcgataactgggaacaacaactgcaagggcgaatgattgggaatggttttgattatatcataccaagcgataactgggaacaacaaccaccgccagaaatgacactttcacagtggattatatcataccaagcgataactgggaacaacaacacgtggcagaagaagaagtggaggaatttattatatcataccaagcgataactgggaacaacaacaataggcgatttccttaacacttttgtccgattatatcataccaagcgataactgggaacaacaactgctcgggcgaatgattgggaatggttttcattatatcataccaagcgataactgggaacaacaactgtgtcggtttccacaaagtcaatgtctgattatatcataccaagcgataactgggaacaacaaccctgcgcaagtggcttgtgttcattgtagattatatcataccaagcgataactgggaacaacaacacaatcttctatgtatgaacttgtatctctattatatcataccaagcgataactgggaacaacaacgtgcggcaaggttatcgcacaatggaaggaattatatcataccaagcgataactgggaacaacaacttgcgtcaacgtcctcacacaggatacaatattatatcataccaagcgataactgggaacaacaaccttggcttatattcttgatacaataatgcgattatatcataccaagcgataactgggaacaacaaccaagaacctgttttgctgtcttttcatcgaattatatcataccaagcaattacctcctcccatgcttcggtggactcaagatgagcaatataccacagattgagaagaatactaccaggattggaacaatgtgaagcaccagaaatactgcggcggcaatcaaagcaataagaattaaaataataatcaagataatcatttgtcgggtctccttgaaagtgaaaacagtgattttatgattttttttgattatatatcattgcgctgtgattgtgaacaataattttgcaaaaatataacaattaagctgatattgaagttttggaaaattggaattattattcaaatagactatccaagaaaaatatacaagaaaactatttaataattgaatcctgccattgactaagcaaaaatatcttcctacaattaaatagagaaaattggaggaatgccagaggataaaaacaacataacatcataaggatagaagaaagacaagctgattagaaatattgatgtagctgctgtatattatgcgaaattggaagctaaccttaaaaaattctaggctgaagcatttattaaaataataggaacttataagaaaaagcctttaaataaaaagagctttaaagatagacgcaaatttttgaattttaaatagattacctatttgaagtaattaactatttaaaccaatataaaggaggcaaactttatgaaaaaaatccgcttgacctacaatgccccggttacactcacatttgtgctgctgtgtttttcggcaacgctgctaaattatatgacacaaggggcgagcaatgcgcttttgtttatgacgtatcattcgtcgctcaccaatccactgacgtatctgcggttcttcacgcatgtgcttggacatagcgggtgggtgcattttataggaaatgcctcatatctgctattgcttggacctatgcttgaggagaagcatggtggggacaatattttgaagatcattcttgtcacagcgcttgtgacgggacttataaattatatattttttccgcgggttgcactctgcggtgcgagtggagtggtgttcgcgtttatattgttgacatcgtttacgagctttagggagggggaaattcctatcagttttgtgcttgtagcaatgatttaccttggtcagcaggtgtatgatggtatatttctggatgacaatatatctaatatggcacatatcgccgggggaattgtaggttcaatcacaggatacaaatttaacaagagaagttaacaatagcgtttgcaattaaagacaaatgtctgcgaagcagagattagtgcttgcagttataacagatgtgcttataatgcttatagtctaagaacctgtgtttttactataaacgctaatgcctgcaaaaccagttatgttcctgcgtaacaatcgtcagtgaccacaatgcaatt

SEQ ID NO: 3898 - DNA, 12409 bp, synthetic construct
  misc_feature 1..12409: note = Synthetic
  source 1..12409: mol_type = other DNA
tgatgctgtctctttctgtgtgaaagcttttgaagaccgctgggatgttttaaaaactctggatccaggtaataaggaaagatttgcttatgcagaccatctgatccacacaacaaaaacaaacactgccgtcttcaaagagtttgatcagaagttccataagatgccatcctatcttcgattcgcggtgatcaatacagcattgggatacttaagttcttaccattcaaatcttacaaactgggagaacaataagtcgaaagggaaacagccgtctttccagttccgtctcaataaactgccagttttctacaaggataatatgtacagatcgggagaaaaaccggataccatcagactgaaggtgttcgtaaacaatgactggaactgggttaccgtatccttaaaacacactgacgtagtgaatatccgtaaccacaggaaagatgggaagatttccgctccgatgctggaaaagaagaataagaaatggttccttcgttttgcgtttgaaggacaggcaaagttaaatgacacaaaactggaagaacgacgcatccttgcggtagacctgggtgtcaataccgacgctgtttgttcagtcatgacaaaagacggtactatccatgcgagaaggttcatcaatttcgcaggtgacaaagaccggatttatcatacactgaacaagatcaaaaaggtacaaaaatattcaggatcacagaacacgaaaaagctgtggcggtacgcaagattccataacgatgaattagcccagaaagttgcgtcgaagatcgcagaaaccgcaattgagtaccagtgtgacgtcatcgttttcgagcacctggacacaaaaggaaagaaaaagggttccaagaagcagaagttacagatgtggcaaaagaatatgatacagaaggttgtggaacaaaaagcgcataaggacggtatccgtatctcacacatctgtgcatgggggacttcgaaactggcatatgacggatcggggtatgtgctccggggaacagaggcagggaacagatcttattccatctgccagttcccgaatggaaagacctataactgtgacctgtctgcttcatacaatatcggagccaggtacttcatccgggaaatacaacaaaaccagtctgtgaagaactggtctgtcattacggcaaaagttccggaatgtcagaagagaacacaatgcacttacaataccctgttaaagatcaatgatctagaccgggcagcgtaaacagcagattcatctcatctgcgacttagtctctgtgtggtaagtatcttccgaaaggaaataccggctaagcagagaccgtatgtgtagacgagtacgttgtctcaattaaatcagacaatagaatcccctgagctttagatcaggggagtgttcaacgttgcttccatatgtattgccggatgaatttgaaaatataggtaacaaaatgctggagtacggtccacgcattggtgacgacttcacaagaatcggacagatggcattaacatcggaaatccgtgcaaaacttatcaatttaaaaggatttgagttttctttcagaggcgatgaaacattttcgaaagaacgtgtgcattttttggaacagatgattgagagacaaataactggacttctatcgaaagaacagttgtatacgaaagacgtttttgttccagaacaagcaaaagaaatacagcctgttaatagcgatgtaggattaaactcagctgctgatgaccttgctgataatctacaagacgttcttccggatgcattggtgtcagaaatgaatgattcttctgatgattttgttatcgtatcgttaaacgaagctgtagagatctatatttcggtttcagatttttcggttgaaatctatgttggaggacaattagcagacgaatcaagtttaacagaagaagaacgaatggactatacaaaaatatgtcaagctgtggatgattttgaacttgaatacgctaactttgatgacttggcacgataatcaatatgttaatattctacttatgcaaagagactgactttgaagttggtctctttctttttgtttccgtatgttttgtgtgcgtcagttttatcccatatttagaataacaaacaatacacacattaaaaggaggaaacaaaaagatgggagagatattggatttctacaaagaacacaaagtagatggtatcaatatgaatgttatacggttcattgatgaggtttcaagttttccagatcgagatggaatacctggagaacatattgatcatttgttttgtgccggatattgctattattttgctcatatgttagaaatggcatttggtggcaaagtatgttggattcaggatagaggacatattgcatgggctgattgcgacaaagattgcacattagaacaattacaaaacgcaattgtatatgatattactggaattgcagatgattacgaaagagtatggccaatagaatatcttggaaatgcaatcgtaaattacatgcataatggaaaagaatttcatctcagtcaggatttcaaagattggtgcgatttctgtaaagttgaagaaatattcgcgattaatgtaatctggggatgcatgccaattgatgaaatcatgaatgattacaaaaatagacttgattatgttcagactgcataccagtattggatagagcatagcacggaatttcaggagttgtttcgattcattaagaaaaagaacccgttcctgtatccagatcatcttggtataacagaaacacttatcaaatctgaaaactaaaatgagaaaaggaagtcagctatattggttgactttctttttgtttctgtatgttttgtgtgcatcagttttatcccatatttaggataacaaacaaattgcacacataaaaaaggaggaaacgaaaagatgggaagttggaacgaaacatgtatgttaagtcatttacagattatgtatggagattctgtaaaagtaattattttggtaaacaacaaggcagatgcaaatgaatctactcgtgtttactacaatgaaacctattctccattgatattacctttcgatgcggaatatgacgattatggtggcgttaaaaacgagaaaattcctgaatacacagacagtctgttacatgagttagaattcgagcaaaaagatggaacgaaatatgaatataacaacatggcagattttattcaggatattaatgagacggatggcttgtacctaaaaggtttctatctcaatggtccgaaaaaacttgaatgtgtttttattcatgccgagctctatgatattttagcttcagaaatgagaaacagaataccatataaccaaaagaagaccctgtatgaattatacaatgaacggaaccaggaagtgaaagaactatggatcaagtaccatagtaattctgatgagtatgataaattatgcatattataccacgaaatcatgccaaaacttttcaaaacgtctgcatatggatatgagtttgctgtcatgattttagaaaaatcattaaccgaaaacaattttgatgatttctttgaagaatttacaaaatacatcctgtttgcaagagcattacaaaccggtagatacggatatataacaagatgtggatctggtggacaagattttgagtgttccattcaggttgcggttgccaaatttgttttgaaattctcgaagagaacaaatgaatgcggggatcgtgtatattgtaaaaaggaaacaattttctggtactaaaagcggcaatgaaaagattagagactgacttttgttggtctcttttttttttactatatctataagtgatacgagcagcctgttcctgaaggttgtaatagcatttatattccattgttcggaaccagaaatcgtatcaaaacttgcgtcggttcctgaaggttgtaatagcatttatattccattgttcggaaccgaaaaagtatcaaaacctcttattaatgtcagttttcgtatcccttctttgtgtgcgattaactcggcacatatttagtgtatcaaaataattcacacattaaaggaggatacaaaaagtatgaacaaagaagaagtaacaaaacagatgcaggacattatcaaccagatgaatgaggcatccgctgtctacggaaaagatgcaatcatgactgatcataaatgggatgacctgtataatcagttaacagacttggaagaggaatccggtattattcttccagaaagcccgactcagagtgtaggagcagaggaggaagaagatattccgggtgaaaaagtagaacatgagttttcggcactgtctcttgcgaaaaacaaggatattaagaaacatatcaaatgggcccagggtcgtaaatgtttcgtttcttggaaggaagacgggatgaccttggtggttacatatgataatggaaatcttacccgtattgtaacaagaggtgacggatatgttggtacagatatcacgcgtttgaaagatgttatcaaaggaatcttaccaaagatcgactacaaaggacatctggttgtaagaggagaatgcgttatttcttatccggatttcaagcgtgtaaatgaatcactaccagcaggtgtaaaactgtatgataattctcgtaatcttgtaagtggtactttgaagctttcagatgaggaggttatcaaagaccgtaatccacagtttattgcgtttactttgcggtatctggatgatgaatccgtattagatgcagttggacttcgaaattcatgggaaacaaggcagttattcttaaagaaacttgggttcaacattgtttcttacaaacctgttgaacatccggaaaccgatttacagtctgttattgatgaatttacagccgaagttgagcagtacgaagtgcctgttgatggtcttgtactctgctatgaagactgggattattcgttaacaggtggcgttaccggacatcacgcaaccagagcaggttatgcctttaaatggccggacgaagcagtagaaacaaaagtggttgatattgaatggtccgactcaagaacgggcttatttaatccggttgctatctttgaaccagttcgtctttgtggaacaacggtaacccgtgcttcgttatcaaatctttccaccgtaaagaaaaaagacatcaaaatcggagatagaatcaccgtttataaagcaaacatgattattccgtgcgtagaagataataaggatgccgatgttcaagatacggatgattggaatttcatttgcgaacgtcacaatatccctaaaatctgtccacattgcggaagacctcttactgttaaaacatcacaaaatgcagaacttgttatctgcttgaatcctgactgttccgcaaaactgattggaagtatggctcatttttgtgaacgtgattgtatgaacatcaatggtgtttccgaaaagaaattgcaacagctcattgatcttggcgttattgaaagtatttccgatcttgtagatctcccaatgagataccatgcgagcggaaacaatctgatcttcgttgatgaattcggtgatgactgtaatttggcaaaccagacaggatggggcgaaggatctgtgttaaatcttgtaaccgggattgagacagcatgtaaaaatgcgacctttataaagtttcttcatgctatgggtattcctaattttggtcgcggacaggcgaaactgttagctcctgtggttacgaaatggatgaaacaaaatgaagatgccacggatatgttgtttgcgtctaaaacggacatgttatatgcgcttggttgtatggtagaaaacggatatgacttcacaaccgtagacggtttcggcgatgttattgctagttcattgacaacctgggttcagaagaatctggtgccttatgttgatggtgttatgaatgaaactggacgtatcttacagtgtcttacgtttacagacaagccggaagactacattaaggaaacatcaggatctccagttgatggtaagacttttgtagttactggagatgttcacatctttaagaatcgcaaagaagtggaaacaaagattgaagaactcggtggtaagttatcaggctccgtttccaaaaagacagattacctgatcaataacgacatcgaaagtaccagcagcaagaaccagaaagcgaaaacgctgggaatcccgattattacagaagaacagttctgcgaaatgatcggaatgcagtattaattaacaaaagagagaccgtttacctttattggtggcggtttcttttattttgtattcctttgtaaattggtcacccatatttaggataacaacaaaagagaagaaaacttggtcattgtcggatatcagcatttacgattgctcacccaactgttatagaccctggttatttccgggttgcgtataccttggattagaaaaccagtctctgtaataaagtttaacacagtgtttttgctgtatttatatggagagactaagaaaactcagctctccaaatccagcacattacaaaacatgtgtacttgatactgtgaagtttacaacccttactcgttcactcgggtaagggtaatcttctgcctttaggtagaagatttgaactctgcactccaagagtaagatcatctgtctttgtttcctcggaaaatctgtactctgtaaatacaatattatcattttcctgacgagtttttcagattgtgaaccttgttataagtgttgtaatgaaaacaagaacaaacagaaaggacgaaaactttatggaaaatggatttacgtatcgattaggattagacattggtatcgcttctgttggtgctgccgttgtacagacaaatagttttgataacccatgtcatcttacggaaccggatgttcggaaatttactgctgcagagtgcagagagaatgggaaaaataatgggaaatcagcagcagtaccaagaagagaatgcagatcgactcgtagacgcattaaaagaaaacaacttcgaatgaattgtatcaaacagacattgcagaaggcaggtcttattgatgttgatgagtttatgaaacggtattctgatggaacacttccaaacgtataccagttgcgatacgaaggattagatcgcctgttgatagatgatgaatttgctcagattcttattcatattgcaaagcacagagggttcctgtcaacaagacgggctgacaagaaagacaaagaatccggagctatcctcgcagcgacgtccgcaaaccagaaacttatgatggaaaaaggatatcgaacagttggcgaaatgatgtatctggatgagagttttcatacactgtgttccagtaatgaacagggatttattgtaactccgagaaacaaagcaaaagattacaaacatacgatctatcggtcaatgttggttgatgaggttcatgcactttttgatgcccagcgtaagcttggaaacacaaaagcaaccgaaacattagaatctgaatatcttgatatcatgacgagacagagaagttatgatttaggtccagggttgcaggctgatggaaccaaaagtccgtttgcgatggatggatataagagtaatgccggagaatgtactttttataaagaggaaacagagttagaacgtattaatcgaatcgaagatactgttttcgtttctatggaatttacgctttcttatacagactgcctgaaagctcggattaaaacgttatcggaaaccgaaaagagagatttgtttgatgaagttggagaacttcttacgtcatataaaacagatgcagccagaatcgagaagctttcgaatcttggtttaacgccagaagaagttgatcgtttgcttgatctaaatccaaaaggttatgccaaattatcacacaaagcgatgaaagagatcgaaccatatctgaaacaaggtcttacttatgacaaagcgtgtgctgcagccggtctcgattttcaggtaacctatactggagagaaaatgaagtatctcaaaggtcctgagatcaatcgtatcatcaataatattcagagtccggtagtaagacgttccgtagcccagacggtcagagtgattaatgcgatcattcgtaaatatggaagtccgcaggctgtgaatgtcgagttatcgagagagatgtcaaaatcattcttggaacgaaagaaagcagaaacagcgatggaattaagacataaagaaaacgtgaagttctgtgaagagattaaaaaacttggtataaacagtccgaacggagaagatatcacgagatatcggttatggagagatcaaaatggtatttgtctgtattccggcgaaaagattccggcaagagctatgttttctaaagaatatgagatcgatcatatcattccgtatagcatttctcttgatgatcgttatcagaataaagtgttagtaaaagcaggcgaaaactggaaaaaaggaaaccgtttaccatacgagtatttcggtcatgataaaacaagatgggctgcctacgaaaacagagttgaatctttaatcaagagtgatggtaaaaaggcgcatctgttgaagaagaattacacaaaggaagaccagagagagtttaccgaaagaaacttaaacgacacaagatatgcaacaactgttgtttacaatatgatcatgcagtatctctatttggaaccttataactgtgacgggaaaacgaagcaggtatatgccgtgaacggtgctgttaccgcttatttaagaaaacgctgggggctcaataaaaaagatagaacgaatgacagacaccatgcgatggacgccgtagtaattgcctgctgtacagatgaaataattgctaaggttacgaaatatatgcaggatagagaaacggcgtatagtaagaatttccgcattaccgatgaggaaaccggagaaatcttaaccagatcgaattttacgagagaacaatacgatgaaacctatggagtccgttttccaatcccatgggagacattccgagaggaaatcgatcttcgtatattcaatgacgatccgtttggttatcttatgaaagaccgaaatttacagatcaagatcgattaccctgattggatgtatggggaagaagaaagtccggttgcgaaaggaaaatacatcaattacattcgacctatgtttgtttccgtagcatgcagtcataaagcgacaggacaggctcatgaggaaacgatccgaagtgcaaaatatcatgattccgacagtcttgtaatctctaagaaagctttaaaagatctgaaattgaacaaagacaacgaaatcaaggactattacaacaaggaatgtgatcctctactctatgaagcgcttagaaaccgattattggaatacggcggagacggaaagaaagcgtttgttgaagaatttcataaaccaaaagcagacggaacagatggaccggttgtcaaaagtgtaaaagttattgagaaaaagacgacgggagttcaaattaatcatggtcttgctggaaacggaaatatggtacgagttgacttataccaaaaagatggtaaatattatgccgtcccgatttatatttctgatatggtgaaaaaagagatcccaagaaaagcggcgacaggcggaaaacagtacaaagattggcgtgtaatggatcctgatgattttctgtttagtgtatatccgagagatttacttcatttaaagaaagggaagcctttcaacgatggactttcgaatgatatctatatgtattttgcaggacttgatccagcttctgctagttttgcagttaccgctcatgacagcagtatcagtttacgaggtattggaattcaaaacttggaactgattgaaaaatgtcaggttgatatgcttggagaaatccacgtttgtaaacgatagggaaaacaagaaaccggttatcattcaattatggtagccggtttatttcatatttaagataacgaaataattcaataattaaaggaggactcaaaaatgagtaaacaagttaaaggtacaagctcatccgactttgggtgggcttatctttttcagatacggatacaaaaaaaaatcgggaacgagtgataacccattccctacaaaactaaagttttaatcgtattattataataacataattcgttcatatcgtcaacaacttttcactaattcgagtatatagcaagatgaattaatagcggtttttatgcctacttctggatactaatgtcgtattcctgtgttttgaacttgtccatatttagaatagcaacaaatatggaaaggaatagggatttattatgagttgggaaagaacagactacgatgaacagtcaccttgtgcttgcggaaaaggtaaaatcatcaaacatagttattatgaagatgatgattgggggagaaatcgaagtggatttacaggtatagaaatacagtgttctgattgtaaagctaagtatcattatgatagcataacgaggcactattcgtgtccttcttgggaaggtaatggtttttatacgaaagaatatcttgttccaaaagagttaaaaatccctacagttatcacagcaaaaactatttttggctcaggctttgaagaagatattgtttgctgtttaacaaaaaaggatctcgaagatgctgtgatagacatgcaattaaacaaatattctacaagagttcaaaaagatcaaagtagaaaaattatagatatttgcaataaaagaattcatgttcgatcattaaagagaattatcccaattttacaggagataattgcaaactatgaacaatatgaatggaatcctgtaactatagctgagtataaacaaaaagaagcagatgaaattgctaaaaacgaaagcaatattgcagatgtaatctcaaaatcttatgaattacatttttcacggtaattaagcaaccgctatctgtaactgataattaagaatttttatttagaagaaagtaggtaattgattatggaatccgtgtttacaattaaagacttaatatcagatgcaaggacagcattagaagcaggatcttatttttctgctctttctttaacttttgccattatagctgagtgtgcaaatatagcataccctgacgaatggtttgataaaaatgcagatacagatgaatatttacaaaagaaatttccgtcacactataataaaaatggtaaatataattgtcaaaatcatgatagggaaaggtttcaaatgtggattgacgattgggaaaatgatcatagttgtgataaatcattgaaatcacaaatgaaagagtatgctgagaaaaatgaagaagaacgaaaaacagaaaatggatcgttaccaataatagatggcgaattattatatcaattacgttgttctctttttcacaatgcatcttctgatgtggaatttagtaattcaaagaaaatttctgatgaatgcaattcaaaaatattgcaagataattttgaattaattcttgatgattgtaatttatctaagggtgtatacagtgccgattcatccgatgaactgtcaatgagtcttagcgttaattacattatttgtcattatattcatcttgttgaattatttgtagaagataatagaaataaatcatttccaacaatcaaagtttatgacaatagaaaattaaatccagaaagaaatttcagtcacagtagttaaccttataaagaaccgataggagtcgattactagtagaaataaggtagtataccgcaaagctctaagttcgcccgtttttggtgggattatcttttatccaaaaacaaagatacatgatatgtgttttacataaactttgtatctttgtgacgagttttcaaatttttgagccttattgtaaatgtaaaacaagaaacaatatgtgaaaggatggtatataacatgacaatacagacaatttcgaaagaagatgaaaacgtaaccgtagagttaagtgcagatgatttggttatgatttgtaacgcattgtacttgcattcgaaagagcaggatttgcagtcgaaagagcagaaaacgaatgatcatttcttgcagctatacagcgacatgatgatagctcgtgatctgtgtcagtacggccatgtggataatttctgtctacgaaatgtcgtagcatgccgcaacgatatcggaaaagggatcggtgtcgtgttgtcagaaaaggactaactactttcagtaaggcgtttgcagcagtctttgtttcaagtaattacagagtattgtagatcagataggagtataattatatgattttatttattttactagccattggattcgcattgtatactatttt

SEQ ID NO: 3899 - DNA, 9961 bp, synthetic construct
  misc_feature 1..9961: note = Synthetic
  source 1..9961: mol_type = other DNA
gcaggggcggtgggagcagctactcgaaagtatgcagaaatggtaccgttccctgcccaaatatacgatggtgacaaagaaattcccggtatgcggggaaaaggcgcagcaattccgcaatttgttaaaacgcagccagcaaaaccccagggaactcctgtttgagcaaatcccggaaattatggcgggtaaggaagaggggcaaagccttccccatacggcagacgcgttgcttcatgtgaaagcgtccatggaacaggtattttctaacctgcaaaagtctgtaatagaagatatatgtaagatatatggcggaaaaatgcaggaaagtttgaagggatgcctgatttcctggtaccaagggcagcaggcggtggagacagagtatattttcaaaaaggaggcgtatggcttcctgaaatatttggggcagttagaggaaaatgacgagttggaaattgtttccaggctttcaaggattgttatggggatttccatggaagactggaatgaccatacgccggagcaattccgcgaaaaaatggaagctatcaaaaaagaagtggaaggggcggtaaaccgcagtcaggaaactgggaaacggacaattatactgctggatgagcaggggcgccatattaagcgcagttacgaagcgggggctttgggaagtaccagtaattttttgaagaatatgattgacgaggcaatggaagattttgaagatactttggagactagccagaaagttgcggttttggcggaagtgctgcaagggttattggaataagggggtgggacatggaagggtttttatattttgacaatgcgtcaaccacatacccgaaaccagagcctgtttaccaggcgatggaggatgcgaacaggcgccttgcagtaaatgcagggagggggtcttattgcctggcaaaggaggccttccaactgatagaggcgaccagggaggaaatctgccggatggtaaatgggaatcctatagcggaggcggtgcttacgccttccgccacgattgcctgcaatcaggtattgggcggcattgggtggaagcatgaggatgtggtttatgtaacgccgtttgagcataatgcggttatgcgggtgctgttccatttgcagaagacgtatggctttacggtagaggagcttgccgtccatccagaatctttagagatggataaagagaaaataaaatatcaatttttgaaaaacccgcccacggcgctggtgatggcccatgtaagcaatgtgacaggatatgccattccttgggaggaaatagcaaaacttgcagaaagcagccatcccaccgtgattgtggatggatcccaggcattggggcttttgcccgtccagctaaaaaaccaaaatgtagacttttatatttttgcagggcataagacgttgtatgggcctttgggaattgggggatatgtgaataaccgtgggaagcggttaaatccagtgctgtttggcgggacagggagcgattctttaaacatggaacttgatttaggggatgtcaaaggatacgagccagggagcatgaatattgtatctgccgcagggctttatgcggcaatcagggatttgccccaagcagagatggtaaggaggcttcaagaggaacaaaggctccgtagctggctggcggggcaattgggccgcataccaggagttattttgtaccctcctgtaagccacggggccacagggatcttgtcattgaatatagaggggtaccaggcgcaggatgttggagccttgctggatgaagaataccatattgcagtacgcactggttaccattgcgcgccattagtgcataagtatttgaaagatagggagtatggagggactgtgcgggtaagcctggggcgttttactacagaaaaggaactggggcaattgataggggctttggaagagattgccatggatcgataaagcgggagggacaaaagggtggaagaaatcagcaagcaattattacaggacatgacgttccaagtattgcatatggagcgtaaaaatctacgaagcaaagccaaaaatgaccagaagatgtctgaggaattgcaaaaagtaattgtggattatgcaaagaggaagtgttgggcgaaaggccagtaatggcagggtaaaggagaaggtatgcgctttgagagtattgcattgcataattttatgcggtataagggagaaaacaggatagaattcagttgtgaagaggggaaaaatgtgactgttatcttaggggacaatactgtggggaagactacggtcgcccaggcattccgctggtgtttgtatggggctgtgctgacagaacggggaaaacgccaggaagactaccagcttttaaattcagacacattggagctgatgaatgctgacagcagggcaaaggtatgggtggaactggttgccatagatgaagagaaacgctatgccatccgaagggaaattgtctatacccgggcattcccaagcttgatggcagaagaattccagaaaaaactgacaatgcatatttccgatatttgcagcagccagccgttggttgaggtagaggaacggaaagtggatgagttaatcaatgaattgttcccaaggaatttatcccattatttcttgtttgacggcgagcggtggagtgacattgcaattaatggggtaagggaaaatatcaaggattccgtacatattttgacaggcttgtctgcataccaggcggcgatgaagcatttaaaggatatgggttcgtattcggttatcagtaaatttaaaaagaaaataacaggttccgggaacttatatgacagcctggcgtccgaatgccaaaaatgtgagcgggcaatacaatcctgtcagaaagagataagaaatatagaagtcaatatcagcaattataagaagaaatgccaggaagtgcaggaatatctggaggcaaaccggaatacggaggcattacaaaaacagtacagggatttggggaccttaaaaaaggctcaggaagaacggtgcgccagcgagcataggatgctggtcaatgaattcagtgacaaagcttatatggcctttgcagggcctatggttcaggcagctatggaattggtaaaggcagtggctggggagcgcagggatatcccgcatatgcggcaggcaaccatagactatattatgaagggcggcaggtgcatatgcggtgccaagctttccccaggaacaaaagagtgggagcgcctgttggaacagaaaaattaccttcctccagccgacattggctcattgctgggggaatttgaacgcaccgctttccggtggaagaatcgggtggaggattttccagaagaggcgcaagaaatggcaagccaaatcgacggctgtgtaaaggaatatgaagaaacctgcaacgaatatgttatgttagggcagcggctggacgcgcatatagattttgcggaacatcgaaataggctcagaaggtatcaagtaggcatacaggagctaggaagccaaaaggggcagatgcaggggaaggctcagtcgtatcaacgccagaaacagcacttagaagaagagatgaagggactggaggcaaggaatgaagaaaaccgccgctggagggaacggctggaactggcagaggcattatataaaaaattgtcccaggattttacgatggaagagaaaaaggtgtttaaggaactgaatgggcagatacagaataattttaggcggatgttcaatgcaaaggagaaaaagatagagctgtcagagaaatatgacattcaaatgtattataaaacggaagttgggtatagggaagagaaaaatctgtctgagggggaaaagattgcaaggaattttgcctttattgtgaccattatggaatacagcaaaaaaaggaaagcagagaaaaatgctggcgccatgcaggaaaatgacacgcttcccattgtactggacagtcccttttccaagcttggggacgagaatatccgtttaattgcaaaagcgctcccagaagtgtcggagcaggtaattatttttatgttgaaaaaggactggggctacacaggtttggacgagtatgttggaaaagcatactatattgagaaagaagcggaaaaatcctatgcgacaattaggaaagcagaggggcggtgacttatggcgtcatttgaattttttaaaaaagagtttgaatttcgtggaaaacatgccaggatggcaggggaattgtggatacaaaatgattatgggcgcacatatttccgtaggttgatagatttgtatattacggcggctgtgatagggttccgggtggacaggaaagcaaaagcagattatgccccaaatgaatcaaaaagtattttcccagaacagatgataggggcaaaagaagacttggattttatcatgcagatgattatgattttagaaaacagtggcaagatggcgccagaggaaagtgtaaaaaaagcctttcggggagtggagacacaggaggaatttgaatattatagagacttattccattcctatgtacggggcggcgtagaagagctgtatgaaaggctcatattgcgcagcccagaattagacgagggggtttatgatgggaaaactgccaatgtaatggctctgctggaaaggtttggggatttttctggcgtttctcctgcaagttgctaagatattgctaagaaataaatacctatcctgacaattatttacaaaatgggacaaaaagagtataatatacccgtattatatcataccaagaaataatatggtttctacaataaggtagaataccgaaaagctctaatcccattcctcggaatgggattatcttttttcttttataggaaaggccttgtaggcgatggttaaaaatatggcagtcccatcaagcttggatggttctgggaaaggggtaaggtatggatttgaattataggattgggttggatataggcattacgtcagtaggatgggcggcgctggagaataatagccaggatgagcctgtgcggattgtggatttaggggtaaggctgtttgaagcggcagaaacgccgaaagggacatccctggcagagccaagaagagaggccaggacaactagaaggcggttgaggcggaggaggcatcggctggatcggataaaatggctgttgcaggaacatggcatcattcagattgggcaatttatggaacgctaccattctgctggcttgccagatgtctaccaattgaggtacgaggcattggggcggaaattaaaagatgaggaatttgcacagatattggtgcatattgcgaagcacaggggattccgttccacccggaaagcagaattaaaagataaaaaggataaagaagcaggggcaattttgtctgccacgcaggataataagaaaataatggaagagcatggctaccgtactgtgggggagatgatatataaggatgagaaatttaggactggctgtgcgtggaatgaaaaaggataccttttaacaccccggaataagcagggagattataagcataccatgctccgggcaatgctggaagaagaagtgaaagttatttttcaatgccagagggagtttgggaaccagaaggcaacaaatgaattggaagaagcataccttgccattatgtccagccagcgttcttttgatatggggcctggaaagcagccagatgggagcgcaagcccctatgccatggaagggtttggggacagggtaggcttgtgcgctttagagccaaaggaaaatcaagaaccgagggcgccaaaggcgtcatatacatcggaactttttgtggcattgcagaaaataaacaaccttcgtattgtggaaaagggcggggcgagctggggctttacacaggaagaacgccaggcgttgtttgatttgctgcataagaaaaaagagataagctatgcagcggttcggaaagaattcaaactgggcttggaatatagatttaatgccctgaactatagcagcaagaaggaaactgaagaagaaagaataaaagaaacagaaaaagcaaaatttatcacgatggcgaatacctatgactatcaaaaaaagatgtcaggcatattggagccgctatcccaagaagaaaaggaaaatttgctggatgaagtgggcagggtccttacgttatataaaaatgatgacaccagaagccgggagtttcaaaaattggggttggggcaggaagtgatagaaggccttttggaactgaaccccaaaggtttccagcatgtatcatggaaggctatgcgcaagttgatgccgtatttgaaggaagggctaacgtatgataaagcatgtgagaaagccggttatgatttccaagggagcgaacgggaaaagaaaacaaagttgttaaagggtaaggaaatcacagatattatcaatgatattaataatccggtagtaaaacgttcggtttcccaaactgtgaaggtactcaatgccataatacagaaatatggaagccctcaggcaatcaatatagaattagcccgggaaatgtcaaggaattataaagaccgtaaggcaatgcaaaagcaaatggagggaaggcagtcagagaatgagagggcaaaacaggagatccaggaattggggaacgctttcccatctggccaggatatactgaaataccgtttgtggcatgaccagggcggggtttgcctttattctggcaaaaagattccgttaagggaactgtttacaggggcatatgacattgaccatatcctcccttacagcattacctttgacgacagttatcggaataaggtgttagtgacagcagaggagaacaggcagaagggcaaccggatcccatatgaatattttggaaataacccagatagatggagccagtttgaggtacgggtgaattcctatgtaagggattataggaaacagcagaagttattaaaacagaaatttacggaagaagaacgcaaggagtttaagcagcggaacttaaacgacactaaatatattacccgtgtggtttataatatgatacgtgaaaatctggaattggcgccatacagcaggccagagagaaagaagcaggtgtttgcggtgaatggcgcaataacggcatatcttcggaaacgctgggggctggcggcgaaagaccgttccattgacacacatcatgcaatggatgcagtggtgattgcttgctgtacggatggcatggtcacaaaaatttccaggaatatacagggaagggaattgctgtatgccaaagggtatgtggctttggatgtggaaactggggaattaatttccagggacgacttcaccagggatcaatgggacgaggaatttggcgtgcaggtgccaaggccttggaaatattttaaggaagagttggaaattcggatgggggaggacccaagggaatttattgagggccatttggatgttgccagggatcttgactatccagtatggttttatgaggaaaatattatccgccctattttcgtatccaggatgccgaaccggaaagtgactggggcggctcatgcagatacagtccgaagcccaaggcattatggggaaacggattgtgtcttaacgaaaacagcccttgctgacctaaaattggacaagaaaacaggggaaatacagaattattataagccggagagtgacaagctgttataccgtgcattaaaagaacgtttgaatttgtatggcggtgatgcaaaaaaggcatttgaggagccgttttataagccaaaatctgatggatccaaagggaatttggtaaggaaagtgaaaacatatgacaagctgaccttgggggtgcgtgtgaattctaaacaggggatagcagctaatgccaatgggtctatggtccgtgtggatgtattttgcgtagatgggaagtattattttgtgccagtctatgtggcggatgtaataaaaaagaggctgccaactaaggctgtcgtggcacataaaccctatgccaagtggaaagaaatggaagataaagattttgttttcagcctgtattccagggatttaatctcttttaaatccaaaggtgggaaaaaggtaacttgtgtggatgggacatcgaaagtagtaaatgaagaggtagtgtattactatggggcggacatatctacagcaagttttggtggtaaggcacataatggaaaatatgagtatagaggcctgggtattcaaagtttagaatatttaaagaagcatcaggtagatatccttggaaatgtctcagaggtaaggcgggaaaaaagaatgggctttcattaatttaggtatagcatattaggactgctttacatacctaacatttgtgtgttttgcctagcgccatatgcgtaccagagttagccaacttagcatgatatggttgtatatttgctgtaggcttctaagtaagtgaagtgatagcagtggaggagatgtatgggatttcggaatgttaaaattgaaggcagtaggaaacttcggattgaaaaccagcagttggttattgagggtggggcagacataaggattccattggaggatattaatagcattttgatagaaaatcaaacggtaatggtatctgcctatatgctccaaaaatttgcagatttagggatcgctttatatgtctgtaatgagaagcaccttcccaatggcgtattgctgcccatagctaagcatagccgtcactataagctgctaaaatgccagatagaaataaagaagcctttgcagaaacggttatggcagcaaattgtggtgcaaaaagttaggaatcaatctttatgcctaaaattaagtggcagagggggcgaggatgggcttcaaaaaatgtgcaaagaaattcagtctggggataaaacccatgtagaggcgaaagcagcagccttttattttcggcatttatttggttcagaattttccaggaatgatgaacacattgtcaatggggcattaaattatgggtatgccatcgtcagaggcataattgcccgtagcattgtatgctatgggctggaaccttccattggcctttttcaccgaagtgaattaaatagctataatcttgcggatgattttattgagccatttcgcccagttgttgatttgtttgttgcttctaaatttgatatgtcccaagagtctgtcgcattgacgccagaactaaagcgcgggctgtatggaattgtaaattttgaaatgaagataaaaggagaaaaacgtattctgagcaattgtattgacggtatggttgcaagctatagcagcgtactgcagggaaaatgtgatattctgagcttgccagagttgataccgctacaggtacatagttatgaataagtttatgagaatgatagtattttttgacttgccagtaactacttcaaaagataggaaagcagcagcgaagtttcgggactttctactaaaagatgggtaccatatgatgcagttttcagtttatactagagtttgcaatggtacagatgcggtggaaaagcatgaggcaaggttgaatttgaatttgccgtcgagagggtcaatccgtttgctgacaattacggaaaaacaatttgaatctatgcatatattgttaggtgagaagacatttgatgatactggggaatctgtagagttattgaatattttttagaaaaagggtgaaattacataatatttcactgcaaaattgaaagtttttagttgaaagaaatccgcacaaccttactggttatgcggatttttcgttccctattataccataccaagaaataaatgggaactacaactgacgaaaatatgttggatgaaggggcgaaagtataccataccaagcaataaatgggaactacaacgatatgtgcaaggaa

SEQ ID NO: 3900 - DNA, 8947 bp, synthetic construct
  misc_feature 1..8947: note = Synthetic
  source 1..8947: mol_type = other DNA
tcagcgacaaaggctatatgctatgtgcacagccattgatcgagagcacggtggaaatggtgaaatcggttgcaggagaacggcgggatattccgcatatgcggcaggcaacgatcgactatattatcaaaacagggaaatgcatctgtggaaccccgttaaaagaaggttcgcatgagctggaatgtctgttagaacagcgcaattatctcccgccggcagatatcggatcattgctgggtgaattcgaaaagacgggagcacgctggaaaaacagaacggatgggttgtctgaagaattacaggagatggcgcagaaagtggatgacagtattcatgactatgcggagacgtgcaatcagatttcagaactggaacgaaggatggatgaatcaatagactttgcggagaagagacgtttcctgactgcttataaatcggagataagaaatctcagcgtggagaaagggcagtgtaagggacagattgagaattgccggaaggaaattgagaatattgaaaatcagatgcgtgccagagaagcacggagcgaggaaaacagaaaatggcgtgagcgattggaaattgcagagaagctttacaccaagatgaaacaggagtttgaacagaaagagaagaaaacattctgtgagctgaatgaaaatgtacagaagaattttatgcggatgttcaatgccaaagacaagaaaatccagctgacggaacaatatgagatccagatgttgtatcagaccgaacatggatatcgggaggaaaaaaatctttccgaaggagagaaaatcgccagaaattttgcttttattgtgaccgtgatggagtacagtagaaagaaaaaggcagaaaaagctgaaatggaaggggaactgggggatactcttccaatcgtgttagatggacctttctctaaattaggggatgaaaacatcagactgattgcaggggtacttccacaggtttccgagcaggtgattttatttatgctgcagaaagactggaaatatacagggcttgatgcgtatgtgggagcatcttattacatagataaaaaagcggaggaatccttcgcttccattaagagattggagaaactgtaagatggctgattttgagttctttaaaaaggagtttgaattccgtggaaaacatgccaggatggcacaggagctgtggatttcgaatgattatgaacatacctattttaaacgtttgatggatctgtatctggtggcggcagtggttggatttcgggtagatcggaaagcgcaggaggattattcgccgatagaaccgaaaagtattttcccggatcagatgataaaggaaaaggaaaacctcgaattcattatgcagatgatgattatgctggaaaaccgtggaaggctttctgatgaagaatgtgtgaaaaaggcattccgcggaccggaaacggagcgggaatataacgattacaaaaacatgtttaacgattacgtgcgtggaggcgtggaggaactgtatgagcgtctgattgtccggaaggcggagccggaagaccggtaccgggatgataagacggctaatttgatgaatctggtagaaagattttgtgaataaaagaaaagtagaaaaaagacagaaaaagatgtttacaaatgtcgaatgtgtgctataataaagaggaattacaacataccaagtaataacaggttactacaataaggtagtatacctaaaagctctaatcccattcctcaggaatgggattatcttttatccaggcttatcaagcgcgtggaataagcggccattgtccctggaaaaggttcaaggagaaaacaattgttggggaaagaaggtatttcgtatggaaagtaattttaattacagaattggtttggacattggtattacatcggttggctgggcagttttacaggataacagtcaggatgagccagaacgtattgtagacctgggagtccgcatttttgatgtggcagagaatccgaagaatggagatgcactggcgggaccaaggcgggacgcaagatcggtcagaaggagattaagacgcaggcgacacagattagagcggatcaaatggctttttgaagagaatgggctgatcgaggtcgattcttttatggagcgctatcacaaagagcatctgccggatgtctaccaactgcgttatgaagcattggacagaaagttgaaagatgacgaactggcgcaggtgctgttacatatcgcgaagcatcgtgggttccgttcgaccagaaaagcagagacgaaagataaggaaaatggagctgtattaaaagctacgacagaaaatcaaaagttgatgcaggagaaaggataccgcacggtaggcgagatgctgtatttagatgacgcgtttcgcagtgcatgcccatggaatgagagggggtatatcctgactccgagaaataaagcagaaaattatcaacatacgattttaagagcaatgctggtagaagaagtacacgctatttttgcggcacagcgggcacttggaaatgaaaaaacgacggaagagctggaaaagaagtatatagacattatgactagccagaggtcttttgacatgggaccgggaaatcaggcagacggaacaccaagcccgtatgcgatggaaggatttggagaccgggtaggaaaatgcacctttgaaaaggaagaataccgggcaccaaagggaacttatacggcagagctttttgtcgcattacagaaaatcaaccacatcagactgatcgatgaatttggaaccggaagatttctgacagaggaagaacgcagtctggtagtggaacttctgaaaagcagcaaagaagtgaaatacagtgcagtcagaaaaaaattaaagctggatccggctgtaaaatttaacacgcttaattattccgcaaagaaaaaagaagagacggaagaaatgcggataaaaaatacagagaatacgaaatttgtcgggatgccatcttcttatcagtacaaaaaatgtctggaagatagggtgaaggacatgccggagtttgagatggcagagttgtttgatcaggtcggagaggttctgacagcatataaaaatgatgatagcagaacagtcagattggaacagcttggtctgtctacggaggagatcggtggtttgctggaacttattccgtctggctatcagagagtatccttaaaggcaatgagaaagatgctgccttatctggaagcaggcatgatttatgataaggcatgcgcagaagcaggatatgagttcagggcattgaatgacacgcacaaaatgcatcttttaaaaggcgaagcagtcaatgaagttttaaatgacattaccaatcctgtggtaaagcgctcagtttcccagacaatcaaggttattaatgcgattgttttaaaatacggcagtccacaggcggtgaatattgagctggcaagggagatggcgaagaacttcacagaccgcacgaatatgagaaaggatatggagaatcgccagaaagagaatgaaaaggtcaaaaagaagcttcaggaactcggaaaggcgaacccgacgggacaggatattttgaaatatcgtctgtggcaggatcagcagggacggtgcatttattccggaaaggtgatcccgttggaagagttgtttgacggagcttatgacattgaccatattctgccatacagcattacatttgatgacagttaccgcaataaagtgcttgtgacggcgcaggaaaaccgacagaagggaaatcggattccgtatgaatattttggggcagatgagaagcggtggaatgcttatgagagtctggtaaaagcactcatacaggattatagaaagcagcagaaacttctgaaaaaagctttcacagcagaagaacagcaggaattcaaagagcggaacttaaacgatacaaaatatattacgagagtagtttataacctgatccgccagaacttagaacttgcgccgctcaaccgcccggaaaagaagaaacaggtatgggcagtaaacggagcagtgacttcttatctcagaaaaagatggggattgccacagaaagaccgttctacagatacgcatcatgcgatggatgcggttgtaattgcatgctgcacagatggaatgattcataaaatttcccgttatatgaagggaagggaacttcagtatagcagaggattcaagcttgttgatgaggagacaggggaagtctttgagcgggacaacttcagaagggaagagtgggataaggaattcggcgtcagagtaccgctcccatggattacattccgcgatgaactcgatgttcgtatggccaagggagatccggtcaatttcctgaaaacacatccggatgtagaaagagaaattgattatccggcatggatgtatggggaagaagaaagcccgattgaaaaaggacgttttatcacttacatacgtccaatctttgtgtcaagaatgccaaatcataaagtaaccggagctgcacatgacgcaacgatccgcagtgcgagggattataaggagcgcggagtggttatcacgaaaatgccgatcacagagctgaagctgaataaagataatgagatagaaggctattatgataaggacagtgacagactgctttacaatgcgttagtgcgtcagcttgcgctggcaggaaatgatccgaaaaaagcgtttgcaaatgatttccataagccgaaagcagatggtaccgaaggcccgattgtacgaaaggtgaaaatagaaaagaaacagacgtccggagttcttgtccgaaagatggaagtggagcgcagacatcaggaaaaagaagctgaatatacaggaattgcttcgaatggggcaatggtgcggattgacgtgtttcgggagaacggaaaatattattttgttccggtgtatacagcggatgtggtgagaaaggtactgccgaatcgggcggcgactcattcaaagccatattctgagtggcgggtgatggatgatgcaaattttattttcagcctgtatgcgagagatctgatacatgtgaagagtaagaaggatatgaaaacgacattaaataatggtacttcatatttacagaaagaattgtatggctattttacaggagcagatatagcaacggccagtatagcggggatagcaaatgacagcagttttaaattccgtggtcttggaatacagagtctggaaatctttgaaaaatgtcaggtagacattttaggaaatatttcagtggtcagacaggaaaaacgtcagttgtttcactaaaatgtgaagtctgcaggtgtgcaggacattgagaaataaggcgagccgcatttattttaagttgaatgggaggaaaatacgatggcatttcgaaatatcatgattaccggcggtatgaagctacggatcaaagatcagcagcttgtaatcgacaatggaaatgaagtaagtttcccattggaagatgttaactgtattctgattgaaaatcaggcagtaacgttgtcagcgtatttcctccagaaagtggcagactggggtattgcactatatgtctgcgatgagaaacaccttccgaatgcggtgctgcttccgatggtgcggcacagtcgacatttcaaagtgttaaaaagtcagatagaagcgggaaaaccgttacagaagcggttatggcagcagattgtagtgcagaaaattcgaaaccaggcactctgtttaaaactaaccgaaaaagatggctgggaagaacttcttaaaatgtgtaaagaggtacagtctggagaccgtacacacgttgaggcaaaggcagcagctttttattttcgcagtatgtatggactttggttttcaagagggaacgatcatattattaactcggcactaaactatggatacgcggtcattcgaggaatgatcgcaagatccatcgtgtgctatgggctggagccttcgatgggagtttttcattgtagtgaattaaacagctataatctggcagatgatatgatggaaccattcagaccgttagttgatttatatgtatccacacattttgatatttctgaaatagacagcgccctgacaccggagatgaagcgcggactgtttggaattgtcaattatgacatgtcagtgaaaggagatatgcgtattatcagcaattgtattgatctgctcgtttccagcttcagcagtgcccttcagggaaaacggacggaactggatcttccggagctgatagaattgcaggtacacagctatgaataaatttatgagaatcattgtcttttttgatctgccggttgtgtctgcaaaagagaagaaagcggcagcaaaatttcgaaattttctggtgaaagatggctataatatgatccaatggtcagtttattcaagaatctgtaacggcacggattcaatagccatgcacaaacagagattacaacaaaatcttcccgaaaaaggttctgtccgggcacttacgctgacggaaaagcagtttgaatcgattgatattttgctcggtgagaagacttttgcggattcgtcggaatcgacggagcttttgaatattttttgagttacagttcacgtggatatttgcgatatgttttattgctactctattaaattatgtaagggttctttaataaggagtctcccgtcatgtatatttctggcattagataatgagacttcagaagaggataagatgaagcttattcataaagtgtccggattaacgaataatcatctcagaagtaaaatggcgtatggattatattattcaatggtttatgctctattgcattccgaggataaatcattacttaagagcattttacaaacaggtattgataaaggactaaagttttacggaatggacaaggaaaattattatgaaatgacgcatttcacaaggctgtttatttggatgaactgaagcagactgaggaaagagatatgagaagcggtggttacgtgattgaaacgattgaggcagcggtatggtgcctaattaccacagattccttcaaagattgtttgttgaaagtagtaaatatgggacatgatacagataccgtggcagcagttgccggtggacttgccggactgtattatggcgtagatgcaataccgaaagattgtctagatgaggataacacagaaagagaatgttgaagaattgtgtgaaagagcgaaatattttatcttaatggaatttatttcttcctaatttggaatattagttttaagatagatgaaaatggagtataaagcagaaacttgatataaaaggatgtgaatgtttgctatggatataaaagatttaatcggtgaagcaactgaatatgataaaaagcaggtacttgaagaaaagaaaccaaaaagctggtgcaaaagtgttagtgcgtttgcgaatacatttggtggggctttaatttttggaatttccaatgatggacaggttgttggacttaatgatccggaaggtgatgctgaaaaaataagtgaaatcataaaatcaagattaactccgattccggaatttaagcttagattccataaaacggatgatgaaaaggttttggtagtacttgatgtatataaaggagacgaaacgccatattattattcgggagatggagtactggaagcctatgttcgaattggaaatgagagtgtaaaggcaactgcaacagaattaaaacgtcttgtcctcagaggaaagaatacttcctatgattcgcagaattctacctataaggcggaagattatgctttttcaaagcttaaggaaagatataagaagtggaccggaaacagtttcgatgataaagatttgatttcttttggactggtaaatgaacagggaaacttgaccaatgcaggagcgctacttgccgatgaaagtcctattcgttgttcaaggttgttttgtacaagatggaatgggttgaataaaagtggtggtgcagtcgatgcattggacgatgcagagtattcgggcagtgttatttccttgattgaaaatggggaagcgtttatcaaacgtaattgcaaaatgaaatggcgtaaaactgcaaattcgagagaagaaatgccggagtatgtagagagaagttatcacgaagcacttgtaaatgccttggcacatcgtgattatctggtcaatggaagtgaagtccatattgacatatatgatgatagaatggaaatctattctccgggaggaatgccggatggttccgtgattcaggacagagatccgcttacagtaccttctaccagaagaaatccgattcttgcggatgtgttcaacaggcttggatatatggagcgtaaaggtagtggatttggaaagattattagtggatatgaatttcaaattaattatagtgagggtaaaagaccaacatttcgttcagatagatatcagtttactgttgtgatgccgaatttgaactatggtgtcactcaggatgtcactcaagatgtcactcaggatgtcactcaagatgtcactcaagacaaactggatgctcaaattttggacttaattcgtaaagacggtaaaatcaacacagagaaaatggcaattgcattaggtgtaagtacaagaacaattaagcgtcatataaaagaaatggataatgtatgttatgttgggcgtgggttcagtggacactggaaaattacggataaagagtaaagtgtgaagaagtggacattgaaaggtggggatgttatgcttgatgaacttacgaataacaaattatatttgtttacggaacatcttttacttctcaggagaggacaaaattctggactactatagggcttcggctgtagttcccggttattacttggtatgttataatagggaacggaaaaacctgt

SEQ ID NO: 3901 - DNA, 8065 bp, synthetic construct
  source 1..8065: mol_type = other DNA
  misc_feature 1..8065: note = Synthetic
gcatgctcaggcacggcggatcacagccgcgcaaacagtaaggtgcttcgcaccctgcgagacgcagcaggaacgccggggctctctttattctctgtcatgcaatacttcatttatttcatcagatatttccctgaaggaagtccttggacaggccgaagaactcccgcagcatattgttgcgaaggaactggggagacgaaggagccgcgatggcatagacatcggtcagcccctgcttacgtgccagcgcgagagaccgcgtgacatgaaaattgttggtgacgatcgcaaccggagcatccggagaggacatgagggctttgctgtatgctatattctggatcgtgttgcgggcctgatcctctacgatgactcggtctgcggggattccgattttgacaagatattctttcatcccttccccttccggaaatggctcgttggggccctggccgccggtcacgatgcagatggtggagtcattgtccttcatatactgtgcggcggcatccagccggtatttcagcacgacactggggccgtcttcgcggacctgagcgccaaggacgatcaggtagtcaagccctgccggagcgcggctgccgaatccgcgcaggacaaagccttcacagacggcaagcatgaggacaccagcacaggcagcgatgaggagtagagtgcgcagcattttcgggattttttcaaataaatgattgtggagtccgaagccaaggagcaggaagagggcaccgaggccgaaccacacgacaaaaaaggatgtcccgctctggaccatgaggaccatgatcccgtacagggtgcacaggataccgagcgtcatgaatataatgacagaaagtgacatttgtgatgttcctccattgagaaatagcagttcttatcggaagttccgtaaggaatttacgctgaaaggcctgccggctggccgaatcagattcacaggttcgcgaagcggtactcaaaataattctactatgcccgatactcgtaaattgagtcccgggatacgtgctcaaagtgagaacggattcggatgctgaacaatatgtatcaaacagtatacatcaggaagtatgtatcaaacagtatgcatcaggaagaatggaaattcaacggctcattcgtgacaggcagggaacacggaaagaattataagaagccggtataccatatgaagtaagagttctgaggcgttcccgacagagcggcaccaaatgtgcagatcctgtggcagcgcagcagagtggatccatatggcggagcaggcggcaaaagcgggtacgctggaacttctgctcaccggcggagaggtcactctccggcctgattttccggagatctatgaagctgcagcccgaatgggatttgtcctcactgtctataccaacgcgacaatgatcacggagccggtcatggacgtattccggcggcttccgccgcacaggatcggcattaccatgtacggggcttccaacgagacctataaaaagctctgcggagattcccgcgggtatgaccgttttctcgacgggtttcggcaattgcaggagcttccgtccctgctcgatatccgtacgaccgtcgtgcgggataatctgcaggatctgaaagcgatggcggactttacaagagagcgctttggggaagagaaaaagctgcatgttacggcgcatctgtaccccggtacaaggggagcaaaagcagatccccgagtggtacggctcactacagaggagatgttcggcatctgccacggcaatcttgagctgctcaggcgcggtgttgaaagcggcgaactgaatccggcagatgttctttcacccgacaggctcaggaaactggaagcggatctgcggcgcagaggaccggtgccggacggaggatatctgttccggaactgtggagccggaacttcgggaaaatgcgctggatttctgccgggagatcgggagcagcattcccgtcctgcggctttgctgccgacctgaccgggattcggtccgggtacttaaggcggctcttatatagaacggaacggacaggaatatgaacagcaactccggaaaaaaaggaattcatacgagtgatttgttcgaggcgctcattctcatgctcgaagagggccagaaagcgatttttacggtttcaggcatgagcatgtggtcgctcatctgccacgggcgggaccaggtcattgtcaccgcctgtgattccgctgcgcttcacgtcggtgacattattctgtttcggacgcagcttgggaattatatgctccaccggatcacggctcttcggacggatgcttttgagacgaccggagacgggaactgcttccgggatggatggttcccgcgggaatgcgtgagagcgaaagtggtgagtatccggcgcagcgggaagaccatagactgctccgactggaggtggagagttgtcttcgcctgctggcgggtgctttttccggttcgcaagggattgctgcgccttcttctgaggatcaggtagttcattgttgaaaacatacctcggagcataaaatcatcttcaagcgtataaaaggagggcaggggcaagggtaggaagcaaagtgccggaccgaggaaaacccttgcaatcactgacttttgtaagtgccgcaagaacagtcacggttttagtatcaatataacaggacagcttctaaacattcttctgataggtttcatttgaggcaatccagtctgctgaagcatcatggtaggcgctaatatgacatatttcacgttctgatcagtcaactggtgatataacgtgaacctgaggcagccggtcttataaccgcgtatgaacaaggtatcgtcaccttaatggaactgcatggccttgatgtggttgagccttgttgtaatgactatcagccttctgaggtttattcggctttttccttttcgtttgtgcagcagcagagagaaaagtttccttgtaagtatccattccaacgtagattgtgctgtactgtgttcgatgacttccatttgtatgcggtaatctttggtaccatttgttttcaccggtttgtagtatacagataaatccacggagctacaaattattttttgaagtatcagaacagagtaagacattgaagaagtatagtgaaaatagtttgcaataatcattaagtgttgtataatatctgtatcatatcataccaaatgatgataggttactacagtaaggtagaaaaccgaaaagctctaatcccattcctcgtgaatgggattatcttttatagggggatagaatggaaagagttaattatcgtatcggactggatttggggatagcatctgttggctgggcagcaattctgacagatgcaaaaggagaaccaaaacacatcatcgatttgggcgttcgtgttttcgataaggcagaagtgccgaaaactggtgcctctctggcaaccgcgagaagaatggcgcggtcgacaaggcgagtgataagacgtagaagacatcgtttggatagagttaaacttttactgcaaagtgaagggttaatacagttggatgcttttatggagaggtatacgatgaaaggggtcccacacccggatgtatacgagctgcgatgtaaagcgttagatcaacttttgatgccggatgaatttgcacagatattaatacacctcgctaagcatagaggttttaaatctaaccggaaaagtgaaactaaatcgaaagagaatggaaaagtacttgaagccctgaataagaataaagaagtatttgagcaaaagaattatcgaacgataggtgaaatgatctattctgataaaagcttctacacagaagattgttcttcaagagagggttatatttttactccaagaaataaagccgggaattatcagcacatgatacttcgttctatgattgaggaggaagtgcattatatttttgaacgacagcgacagcttggtagtacgtacgcttcaaatgatttcgagaaaaagtatacagaaatattaacatcgcaaagatcatttgatttgggacctgggaagcaggcggatggtaatcccagcccctatgcaattagcggttttggagatcgtgttggtttatgtgaatttgaaaaagacgagaaaagagcaccaagggcaacttttacagcagagttatttgtcgcgcttcaaagaataaacaaccttcgaataagctgcgatgatggttcatacagaaatttgaatgaggaagaaagagaaatcctgcgcaaggagttgttgtcaagaaaagagattacttatacgcgagtgcgctcaatacttggtctatctgaacaacaacgttttaatttgattaattatagtactacagataatagtgcagctagtgttcaaaagactgaaaaagctgcatttattaagatgacatatttttatgcgttttcaaaagtttttggaactaagttcagagaaatgccaccggtagagacacaggacctctatgattcggttgcaacaattcttacggaatacaagaatgatgatagtcgagcagataatttaataaaacttggaataaatagtgaacaaattgatgagcttctatccatgaatccgtccaagtaccagcatttatctataaaagcgatgagaaagatcataccgtttcttatggaaggatttacttatgataaagcctgtgaaagcgcaggatatggttataaaggagataatgctggtaagaagctgcatatcttgaaaggtaaagaaatcactgctgctatcaatgatataacaaatccggttgtaaagagatctgtttcacaggcggtgaaggttctgaatgccataattcttaggtacggctcacctatggcagtaaatattgagctttcaagagaaatggcaaaaacgtacaaagatagagaacagataaaaaaagataatgacagccgatttgctgaaaatgaaaaaataaaagcagaattaaagggtaacggtcttatttcgcccactggacaggatattgttaaatacagattatggcaggagcagaatcatatatgcccgtattcgggcaggacgattccgtacgaggatttgtttaagccggggcttgaaattgatcatatcataccctacagtataacattcgacgatagctatcggaacaaagtgctggtttatgctgaagaaaatcaaaagaaaggaaatagaacgccatacgagtatttatcttcgaaagagattgagtggcagaaattcgttgccagacttaatatctgtacccgtgattataggaagagacaaaagcttctaaaacagcatgtttctgctgctgagaaagctgaattcaaacaaagaaatcttaatgataccaaatacattaccagaatgttttataatttaattagggaatatctggaattggctccaattgaaggcaagaagaagcaagtttgggcagtaaatggtgttgtaactgcttatttaagaaagcggtgggggttctctgtcaaagaccgctcaacagataaacaccatgcgttagatgcggttgttattgcttgctgtactgatagaatgattagaaagatatcaaactattcgcaaggccgagagctgcgatatgcaagaggctttcgatttgtagatgaggaaactggagaggtttttgatcgagataatttcacaagaaatcagtgggatgcaatgtttggtattcgaattccgaagccgtggcaaatgtttacagaggaattggaagtgcgtatgtctgataacccgcgagatgttttacaaaaggatcgggctcttagtagaaagatagactacccttgttggatatataatggtgaacaagtagacggacaggatatcttgagaccgatatttgtatcaagaatgtcaaatcacaaggtttccggtgctgcaaatgaagccactatccgatcaccgagatataaagacgatagaaaaataacgacgaaggttcctcttacacagcttaaattggataaaaagaccggagagattgttgggtacgatgatgatgacaaaaatagtgacaggattttgtatgatgcattgaaaaacagactgattgagtttgacggtaatgcaaaggaagcgttcaaaacagagtttagaaaacctaaaagggatggaacacctgggccggttgtaaagaaagtcaagataacagaaataacggatgcgggtttttgcgtcaatgacggacgtgggtttgtaaaaaacgataaaatggttcgtgttgacatttataataaagctgggaagtattatgtcatcccgatttatgttgcaaacactgttaaaccgggactgcctaatagggctgtcaaagcacatgcacccgaaacagactggcgagttatggatgataaggattttctctttagcctatatcaaaatgatttgttgtatttagaatccaataaaggaattactctttggaaaatcaagaaagatgaaaatggcacagagaataagagggtggtacatagtctgcttgcttactataactccatgaataggaacagtgcagctattgaaggggaaacatctgacggggcttttaagtttgagaatctaggaatacaaaatctaaaaaaactggaaaaacgacaggttgatttattagggtatgtaacaaaagtaggaaaagaacaccgtatgagttttaattgattgagctatgggatatagaaatattattgtggcaaatgcaaagcgactttctgtaaaagatcgtcagctccttatagatgacttttctgtaccagttgaagatatctgtagtttgctgattgagaatcaaaatgcggtgttttccacatataccctgcaatatctggctgaacaaggtgttgttgtctatgtttgtgatactaaacatactccaaatgcagttatgcttccgctgtattctcatagccgtcatctaaaaatgctaaagaaccaaatggaaatcagcaaggtactccaaaagagaatatggcagaaaattgttgttgcaaaacttgagaatcaatcacgatgcctaacttttgtagatgacgctgttggagcaaaacatataaagatgctgcagaaaaaagttctttccggcgattcaaaaaatatagaggcacaagcagctgcatattattttaagagaatttatggaaaacattttgttcggtccagtgaaaatttaacaaatacaatgcttaattacggatacgctataatcaggggaatggtagctagaagtatcgtatgtcatggatatgagccatctttgggtatctttcacaagagtgagctgaacagctttaatctggcagatgattttatggaaccttttcgaccgctggtagacttacgggtttataggttgattcaaacagtcgaagaagagcaaggaatgacgccggatataaagcaggaactgttccgactagtaaattatgatatggaagtatgtaaccaaaagcagattgtatcgaatgctatagaattgtttgtagaaagttatgctaaatcaatgcgtgagaatgcggaaagtatcactccaccagtattgattgagttaaatgaacattcatatgaataagtttatgagattgatgatattctttgatctgccaacaaaaactaaagaagaaaagaaagcagcttctcgttttaggactttcttgaaaaaagacggatattacatgatgcaatggtcggtgtattccagaatatgcaatggaactgatgctgtgaatatgcacaagcgccggttaaaagaaaacttgccaccgtatggttcgatacgaacgttgacattgacagaaaaacagtttgagagcatagatatacttctcggaataagaaatacaaatgaattgacatcaaaagaattaacaagtattttttgagaaaatggaaaaaacactgattatgagtgactatttttcttctttttttgaagtagaaactccccatattactgataaatatggggagtttctaagttcctatcataccataccaaatgatgac

SEQ ID NO: 3902 - DNA, 8058 bp, synthetic construct
  source 1..8058: mol_type = other DNA
  misc_feature 1..8058: note = Synthetic
acagtttctatgagaacgaaaatataataaatatattagaagcgtggtattggtgttccatattttcaggaagatacgataaagaccaaagcgaaaatattatcgaagacatcaatcatgtcttaagtataattaagaatccggaagataagaactggattcaggatatgaaaaaaaatgtgtttcatatgcagggcttttctgataaagagacattgctaatgaaaacaagtgtaattccaaaagcagttgtaagaaagacattatgtcagttttatctggcagaaacatacacggatttaatgacggatgcagagatacaggtgttttcagatgtgtgtgacaaattagaggagcatcatattgttcctgtaggtacattagacagtacatataagggaatggaaaagaaacgcagggatgataaaaagaatgtctttaattctccattaaattttatttatattacaaaagattcaaatcaaaaaatttcaaatcatcaagtagagtattacgttaagtattgtaatgataattcagtttatgatttgcacatcgacattaatggaaaaaggaaattaatgaacccaatttagctgagatacttgaaaaaagatttggaagcgtaaaagcggatgtggaaaaacgtgtgaatatgtatttataggagacagtcaagatgaaagaaatagatgaaagattattgaatacattaaccttcgaagtccttagcgcagaacgcagaaacctcagaagcaaagcattgacagaccagaaaatgtcggaggagatacaaaaaataattattgataacttaagaacaaggtagagacaaaggagagagcagcatgaagtttaaaagcatcacaatggaaaattttatgcgttacaaaggggtaaacacgattgaattcagctgtgatccgggcaaaaacgtgacagtaggtattggggataatatcgtagttggaaaatcgaacgattgcacaggcttttccgcttcgggttatacggagctgtaaatatggagaaatggaaaaatgcagatgactaccagcttttaaataatgatgttctggcgttcatggatgcagacagtaaggcagcggtatccgttacgattgtggctgccgatgaggaaaagcagtatacgatctgccggaaaacaatttacagcagaaattatccacagatgacatgcagggaatttcagaaaaaagtatccatgaagatagcagatcttcaagcaccggatgtggtgacagaagtagatgagaggcaggtggaatatgttataaatgaactatttccaagaaatttatctcattactttctgtttgatggtgagcgttggagtgatgtcacggtcaacggtgtcagagaaaatatcaaagaatccgtacatagtctcactggattatcctcctatcaggcagcacttttacatctgaaagatatgggatctaactctgtcacccgaaaattcaaaagtaaaatcaccggtgatggaatgatgtatgattcgttggaaaatgaccggatgcggatagagcacatgattgaaaaagaacaggagcatgttaagaatattgatattaatataaaaaatttatcaaaagaaatgtgatgagatcgaacaatatctggaagaaaataagagtacagaaatgctgcagggcaagttaaaaaatctgcagattgtgagggaagaacaaaggaaaagggcaaataatcattataaaactttagtgtcacagatcagtgacaaagcctatatgatgttctcacagccgctcattgaagcgtgtgtgaaaatggtgaaagctgttgccggggagagacgggatattccgcatatgcgacagggaacgatcgattacattattaagacaggcagatgtatctgtggcacgccacttacggaaggctcccatgagctggaatgtcttttagaacagagaaattatcttccgcctgccgatatcggatcgctgttaggagaatttgagagaaccggaaatcgttggaaaaaccgtaccgatggaagttatgaagaattaattgaaatggcgcagaatgtggatgacagtgtccacgattacgaagaaacctgtaatcagcttgaaattttgaaccggcagatggatgcgtcatttgatttcgcagaaaaaagaagattgttaagacattaccgctccgaaatggaaaaaacgagtgtggaaaaaggagagtgtacaggaaaaatttcgaactacaaaaaagagattgaaaatattgaaaacaacatgcgcaggcgggaagctgcaaacgaagagaaccgcaagtggagggcacgtctggaagttgcagaagcgctttatgccaagatgaaaaaagaatttgaacagaaagagcggaaaacatttctggaactcaataaaaatgtgcagcttaattttgaaaagatgttcattgcgaaagataaaaagatccagctgaccgaacagtatgaaatacaaatgctttatcagacggagcgtggctaccgggaagaaaaaaattctttccgagggagagaagatcgcccgtaattttgcatttattgtgactgttatggagtacagcagacagaaaaaggcggaaaagcttggagtcagtgaacttgaaggagatacgctgcctatcgtgttggatggtcctttttcaaaactgggagatgaaaatatcaaactgatcgcaggtgtattaccggaagtctcggagcaggtgatccttttatgctgaaaaaagactggaaatataccggtcttgattcttatgtaggcgcggcttactgtattgataaaaaagctgaggaagctttcgcatcgatcagaaaaatggaggaactttaaatggctgattttgagttttttaagaaagagtttgaatttaaaggaaagcatgcaaagatggcacaggaattgtgggtgagagatgacacagaacgtacttattttaagcgactgatcgatctgtatgtggcggcagctgttgttgggtttcgtgtagacagaaaggcagaggaagattattcgccatttgagacaagcagtattttcccggaacagatgttgaaagaaaaggaaaatctggattttatattacagatgatgatcatgctgaattacagaggaacactgacagatgaagagtgtgtgaaaaaagcttttcagggggcacagacgaaggaagaatttgagcagtataaaaagatgttcaatgattatgtccgtggcggtgtggaagaactatacgaacagcttatcatacgaaaggcagatccggatgacaagtttcgtgataacagaacagcaaatctgatggcactgatggaaagatatggtgcagggaaaatgaacgttattccggaaaatgaagatgaaaccgtgagaattcagatttaaaatgaaaaatattgtcaaaaaacaggaaaaagtatttacaaatgtcggaaaaaggattagtataaaggggaattacaacataccaaataataaccggttactacaataaggtagtaaacctaaaagctctaatcccattcttcggaatgggattatcttttacccgtatttattcaagcgtatgaaataaatggcattgtcccgaaagaggttcaatgtagaacggaagtgcaaaaacatttttacatgtaacgttatgtctgtagttgatgaatgcagaacatggaaaggaagggttacttattatggaggaaaaatttcagtacagaatcggattagacatcggaatcacatcggtgggatgggcagttttacagaataacagccaggatgaaccggtacggatcacagatctcggggtaagaatttttgatgtggcagagaatccaaaaaatggtgatgcgttagcagctcccagacgggatgcaaggacaacccgcagaagattgagacggagaagacacagattagagcggattaagtttttattacaggaaaatggattgatcgaaatggattcttttatggagcgctattataagggaaatcttccggatgtctatcagttgcgatatgagggattagatcgtaagttgaaagacgaagaactggcacaggtgctgatccatattgcaaagcaccgcggtttccgctcgaccagaaaggctgagacgaaggaaaaagagggcggagcagtattaaaggcaacgacagagaaccagaagatcatgcaggaaaaaggctatcgcacggttggggagatgctgtatctggatgaagcttttcatacggagtgcctctggaatgaaaaaggatatgtgctgacaccaaggaatcgtccggatgattacaagcacaccattttgcggtcaatgctggtagaggaagtgcatgctatttttgctgcacagcgggcacttggaaatgagaaggcagctgaagaattggaaaatgcgtatgtggagatcatgacgagccagcgttcctttgatatgggaccgggattgcagccggatggaaagccaagcccatatgcgatggaaggattcggcgaccgtgttggaaaatgtacgtttgaaaaagacgaataccgggcaccgaaggcaacctatacagcggaattgtttgttgccctgcagaaaataaatcatacgaagctgatcgatgagtttggaactggcagattttttacagaagaggaaagaaagactataattggtcttttgctttcaagcaaagagttgaaatatggaacgataagaaaaaaattaaacattgatccgtctttaaaattcaacagcttaaattacagtgcaaagaaagagggagagacggaagaagagagagtccgtgataccgagaaagcaaaatttgcaggtatgccgtggacttatgagtattccaaatgcctgaaagaccgaacagaggaaatgcctgttggagagaaggcagacttatttgaccggatcggtgagatactgactgcttataagaatgatgacagcagaagcagccgcctggaagaattgggcttatcaggagaagaaatcgatggattgctggatctttcccctgcaaagtatcagagagtatcgctcaaggcaatgagaaagatgcagccatatttagaagatggtttgatttatgataaagcctgtgaagcagcaggttatgatttccgtgcgttgaatgatggcagcaaaaagcacttattaaaaggggaagaaatcaatgctatcgtaaatgatatcacaaatccggttgtaaaacgctccgtatcgcagacgatcaaagtcatcaatgcgattattcagaaatatggaagtccgcaggcggtcaacattgagctggcaagagagatgtcaaagaactttcaggatcgcacgaatctggaaaaagagatgaaaaagcggcagcaggagaatgagcgtgcaaagcagcagatcatcgaattaggaaaacagaacccgaccggacaggatattttaaaatatcgtttgtggaatgatcagggaggttactgtctgtattccggcaagaaaatcccattggaggaattatttgatggagggtatgatattgaccatattcttccgtacagtatcacatttgacgacagttaccggaataaggtgcttgtgactgcacaggaaaaccggcagaaagggaatcgtaccccatatgaatacttcggagcggatgaaaaacgctgggaagattacgaaacgagcgtccggttacttgtccgggattataagaaacagcagaaattactgaagaagaattttacagaggaagaacgcaaagagtttaaggagagaaacttaaacgataccaagtatattacaagagtagtttataatatgatccgccagaatctggaattggaaccattcaatcatccggaaaagaaaaagcaggtgtgggcagtcaatggagcagtgacatcttacctcagaaaacgctggggactgatgcagaaagaccgttcgactgacagacatcatgcaatggatgcggttgtgatcgcatgctgcacagatgggatgattcataaaatctcaagatatatgcagggcagggaacttgcctatagcagaaatttcaaatttccagatgaggaaacaggagaaatcctgaatcgggacaattttacaagagagcagtgggatgaaaagtttggcgtgaaagtaccacttccatggaattctttccgggatgaattagatattcggttgctgaatgaagatccaaaaaatttcctgctgacacatgcggatgttcagagagagcttgattatccgggctggatgtacggagaagaggaaagcccaatcgaagaaggcaggtatatcaattatatacgaccacttttgtatccagaatgccaaaccataaggtgacaggttcggcacatgatgcaaccataagaagtgcgagagattatgaaacgcgtggtgtggtgataacaaaagttccgttgacggatctgaaactgaataaagacaatgagattgaaggatattatgataaagacagcgacaggcttctttatcaggcattggtaaggcaactgttattgcatggaaatgatggaaagaaagcattcgcggaagattttcataagccgaaagctgacggtacagaaggtccggttgtacgcaaggtgaagattgagaagaaacagacttccggtgttatggttcgtggtgggacaggaattgctgcgaatggtgagatggtgcggattgatgtgttccgggaaaatggaaaatactatttcgtgcctgtgtatacagcggatgtggtacggaaggtgctgccgaacagggcggcaacacacacaaaaccatattcagagtggagagtcatggatgatgccaattttgtttttagtctgtattccagggatttaatccatgtgaagagcaaaaaggatataaaaacaaatctggtaaatggtggattattgctgcagaaagaaatatttgcgtattacaccggggcagatattgcaacggcaagtattgccggttttgcgaatgacagtaattttaaatttagaggacttggaattcagagtctggaaatttttgaaaaatgccaggtagacatcctcggaaatatttccgttgtccgccacgagaaccgccaggaatttcattagaaaaattgagggaaacatatgggatttcgaaatattatgatcagcagtaatatgaaactccgcattcaggatcagcagttagttgtgactgccggggatgaggtgcatattccactggaagatattaactgtattttaattgaaaatcagtcggtcacattatctgcctatctgttacagaaagttgcggatagcggtattgcgctttatgtctgtgatgaaaaacatttgccaaatgcagtgttattgccaatggtgcgacacagccgtcattttaaaattttaaaatatcagatggagacgggaaagccattgcaaaagcgtttgtggcagcaggttgtgatccagaagatacgaaatcaggcactgtgcctgcaattattggagctggatggacatgaggaacttctcagaatgtgtaaggaagtacagtccggcgacaggacacatgtggaagccaaagcggcagcatactatttccgatgtatgtacggacttgggttttcgagaggaaatgatcatattattaactcggcattgaattatggatatgcaatcatccgtggaatgatcgcacgttccatcatatgttacgggttggaaccatcgattggtatctttcatcacagcgagctgaataattataatctggcagatgacatgatcgagccattccggccattggtggatctatatgtttccagtcattttgatatttcagaaatagacagtacattgacaccggaaatgaaaaagggattgtttggaattataaattttgatatgtcagtgaaaggagatatgcgtattgtaagtaactgtattgatatgttgattgcaagttacagcagtgcattacagggaaatccggacagagcttgatctgccggaactgatacagctaca

SEQ ID NO: 3903 - DNA, 7952 bp, synthetic construct
  misc_feature 1..7952: note = Synthetic
  source 1..7952: mol_type = other DNA
tttatgagaattgccacatggaatgttgagcggttaaaacataaggcacagctgcctttaatgcttgagcattgcaggaatgcaaatgcggatatccttgtcctaacggagacggacagccggattcatccgaattacaggcattgctgcaagacgcttcctgcgaaggataccgttcctgatttgtaccgggatacggagaacagggtgtctgtttatacaaactatgggcttgtgcggcagcatgaaacatacgatgaacatacagcggtctgcgtggaactggaaacagagcgcggaaatctaatcgtatatggcacaatcatgggaatccgtggaaacagggaaaagtcctatatgcaggatttgatgaggcaaatggatgatataaagcggattgccttatttgggaatgtctgcgttatcggtgactataattgcagtttttctgatggatattacttcacaaagaacggcaggaataccattgcggagggctttcgtgacagaagtattgcaatattgaccgaaaaacggccggagtgcattgatcatatagcggtatcagaaagattcctggagggagcagagattgccgtggatgaatggaacttggataaagtgttgtcagaccataagggaattgtagcagagatgatttggtaacaggaggtattgcgcatggacaaacgaaagaacgaaattaaatattatgtgggcgatattacggaacttccgctggatgccattgtcaatgcggcaaacagcagccttttaggaggcggaggggtggacggggcaatccaccgtgccgcaggcagggaacttctggaggaatgccgcaagctccacggatgcaggacgggtgaggcgaagattacgaaaggatacaagcttcctgcaaagcatgtcattcacacggtagggccggtatacagcggaaaaccggaagatgcgtccagactttatgattgctattatcattcgctggagttggcggcagagaaccatctccacagcatcgcatttccgggaatctccacgggagtgtatgggtatcccaaggaggaggcagccgagatagcgttggcggcaatactgaactggtttgacaagcatcaagactatgggatgcaggtggtaattgtgaatttcagcgaagaagattacaatgtttaccagagggtgtgggacatggaaaaggagggaaagtgacatcatggcatggcagagaacagtcaaagtgaccgggagaggacacggaaatattgaaggacattctggaaaatcatggtttcgagcggacaaagataagaacgctatctttcgatgtgaacacgaagcatgaaagttataaggcgaaggatgggaattggaagcagcgtctggtaggatatgagttccggcatgtccttaaaatcgaatttgattcagacaacatacggcttgggaaaatcctttattcacttgcaaatgcaaaacagattaagccggagtttcgcataagctatactgtcaaagacaaggaaggctctaaaaacatgcttttgggcaaagctgtggaggatgccaggatgaaggctgacgtgctgacgcaggcggcaggtgtatcattaaaggggatacagagcattgattactcgtgggtggatatagagtttgagtgccgccctatgggggaacatatgctaatggaagaatgccgcgctgtcgaagaggatgcaggatatggcatggatattgagccggatgacattgaggcatctgatacggtgatggtggtgtgggaaatagaataaatgcatcccaaacatgcagccgcgcaagagcatggaagatacctaaaacgaaagttttctgccagcctgattgctatttgagtactgaaaatgatttgtaagataacataaaaggtctctcttaccgggtgggggcaaataaagtgtgtaaatttatttagtttttttggcggtcttgattgaccgccgtatttgttgcatggaaatcagtcaaacggtaattcctcaccattgcggtaggcctcatataaaagcagcatgtcgcgctccttcaggtactgatagcaggtgaggaactcattcatggcctccttcccggctttagaaattttcgtatttcagtatccgttcaacttttataaaataaaaaaacaaactatttatattttatgctgtaaatgttaaaatgtaatagtaccaatgatacaaatattgtatcatatccagaagcagaaggttactatagtaacggtagtataccgaagctctaatcccgttttttaagaagtatttcttaaaaacgggattatctattatacagggtataatctggttaaaatatttttaaaattttgagaggataatgagtgatgaatgagcagagtttaaattacagaattggtttggatattgggattgcatctgtgggatgggcggttttggaaaatggcatggaggatgagccaaggagaatagttgatatgggtgtgcgtatttttaaaaaggcagaaatgccaagaacgggggaatctttggcattgccaaggcgcaaggctaggacaacccggcgcagattaaggaggcgcagacacagactggagaggattaagctgctgcttgaaaaagaaggcataatcagtataaataaatttgaagaaagatataagagtagaaactttccttgcgtataccgccttcggtatgaagcactggagagaaaactttctaatgatgaattggcacagatattgctgcatatagcaaaacatagaggctttaagtctacaagaaaagcagaatataaagataaagaaaatggacagattataaatgccacagaggaaaataaaaagttaatgaaagaaaagggttatcgaacagtaggggagatgatttataaggatgacgcatttactacaattgctccatggagtgaaagcggtaaaatatttacgccaagaaataaacagaatgattataggcatactgtgttaagagatttgttagaggacgaggtgacatatatctttgcagcacaaaggaagtttggcaatgtagtgattacagaggatttagagaaagcatatttgggtatcatgcttgggcagcgttcgtttgatatgggaccaggcaatcaggctaatggtttgccaagcccatacggaggcaatctgattgagcagatggttggagtatgtgcacttgaaagaggcaaggaaaaacgtgcagcaaaggcagcatatacttcggaacgttttgtgctcattcagaaaattaatcatacatatttaacagatgaatatggaaagactataggatttactaaggaacaaagagagaaattgataaattatgcttatcggacaaaagaattaaaatattccgctgtaagaaagtatttggaaataccggaaaatcttttttttaaggctcttacctataatgcagataaaccaaaggatgttgaatcagcccaatttgtatccatgcagtggttttatcagattcagaaggcaagagggaaaaagcattcagagattatagatgaagcagagagagaacttcttgatgaaattggcaccgttttaacaaaatataaaagtgatgacggaagaaggaaagaattgctggctttgggtgtagaaactgacatcattaaaaacctacttaaattgaatccaagtaaattccagcatctatcgttaaaggctatgaaaaagataatgccgtatctggaagaaggacacatttataatgcggcttgtgaaaaggcgtatcctgattttaaagcagataataatacagaaagatttgaacttttaaagggagaggtattagcagataccatgcaaggtattctgaatcctgtagtaaaaagatcaatatcgcagacaatcaaagtgcttaatgctattatcagaaagtatggcagtccccaggcagttcatatagaactggcaagagagatgtctaaaaattttcaggaaagaaataagattgaaaatcagcaaaagaaaaactgtaaagataatgaggaggttaaaaaacaaattatggagtatggggttaacaatccaacaggcagagatatattaaagtttcgtttatggcaggaacagaatgaaacttgtctatatacgggtcaccatattcctttagaaagattgtttcacaatgattacgagatagaccatattattccatatagtatctcttttgatgacagttatagaaataaggttttagtggaaacaaatgcaaacagggataagggcaatcgtcttccggcagagtattttggtgtagacatccaaaagtggcaaaaatatgaaattctggtgaatacacatatccgtaactatcgaaagagattgttgcttcttaaaaaagagttcacaatggaagagaggatgatgtttaaggaaagaaatttgacagatacgagatatattacgatggttgttatgaatgtgatgcgtaagaatctcgtatttgctccttatatgaatgaaaagaagaaaaagaaagtatacgcagtgaatggcgcggtaacggcatatttaagaaaacgctggggacttgcgaaagacaggaacacggatcgccatcatgccctagatgctgtggtggtggcatgttgtacagacggcatgatacaaaaaatttctaaaaacgtgcaggcaagagagctggcgtttgctcacggtcttcagtatatagatatagaaacaggtgagaaactagatagaggaacatcacgggaagaatgggatgaaagatttggcgtgatgctcccgttgccgtggcaatattttcgcaaggagctggagattcgcatgagtgatcatcctgaatattttgcgagggatttgcaaaaatggaactatcctgatccagatggtgtaaagccgatttttgtgtcacatatgcccaatcataaaattacaggtgcagaacataaggaaactgtaagcagtgcacggcattttgataagcagggaattgtaatattgaaaacagagttgaaaaatttaaaattgaaagatggtgagattgaggattattatgcccctcaggatgatagactgctgtatgaggccttgaaagagagattgaaacagtatgaaggaaacaaagagaaacaggcatttgacgaaccattttataaaccgaaagcggatgggagtcttgggcctcttgtgaaaaaggttaagctggccaaaaagcagactttaggagtgttattaggtaaaaatggcatagcagagaatgcggaaatggtgaggatagatgtgtttagggaaaatgggaaatattattttgttccaatctatgtttctgatatgaaaaaagataagctgcccaatcgtgcggctactgctaaaaaggcatatcaagagtggagggaaatgaaagaagaaaattttgtatttagcctgtatgcaggagatttgattaggataaagaggaagaaagccattactacaaaaaactgtgataaaacttcagaaaagaggaatgacattttagtttactacactggtgccaatattaatagtgcagctatacatggcagatctcatgacggtggatttgaatttgaaggattgggtatacagatactggaagtgtttgaaaaatatcaggtagatgtattgggaaatatttcaaaagtaaaggcagaacgaaggatgcattttcggcattaacatcatgggggggtgatggaatgggatatcgtaatattatgatagctaatggaatgcagcttcatatcaaagacagccagctgcggataggagatgcagccgttattccgttggaggatattaatagtgtattaattgaatcacagtcagttaccgtttcctcctatttgatacaaaaagcgatggattatggaattgttatttattgttgcaatgaacaacatatgcctaatgccgtagttttgccgttgcagcatcaccatcggcattttaaaatgctgaaactacaaattgatgccagaaaacccttgcagaaaagattgtggcaacagattatcgtaagaaaaatccgtaatcaggaaaagtgtttggaatgcctaggcagttctaaatggaaagaattgaattgtatggctaaggaagtaaaatcaggagatacaactcatgtggagggatatgcggctgcgttttattttaaacagttatttggagaaggattttccagaggtgaagattgtacaattaatgctgctttaaattatggatatgcccttattcgcggtatgatagctaggacgattgtttgttgtggatttgagccttctctggggatatggcatcgaaatgagcaaaacggttttaatctggcagatgattttatagaaccttttcggccagtagtggatttatatgtggcacaacgatttgattctgtgcagatggaaacgtcattaacggcagaaatgaaaagagggttattttctgtgttgaattatgatatgaatgttaatggtgagaaacaaattttgggaaacagtattgagaaaatggttatgggatttgggggatgcctgaatggaagtagggaagaactggaattacctgatctgatacctttgcaggcacataattatgagtaaatttatgagaatgattgtattttttgatttgcctacagtagatgcgcaggatagaaaagcggcatctaaatttagaaagtttcttttaaaagatggataccatatgatgcaattctctgtctatacgagagtatgcaatggagtggatgcggtcaaaaaacatgaagcaaggctgtatgcaagtattccgtcaaaaggagcggtcagattgttggttttgacggataaacaatataacacgatgaaaatattgcttggaactaaaatatttgatgatgtaccaatgacatcaaatgtaatggattttttctaaaaaatatgccaatgttgcatatttcctaaaatatagtcccaatttttttcaatgaaaagatgccgaaaagtaacggtttccagcgtcttcttgtgtagatattgtaccatacccagaagcagaagggaactatagcttgaactcatatttatagccatatcgcgccttgtcgcatcatccagcacataaaagtcagcaatcagctgatcgaccatcggcagttcggtataatcaaaattcttaacaatctttagggtgcggtcagaaaaataggctttcttttccatgctgaccatgaggcagtctttgtctgacggcagctttggcagagtttccatatcatcataaggattatccttacagatcaagttgattggtatgttgaggatattggaaatgcgcagagctgtgccaaaccgtatcgcagcatccctctgtataatggagtagagggtagtaggcgcaataccggcttttcttgccagttcttttacagtcattcctttatcatcaaggatatttttcaggttttttccatatcccctagttttatctcgcttccccttttttcagtataacatagaagcaggaaatacgtaactagtaaatttttagaaaataaatgaaattagtattaacaaggagctgaatgtgtaacattatatcaagggagaggaactatgtggagcataagaaaattaaatattatgatgatccaaaggataataccgccttcgaacgctgtatcgatgttatgagcagattgatgttgaaatatggtaaaataacgaggaaaacggcgatcacgcttgcgtgaatcgacgtttgacgagaaaacccatcgagacgaagtcgagatgggcctaatatgctggaagaaatgaaatggaaagaaatgaaaagaaatgaaaagaaatgaaaagaaatgaaaaacatgcgttgcgaagaaacagataatgtgttatgatacatatatcgcaatgcgtggagg

SEQ ID NO: 3904 - DNA, 6447 bp, synthetic construct
  source 1..6447: mol_type = other DNA
  misc_feature 1..6447: note = Synthetic
tttataatatttataaggtttttcgctggaaatccttatgggaagtttgagtaattgatgtgtatgttttagcggccattattggattccgcttggagcggagagcagaagtggatctctcgcccaatgagtcaaagagtatttttccggaacagatgataggagccaaagaggatttggattttataatgcagatgattatgatattggagaaccgggacaagatttcggcagaggaaagtgtgaagaaagcgtttaaaggggtggagacaaaagaagaatttgaatattacaaaaatttatttaattcctatgttcggggcggagtggaagaactgtatgagcggcttgtgctgagaaaaggggaaatggaagaagaattctatgatgaaaagaccgctaatctgatggcgctgctggaacggtttgggatgtctaagggaactggggcggtgtgatgacaagtgaaatgaatggacctttctggtagttcgtgtcagggaagatttgtctatgcctgtagaatgttaaaattattgataaaatatttttgccaaatattcacaaaatgggacaaatgagttataataataagacattatatcataccaagagataatgtggttactacaataaggtagaacaccaaaaagctctaatcccattcctcggaatgggattatcttttatctgcgcatggctggaaaggataggcaatgattttgcagcatgcattccgtacaggttgtttgcatcaggaaggaagggagcattcaaactgcgtttgaggcttgtatggcaggatgatttcatcagaaaggggaaaggtatggcgttgaattacagaataggattggatataggaattgcatcggttggatgggcagtattggaaaacaatagtaaagatgaacctattcggattgttgatttaggggtaaggctatttgaagcggcagaagtgccaaaaacaggagcagccctggcagaaccgagaagaaacgcaagaactgcaaggagaaggctgcgccgcagaaagcatcggctggagcgaattaaatggcttctgcaggaaagcgatatgatccagatggataaatttatggagcggtatcattcagccggattgccggatgtttatcagttacggtatgaagcgctggaacggaaattaaaggacgaagaatttgcacagatattgctgcacattgcaaagcacagaggatttcgttccaccagaaaggcggagctgaaggacaaggagacaggagcagtcctgtcagcgacagaagaaaataaaaaattgatggaagaacatggctaccggactgtgggtgaaatgatatataaagatgaaaaatttaaaacagcatgttcttggaatgagagaggatatattctgacgccccgtaacaagcagggagactataagcataccatataccggaaaatgttagaagaggaagttcggattattttcaattatcagagagagtttggaaatcagaaagcaacggaagaattggaagataattatctctctattatgacaagccagcgttcttttgacatgggccccggacggcagccggacggaacggcaagtccttatgcgatggaagggtttggagacagagtagggttatgcgccttagagccgaaagaaaatcaggaaccaagaggagccaaggcagcgtattcttcggaaatgtttgtggctttgcaaaaaatcagtcatattcggattatagagcaggacggctccggcaggaatttaacagaagaagaacgtcagaaattgatagaattgctgtataagaaaaaagaagtaaaatatgctgatgtccgtaaagctctgggacttgaatcaaagtacaaatttaataccttaaattacagcagtaagaagaaagcggaccttaatgacgaagaaagaataaaggagtcggaaaaaactaaatttgttgaattgcgctggtatcatgaatataaaaaaagaatgggtgctatcctggaaaaaatgtcccggcaggaacagagtgatcttctggatgaggttggcacagcgctcactttatataaaaacgacgatacccgtatccgggaattagagaaactgaatctggattcggagactattgagaaattattggagttaaccccgaaaggatttcagcatgtatctctgaaggctatgagaaagctgatgccgtatcttaaggaagggcttacttatgataaagcatgcgataaggccggatataattttaaaggcaatgagagagctgagaaatcaaagttgttaaaaggaaaagagattacggatatcatcaatgaaatcacaaatccagtggtgaaacgttccgtagcccaaacggtgaaagtaataaatgccattattcagaaatatggaagccctcaggcaatcaatatagaattagctcgtgagatggctaaaaactttgaagaacgcaaaaagatggcgtcgcagatgaaagatcggcagtcagagaatgagaaagcaaaaaaggaaattcaggagtggggagttatttcgccgtccgggaaggatattttgaaataccgtctgtggcaggagcaagatggatattgtctttactccggaaagaaaattccattgcaaaaattatttacaggagattatgatattgatcatattcttccttacagcattacttttgatgacagttaccgtaataaagtactggtgactgcagaagaaaaccgccaaaaaggaaaccggattccctatgagtattttggagagagcgagccaaagcgttggaaggaattcgaaggacgggtaagttcactggtaagagattatcggaaacagcagaacttattaaaacgggaatttacggtggaggaacaaaaagagtttcgcgagaggaatttgaatgacaccaagtatattactcgtgtggtgtataatatgattcgtgagaatttggaacttgcgccttatagccgtcctgaaaagaaaaagcaggtatttgcagtaaatggcgctatcacggcctatctccgaaaacgctggggattgtccgcaaaggatcgttccattgacactcatcatgcaagagatgcagtggtgattgcctgctgtaccgatggcatgatacagaagatttccagaaacattcaagggcgggaattgcagtataccaggaaatatgtggcggtagatgtggaaacgggtgaactgatttccagagatgactttacaaaggaacagtgggatgaggaatttggcatacatgttccacgtccttgggattattttacaaaagagctggagattcggatgggagaggatcccagaggttttattgaaacccatgctgacgttgccagaagcctggattatccggagtggtactatgaagaaaatatcattcgtcctatttttgtatccagaatgcctaaccggaaggtgacaggtgcagcccatgccgatacggtgcgaagtccgagagattatccgaaaacaggctgtgtattgacaaaaacagccctcacagatctgaaactggataaaaagacgggagaaattgcaaattattataatccggaaagtgataaactgctgtatcaggctttgaaaaagcagcttttattgcatagtggggatgcgaaaaaagcttttgaagaaccattttataaaccgaaagcagacggcagcaaaggaaatttggttcggaaggttaagacctacgataagctgacattaggcgtgcctgtgaattcaggagaaggaatcgctgcaaatgccaatggttctatggttcgtgtagatgtgttttgtgtggacgaaaagtattattttgtgcccgtttatattgcagatgtggtgaagaaaaggctgccgatgaaggctgtaaccgtagggaaaccttttcaacaatggaaagagatggaggataaagattttctgtttagcctgtattccagagatttgatttcttttaaatctaagaatggaaagaaggtagcatgcgtggacgggacatcaaaagttattaatgaggagattgtttattactatggggcagatatatcgacagctagttttagtggaaaagcgcatgatggaagttatgattatagagggcttggtattcaaagtttagattatcttaaaaagtatcaggtagatgttttaggtaatgtgtcagaagtaagatatgaaaaacgtatgggatttcattaaaaaatttgtagtgtgatttatcgtgatttgggaatgttattctcttgtagtccaatagaaatatttatgattatttatcatagagtattttgtgataaagtgaaacgtgcgataagattttcagtgaaagggaaggcatatgggatatcgtaacataaaaatagagggaaataggaaattacacatagaaaatcagcaattggtaattgaaagtggaacagaagtcaaaattcccctagaagatattaattctgttttgatagagaatcaagctgtgacaatttccacctatatacttcagaaatttgcagacctgggaattgcattgtatgtttgtgatgagaaacatttgccgaatggagtgctgcttcctatggtaagacatagccgtcattataaacttatgaaatgtcagatagaggctggaaagccgctgcagaagcgattgtggcagcaaattattatacaaaaaattatgaatcaatctctatgcctggaattcagcaaaaaagagggggcagaggaacttcggagaatgtgcagggaagttcagtcaggcgataaaacacatgttgaggcaaaagcggcgtctttctatttccgaaaactgtatggtatgaattttaccagaggagatgaccatattatcaatgctgccttaaattatgggtatgccatcctaagaggtatgatagcgcgtagtattgtatgttatgggatggagccgtccattggaatatttcatcgaagtgaattaaatagctttaatctggcagatgatgttattgaaccattccgcccgattgttgatttgtatgtggctttaaaatttgatatttcccagaaagaatgtgcgctaactccggaaatcaaacgtgggttgtacggagttgtaaactatgaaatgttgataaaaggagaaaaacgaattctgaacaactgtatagatagtatggtagcaagttatagcagtgcattgcaagaaaaatgtgaaacgttaaatttaccgaaactgatgcggttgcaggaacacagttatgaataaatttatgagaatgatagtattttttgatttgccagtagtgactgcaaaagaaaggaaagcagccgccaaatttcggagttttttgttgaaagatgggtatcatatgatgcagttttcagtatacaccagaatttgcaatggaacagatgcggtagaaaaacacgaggccagattaaatttaaatcttccgtcgaaaggctctgtgcgtttgttaacaataacagagaaacaatatgaatctatacgtatattggtaggagaaaaaacttttgatgatacgggagagtcagtagagttattgaatattttttagaaaaagggtgaaatatcttatattaaaaaaagaattttaggtttttttaatggaaaaatcccgtataactgttgaagttatgcgggatttctgttccctattataccataccaagaaataattgggaactacaactaaaaaggactctagctttaaggttatagaattataccataccaagaaataattgggaactacaactgcgagaaaaaataaaaattaccctgctaaattataccataccaagaaataattgggaactacaacttttaaattttttatcagtgacgctataaattataccataccaagaaataattgggaactacaacacttgatcgacttaaaagacaaccccggctattataccataccaagaaataattgggaactacaacaaaccagataaactggatagtatgccgcaattataccataccaagaaataattgggaactacaaccgcaaggaaattggattgctcgtcaagcaattataccataccaagaaataattgggaactacaacatctaaaagataatcccatgacagtcataaattataccataccaagaaataattgggaactacaaccatgtaagacctgcggctctgaccgctcctattataccataccaagaaataattgggaactacaacctacctttttcgtagataccgaggcgatatattataccataccaagaaataattgggaactacaacatcaactttggttgttttaccgtaattaatattataccataccaagaaataattgggaactacaacactgaatcatcagctctgacgcttaaatttatacttacactctcagagtacattggattctat

SEQ ID NO: 3905 - DNA, 6093 bp, synthetic construct
  misc_feature 1..6093: note = Synthetic
  source 1..6093: mol_type = other DNA
gccgcagggaaagaactttattgcgcatgtggatattccggaaacggttcaggatgcgtgcgagcggctgaaggcggtgtacggagatataacaagagaagcagattccaggtatgcttcagatcaatgaacctggattttgctgacataaggggatttttttatggcagttgctttctctgtaaagccagtcaagaggcctttcattatgattcggaagaaataaactgtcatttcatcgagaaagcgctctggtttaaagctgagaaaaggggtaaagagtttttcccagttcagatgcaataaatcatacggttatctggcgtggatcgacaatcttctggagatccgtgaaacagcgaattataatctggatggtcttgattatgaggtcagactctgcgatgacccgacagatgtacagatgataattattgaaaaaacagggcagttaaccgcgcgaggatcctggccggttactgttggaactgaccgaaggaaaacagagagaacagcagctttcatgatatacagattggagacttcggcaaaagctggaatcttgatgacggacaggcgtttgcaatcattgggtattccgtcaatgaagcagactgcatccatacaacgcaagggctggaatttgactttgtgggagtcatcatgggtgatgatatccgctacgagaatggtcatgtagtgacggattttaagaaaagggcatcaactgaccagtctgttaagggtctgaagaagatgtataaggaaaacccggatgagctcttgcgcgtacggatgaaatcatcaagaatacttaccttaccctcatgaccagaggaatgtagagctgctgcatatactgtacagacccgggaatgcgggagtatatcagaaaatgtattgatatggtaccaaaggggattcttttgttcattctatgtaactggagacaagactcaaatatatcgatagtgttggtcagcaaattaacattggagtaaaaagcgaattgaacgcgacatgaacatatacctgacatggtcatcctatcgatctatactccatttacaggcaaggtcacatggcaaaaaaatatggattcgcttggttgtgaaagattattgcattattagtcaagtgatgtataatattattatcatatcataccaaatgatgataggttactacagtaaggtagaaaaccgaaaagctctaatcccattcctcgtgaatgggattatcttttatagggggaaatatggaaaaagtgaattatcgtatcggactggatctgggaattgcctctgttggttgggcagctatcttaacagactcaaaaggggaaccaaaacacatcattgatttgggagttcgtgtatttgataaggcagaagttccgaaaacaggagcttctttggcggctgctagaagaatggctcgctcgacaagacgtgttaccaggcgaagaagacatcgtctggatagaattaaacttttgctgcaaagtgaggggctaataaagctggacgtttttatggacagatattatcattcgccagggctcccaaatgtatataaattgcgatatgaagcgttagatcgaatcctgactccggatgaatttgcgcaagtattaatacatcttgctaagcacagagggtttaaatcgaatcgaaaaagtgaaactaaatcgaaagagaatggaaaagttctggcagccataaataaaaataaagaggtatttgagcaaaaggattatcgaacagtcggtgaaatgatctactgcgataaaagtttttatacagaagataattcttcaagcgatggctgtatctttacgcccagaaataaagccgggaattatcagcacatgatacttcgatctatgattgaggatgaagtgcatttcatttttgaacggcaacggcaatttggcagtacatatgcatctcaggaatttgaggaaaagtatacaaaaatcttcacttcgcaaagatcgtttgatttgggtccgggaaaacaggcgaacggcaagccaagtccctatgcgattagtggctttggcaatcgggttggtatatgtgaatttgaaaaagaagagaagagggcaccaaaggctgcttttacggcagagttatttgtcgcattacaaagaataaacaatcttcgaataagctgtgacaatggttcatacagaaatttgaataatgaagaaagagatgtgctgctcaaggagttgctgtcaagaaaagaagttacatatatgaaggtacgttcattacttcaattgacggagcagcaacgcttcaatctgcttaattatagtacgaaagatattagtgaatccagtgttgaaaagacagagaaagcagcctttattaagatgacgtatttttatgcgttttcaaaagtctttggaaataaattcaaagaaataccgccagcaaagatccaagatctctatgattctgttgctgcaattcttactgaatacaaaaatgatgatagccgaacggcaagattagaacaactgggaatagatagtgagcagattgacgagctgctgtcaatgaatccgtctaagtaccagcatttgtctataaaggcaatgagaaaaatcataccgtttcttctgaaaggatatacgtatgataaagcgtgtgaaagtgccggatatgattttaaaggagatagcatcggaaagaaattacacatcttgaaggggaaggaaatcactgatgctatcaatgacataacgaatccggttgtaaagcggtctgtttcacaagcggtgaaggtcctgaatgctataatcctcaggtatggctcacctatggcggtcaacatcgagctttctagagaaatggcaaaaacatataaagacagagaacagattaaaaaagataatgacaatcgttttgctgaaaatgaaaaaataaaagcagaattacgttcgaacgggctcatttctccaaccggacaggatatcgttaaatacagattgtggcaagagcagaatcacatatgtccatattcgggaagaatgattccgtatgaggatttgtttaagcctgggtttgagattgatcatatcataccatacagtataacctttgatgatagctatcgaaataaggtgctggtatatgctgaagaaaaccaaaaaaagggaaataggactccgtacgaatatttagcgtcagatgagatgaagtggcaggagtttattgccagacttaatatatgtactcgtgatttcaagaagagacagaaactactaaagcaacatgtttccgctgcagaaaaggctgaatttaaacaaagaaatcttaatgacactaagtatataacaagaatgttctataacttaatcagagaaaatctggaattggcgccaatggaaggcaagaagaaacaggtttgggcagtaaatggggctgtgaccgcttatttaagaaagcgatgggggttctccgtcaaggatcgttcaaccgataagcatcatgcgttagatgctgctgttatcgcctgctgcactgatggcatgataagaaagatatctaattacgcacaaggccgcgaattgcgatacgccagaggctttcaatttgtagatgaagaaacaggggaggtttttgatagagataatttcacaagagaacaatgggatgatatgtttggtattcgtattccgaagccctggcaaatgtttacagaggagttggaattacgtatgtctgacaatcctagagatgttttgcgaaaggatcaggtacttagtaggaagatagattatccttgctggatttataatggtgaaccagacattggatatgatattttgagaccgatttttgtgtcaagaatgccaaatcataaagtttccggtgctgcaaatgaagccactattcgatcaccaagacatcttgacgagagaataatattgacgaaggttcctctcacacaacttaaactggataaaacgaccggagaaattgtcggctactatgatgattataaaaaaagtgaccggcttttgtatgatgcgttaaaaaagaggcttattgagtttgatggtaatgcaaaggaagcgttcaaaacggaattcagaaaaccaaaaagtgatggaacgcctggtccggttgtaaaaaaagtaaagatagtagaaagatcggatgcaggtataaatctcaaaaagggacccggctttgtaaaaaatgacaaaatggtccgtgttgatatatataataaagatggcaagtattatgtcattccaatctatgttgctgataccgtcaagaaagaattgccaaataaggctgtcaaggctcatgctcctgaaaaggactggcgtattatggatgacaacgattttctttttagcctctatcagaacgatttagtgtatctggaatccaaaaaaggtattaatttgtggaaaaaaaataaaagtggagacagtacagagaataagaaagtggagcatagtctgctcgcttactataactcaatgaataggaacagtgcagctattgaaggagagacatctgatggaggatttaagttcgagaatcttggaatacaaaacttaaaaaggctggaaaaacgtcatgttgatttactgggatatgtaacagaggttggaaaagaacgtcgcatgagatttaagtgattttattatgggatataggaatctttttatagcaaatgcaaaacgaatttctgtcaaaaatcgtcaacttcttatagatgatgtttctgtacctgttgaggacatatgtagtctgatgattgaaaatcaaagcacactattttctgcatttgtgttgcaatacctggcggaacaaggcgttgttgtatatgtttgtgattctaaacataccccaaatgcagtgctgcttccgctgaattcacatagtcgtcatttaaagatgctaagatatcaaatagaaatcagtaaggtacttcaaaagcgaatatggcagaaaattgtcatttctaaacttgaaaatcagtcgagatgtctaggtctaatagatgattctgatggagcaaaacatatcaagatgttgcagaaaaaggttctctccggtgattcaaaaaatatagaggcacaggcagctgcatattattttaaaagaatttatggaaaacactttatccgatccggcgaaagtttaacaaatgcaatgcttaactacggatactctatagtcagaggaatgatagccagaagtatcgtatgccatggttatgagccttctttgggaattttccacaaaagtgagctgaacagttttaatcttgcagatgactttattgagccttttcgccccttggtagatttagttgttcaccagttgatgcaatcagttgaggaggagcagcatctgacgcctggaataaagcaggaactgttccggttagtaaattatgatatggaagtaggcaaccaaaagcagattgtttcgaatgctatagaattgttcgtggaaagctactctaaatcattgcgagacaatgcagagagtattacaccaccagtcttaattgcgttaaaagaacattcatatgaataagtttatgaggttgatgatattttttgatttgccaacaaaaacaaaagcggaaaggaaatccgcatctcgttttaggacgttcttgaaaaaggatgggtattatatgatgcagtggtcagtctattcaagaatctgcaatggcactgatgctgttgaaatgcacaagcgacggttaaaggaaaatttgcccccgtatggttcgatacgaacattgactttgacggaaaaacaatttgaaagcatagatatactgctcggaacaaggaagccaaatgagctgacatcaaaagaattaacaagcattttttgaaaaaatggagaaaaacctgattattagtctacatttttttgatttttttgaaatggaaactccccatattcctgataaatacggggagttttttagttcctatcataccataccaaatgatgacagggaactacagcgctgccgccctttgcataacggtcatatatatcataccataccaaatgatgacagggaactacagcc

SEQ ID NO: 3906 - DNA, 5686 bp, synthetic construct
  misc_feature 1..5686: note = Synthetic
  source 1..5686: mol_type = other DNA
aaaaaaatccctatttaatttaacacctcaggagaaaaatctcattgaagaatatcggaaacatccggatatgcaaaaggccgttcaacgactattagaaatagaaaaagaatcttaaatgcaaagctgcccgaaaagatgatttgtcttttcaggcagcttttggttttgaaatttccttctatgtacagtatacttataacaatacattttattgccctgtttactacggcgtcatatttggaggtactcattatgcaatcgacctatatcatgaaaccaatcgctcatattcacagtgatttccctgataaattcggtatcccccgtcaaagcggactcattgattcgctgaaggctgagattattttcgagccggaatatcgaaatccggacgccttccgacagtaattcagatacttgcggtatggtcagattattcttttttctatagaatttcagtcgctcagcgatcagcggatttttcatggccattctccttttgaacctcattttagctatccttataaaagtatgtcaacgaatccccaaatattcttgtataaaaagaaaaatggcgaaaaataaaggagaaatactttccaaagaagaaaattattttacttaaaatttacaaagtctgtcttaaggattttacattgagtgtttaacatttcaagtgtaaacaacatttttaagctaaggagattgaagagatgaaaaaaagtttattaatgacagtatccgcactgatgatcggaacacttatgttgacagggtgtggaacagaaaaagccgaaacgacagcacagacagcagcagagacgacagaagccggtgattcaggtgaaacaacaaaagcagcagaatcgggaaaaggtgatgtaaaaggtgcttcgggggaaataaccgttgtttccagagaagatggatcgggtacgagaggcgcttttatcgaactgcttggcattgaagaaaaagatgctaacggtgaaaaaatggatatgacaacagaggatgcgaaaattacaaacagcacttctgtcatgatgacaacagttgaaggggacgtcaatgccattggatatatttcacttggttctttaaatgaatctgttacagccgttaaagtcgatggcgcagaagctactgctgacaatgttgctgcaggtacatacaaggttcagcgtccatttaatattgcaacaaatggaacaccaagtgaagcggcccaggatttcattaatttcattatgagtaaagaaggccaggctgttgttgtggataatggttatattgctgttggcgatcagccggagtatgaagcaggaaatgctgaaggcaaaattgttgtggccggttcttcttcagtaacaccggttatggaaaaattaaaagaagcatatgcaaaagcaaacaaagacgtaacagttgaagtacagcagagtgactcaacaacaggtgttacaaatgcgatcgaaggaacatgtgatatcggtatggcatctcgtgatcttgcagacagcgaagttaaaaaaggtgcaaaagcaacagttatcgcaaaagatggtatcgcagttatcgtaaaccaggaaaaagagggcggagcagtattaaaggcaacgacagagaatcagaagattatgcaggaaaaaggctatcgcacggttggggagatgctgtatctggatgaagcttttcatacggagtgcctctggaatgaaaaaggatatgtgctgacaccaaggaatcgtccggatgattacaagcacaccattttgcggtcaatgctggtagaggaagtgcatgctatttttgctgcacagcgggctcacggaaatcagaaagcaaccgaaggattagaagaagcttatgtggagattatgacgagccagcgttcctttgatatgggaccgggactacagcctgacggaaagccaagcccatatgcaatggaaggatttggcgaccgtgttggaaaatgtacgtttgaaaaagacgaatatcgggcaccgaaggcgacttatacagcggaattgtttgtcgctttgcagaaaataaatcatacgaagctgatcgatgagtttggaactggcagatttttttcagaagaggaaagaaagactataattggtcttttgctttcaagcaaagagttgaaatatggaacgataagaaaaaaattaaacatagatccatctttaaaattcaacagcttaaattacagtgcaaagaaagagggagagacggaagaagagagagtccttgataccgagaaagcaaaatttgcaagtatgttttggacttatgagtattctaaatgcctgaaagacaggactgaggaaatgcctgttggagagaaggcagacttatttgataggatcggtgagatactgactgcttataagaatgatgacagcagaagcagccgtctggaagacttgggattatccggagaagaaattgatggattgctggaactttcccctgcaaagtatcagagagtatcgctcaaggcaatgagaaaaatgcaaccatatttagaagatggtttgatttatgataaagcctgtgaagcagcaggttatgattttcgtgcgttgaatgatggtaacaaaaagcatttgctaaaaggggaagaaatcaatgctatcgtaaatgatatcacaaacccggtagtaaaacgttctgtatcgcagacgatcaaagtcatcaatgcgatcattcagaaatatggaagtccacaggcggtcaacattgagctggcaagagagatgtcaaagaactttcaggatcgcacgaatctggaaaaagagatgaaaaagcgtcagcaggagaatgagcgtgcaaagcagcagatcatcgaattaggaaaacagaacccgaccggacaggatattttaaaatatcgtttgtggaatgatcagggaggttattgtctgtattccggcaagaaaatcccgttggaggaattatttgggggagggtatgatattgaccatattcttccatacagtatcacatttgacgacagttaccggaataaggtgcttgtgactgcacaggaaaaccggcagaaagggaatcgtaccccatatgaatacttcggagcggatgaaaaacactgggaagattacgaagcgagagtccggttacttgtccgggattataagaaacagcagaaattactgaagaagaatttcacagaggaagagcgcaaagagtttaaggagagaaacttaaacgataccaagtatattacaagagtagtttataatatgatccgccagaatctggaattggaaccattcaatcatccggaaaagaaaaagcaggtgtgggcagttaatggagcagtgacatcttacctcagaaaacgttggggactgatgcagaaagaccgttcgactgacagacatcatgcaatggatgcggttgtgatcgcatgctgcacggatggaatgatacataagatctcgatgtttgtaaaggggagagaacttagatttaacagaaatttaacaatagtagatgagaaaacaggtgaaatttttacaagagaacagtgggatgaaaagtttggcgtgaaagtgccacttccatggaattcattccgggatgaattagttattcgattagaaaaggatgatccgaaaaattatttgatggtacatacggacatgcaaagggagatagattatccaggatggatgtttggagaagaggaaagtccaatcgaagaaggcagatacatcaattatgttcgaccattatttgtatccagaatgccaaaccataaggtgacaggttcggcacatgatgcaaccataagaagcgcgagagattatgaaacgcgaggtgtggtgatcacaaaagttccgctgacggatctcaaactgaataaagacaatgagattgacggatattatgacaaagacagcgacagacttctttatcaggcattggtacggcagctgttattgcatggaaatgacggaaagaaagcctttgcggaagattttcataagccgaaagcagatggaacagaaggtccggttgtacgcaaggtgaaaatagaaaagaaacagacgtccggtgttatggttcgtagtggtaccggaattgctgcgaatggtgagatggtgaggattgatgtgttccgggaaaatggaaaatattattttgtgcctgtgtatacggcggatgtggtacggaaggtgctaccgaatagggcggcaacacacacaaaaccatattcagagtggagagtcatggatgatgccaattttgtttttagtctgtattccagggatttaatccatgtgaagagcaaaaaggatataaaaacaaatctggtaaatggtggattattgctgcagaaagaaatatttgcgtattacaccggggcagatattgcaacggcaagtattgccggttttgcgaatgacagtaattttaaatttagaggacttggaattcagagtctggaaatttttgaaaaatgccaggtagacatcctcggaaatatttccgttgtccgccacgagaaccgccaggaatttcattagaaaaattgagggaaacatatgggatttcgaaatattatgatcagcagtaatatgaaactccgcattcaggatcagcagttagttgtgactgccggggatgaggtgcatattccactggaagatattaactgtattttaattgaaaatcagtcggtcacattatctgcctatctgttacagaaagttgcggatagcggtattgcgctttatgtctgtgatgaaaaacatttgccaaatgcagtgttattgccaatggtgcgacacagccgtcattttaaaattttaaaatatcagatggagacgggaaagccattgcaaaagcgtttgtggcagcaggttgtgatccagaagatacgaaatcaggcactgtgcctgcaattactggagctggatggacatgaggaacttctcagaatgtgtaaggaagtacagtccggcgacaggacacatgtggaagccaaagcggcagcatactatttccgatgtatgtacggacttgggttttcgagaggaaatgatcatattattaactcggcattgaattatggatatgcaatcatccgtggaatgatcgcacgttccatcatatgttacgggttagaaccatcgattggtatctttcatcacagcgagctgaataattataatctggcagatgacatgattgagccattccggccattggtggatctatatgtttccagtcattttgatatttcagaaatagacagtacattgacaccggaaatgaaaaagggattgtttggaattataaattttgatatgtcagtgaaaggagatatgcgtattgtaagtaactgtattgatatgttgattgcaagttacagcagtgcattacagggaaaccggacagagcttgatctgccggaactgatacagctacaggtacacagttatgaataaatttatgagaattgttgtcttttttgatcttccggtcgtcactgcaaaagagaaaaaagcagccgcaaaattccggaaatttttgataaaagatgggtacaatatgatgcagtggtccgtgtattcaagaatttgtaatggaacagattctgttgcaatgcacagacagaggctgaaacagaatctcccggaaa

SEQ ID NO: 3907 - DNA, 5614 bp, synthetic construct
  misc_feature 1..5614: note = Synthetic
  source 1..5614: mol_type = other DNA
gcctaccttaccgaaatagcgcaaaaaggaaacatcgggctgcaactgctgtcggacggcaaagacctgatggcaaaattccgcacacaagagaacgaaactccgtcgataggcttgactgattctcctgaagattggatgaaaaaactgctttcctcggaggacagcggtgtccggatgagcggtaatgatccgattatggagttggtaatggaaatgtttacctcgctgatggctcttgccgtgcagattgacagcaaggaacaggatcaacagatgggggctgcgacaaaagcggctttggagaaacgcatagacctttcctcacttgttccctcgctgagatcgtgcgagctggtgatacaggacaacgcaaggccgatattgtacgcccaagatgctaccggcagttactcgcatgaactgactgcggctgaaatgaatcggttgtcgctgatactgaaccatacggatatgccggacgagagcaaacggcaccgaatcggtacggcggtgaaccatatactcgtggctgaacgcgctgccagaagctatgagcagggaatggagcaacgtgggcaggcggaaggcttgcagatacgataatgaatttaggaatgcaatagttgtataatagtttaaaaaagtaatttatgattaagtgtaatgtgacaatcaacggcattgtgagccgcacggcttccatgcgtaccaacaaagaggggaaatcttatattagttttgccgtgaaaataagcattcttgccaaggcagggagtagcaagcaagtggaggtgttcgtgtcgaagaacggaacgactgcggaactactttcttatgtgaccggtcaacgtattgagttgaaaggggtgctgactttccgcaaacgtgaagaaaacctgtatctcaatttccatgccgacagcgtggacttccacccacaaagcgagcgtgatgcgattgagggcactatcgagttccgggggacggtgggtaaacaagtggaagaaaagagggataagaagggcaatgcttattcggtgttctccgccttcagtacagagaagcatgaggaaaactttgctttcacatgggtacgttttatccgtttctccgcagaaaaagaaagttggctccagcctaaggcacgtatctgcgccaaaggagtattggaactatctatatatctggacaaaatcaacctctcctgccgggtggaggaaatggcagaatgggtgaaaccggttatgaccaatggaactgaggatgaattaccgttttgagtatggcaggaaacagaagatataattcggatgggccaagtgcggaggaacgtgcgcttgaacggtttacggagttgatgataaagaaaatatcgtctatcaagggggattggaagaaaccatggtttaccgagggctttatgacatggccgaagaacctctccggtcgagaatataacggaatgaatgcactcatgttgatgctgctttgcgaggaaaacggttacaaacttccggtgttttgtacctttcagcgtgtgtcggggctgaactattcgactgacaagcagggaaaccataggccattgacggatgccaatggggagaggcttccgcaggtgtctgtcctgaaaggggaaaaatcgtttcccgtattcattaccacatttaccgtagtggataaagagacgaaagagaaaatcaagatggaggattatcggaaactgtcgccggaagaacaggcggatttgatggatgaggtgggtaaaattctgactctttacaaaaatgatgatacccgcagcagggaatttcagaaactgggtctggactcagaaatcacagaagaacttctggagctgaatcccagaggatttcagcatgtttctcttaaggccatgaaaaagctgatgccttatttgaaagaaggccttacctatgacaaagcatgtgcagaagccggatatgattttcagggaagtgtacaaaaggaaaagtcccgcttattaaagggaaaagaaatcacggatattatcaatgatatcaataatccggtggtaaaacgttctgtctcccagacagtcaaagtaattaacgccattatacaaaaatacgggagtcctcaggcagtcaatattgaactggccagagaaatgtccagaaattatgatgagcgcagaaaaatggaaaaacagatgaaggatcgccagtcagaaaatgaaagggccaaaaaggaaattcaggaactgggaaatgcctttcccaccgggcaggatattctgaaataccgtttgtggcacgaccaggatggaatatgcatgtattccgctaaaagaattccactggcggaactgtttacgggagcatatgatatcgaccatatccttccctacagcattacctttgatgacagctaccggaataaggtactggtcacttctgaagagaacaggcagaaaggcaaccgcattccatatgagtatttcggcagtgattccgaaaggtggagtaaatttgaaacactggtgaattcccgtatcagagattacagaaaacagcagaatttattaaagcagagctttacggaagaggaacgaaaggaatttaaacagagaaacctgaatgatacaaaatacattacccgtgtgatttacaatatgatccgggagaacctggcgctggccccctataacagtccgggaaagaaaaaacaggtttttgcagtaaacggaggggtaacggcctatctgcggaaacgatggggaatgtcagcaaaagaccgctccattgatacccatcatgccagggacgcagtggtgattgcctgctgtacagatggcatgatacagaaaatctccagaaacatacagggaagagaactgctgtatgccagaggttttacggcggttgatgtggaaacaggagagaaatttaccagagatgattttaccagagaccagtgggacgagatattcggcgtgcaggtaccgaagccctgggagtattttaatgaagaactggatattcgtctgggagaaaatcccgtagaatttattgaaactcattccgatgtttccagaaaactggattatccggcgtggttttatgaaaataatattatccggcctgtttttgtatcccgaatgcccaaccggaaagtgaccggagcagcccatgcggataccatccgaagtcccaggcactatcaggaaaccggctctgttctgactaaaactgccctgatcgatttgaaactgaacaaaaaaacaggagaaatagaaaattattacaagcccgaaagtgatacgctgttatataatgccttaaaggagcgcctggaattgtatggcggcgacggaaaaaaggcattcgaagagcctttctataagcctaaagcagatggctccagaggaaatctggtaagaaaagtgaaaacatatgataaactcacccttggggtgtatgtgaattcccaacatgggatagccgccaatgccaatggctccatggtgcgtgtggatgtgttccgcgtcagtggaaaatattattttgtaccggtttatattgcggatgtggtaaggaaaagactgcccatgaaagcggtagtccagggaaagcagtatattgactggaaggaaatggaagataaagattttattttcagcctgtataccagagatttgatttcttttaaatccaaaaatgggaaaaaggtgacctgtgtggacgggacatcaaaggcagtgaatgaagaaattgtttattattatggggcgaatatatcaacggcaagttttagtggaaagtcacataatggaagttttgagtttacaagtttaggaattcagggcctggaatatctgaaaaaatatcaggtggatgtactcggaaatgtatcggaggtaaagcgggaaaagagaatgggatttcgttagagccgggtgcacagtttacgaaatattggctggtatgaaggaagaacaggtggtaaaacgcaggaatgcctgctggcagcggaggtgatatatgggatttcggaatattaaaatcgagggcagcagaaagctgcatattgaaaatcagcagctggtaattggaggagacagagatgtcaggattcctttggaggacattaacagtattttgatagaaaatcattctgtgatggtgtccgcttatatgcttcagaaatttgctgatatgggaattgctttgtatgtctgtgatgaaaagcatcttcccaatggtgtattgctgccgctggtaaggcatagccggcattataaactgttaaagtgccagatggagataagtaaaccgctgcagaaacgactgtggcagcagattgtgatacaaaaggttcgaaatcagtccttatgtctgaaactgagcggcaggacaggagacacagaactgcagaagatgtgcaaagaagtgcagtccggagacagaacccatgtggaagcaaaagcggcagccttttattttcgaaatttgttcggaccggaattttcaagaggtgaagaacatatcatcaatgcagcattaaattatggatatgccattgtcagaggaatgattgccagaagccttgtatgttatgggatggaaccttccatcgggctttttcaccggagtgagttaaacagttataatctggcggatgattttattgagccgtttcgtcccattgtcgatttatatgtggcttcaaagtttgatatgtcagaatcttcccatgcattgacaccggaaataaagcgtgagctgtatggaattgtaaattttgaaatgcagataaaaggagaaaaacgtattctgagcaactgtgttgacggaatggcggcaagttacagcagtgtattgcaggataagtgcgaaatgctgagtctgccggaactgatacagctgcaggtacatagttatgaataaatttatgagaatgatagtattttttgatttaccggtagttactgcgaaggagagaaaagcagcagcgaaattccgtaattttctgttaaaagacgggtatcatatgatgcagttttccgtttataccaggatttgcaatggcacagatgcagtggagaagcatgaggccagactgaatctgaatttgccgtccaaaggttctgttcgtttgctgacaatcacagagaaacaatacgaatccatccatattctgttgggtaaaaagacatttgatgataccggagaatcggcagaattattaaatattttttagaaaaagaataaaattcaatcgtttttccggcaaaatcagagattttaaattgagaaaaatccgcataaccttattggttatgcggattttctgttccctattataccataccaagaaataaatgggaactacaaccatggggattcctgcaggtatccttccggtattataccataccaagaaataaatgggaactacaaccaaaacttacaaaacaaggaggaatcaaaaattataccataccaagaaataaatgggaactacaacatatccctttaaatcaggcagatttttaatattataccataccaagaaataaatgggaactacaaccgccttaagcaggttgaaatctaccccgtaatta

SEQ ID NO: 3908 - DNA, 5467 bp, synthetic construct
  source 1..5467: mol_type = other DNA
  misc_feature 1..5467: note = Synthetic
aaatatttgaagatattcctgtcttaatctatgttgctcttccttttcttcttcacttaggcctactgatttagattttctggccaattcattaattcgttttattaagtctttcaaattatcacctcgaaataacattatatcatgaaatttaattaattttaattgtattaaatttgaattgctaattatatattttacaataaaatgcaaataaagaaatatgtctataattataaattttgggaataattatattgacaaaaatggaagaaaagtgtaaaatgacattaaattatattataccaatataattaaggttactacaataaggtagaaaaccgaaaagctctgacccaatctacatttttgtaggttgggtcatcttttttatgggaggatgagaggaatgaattatagaatagggttagatattgggataacatcagttgggtgggctgtattaagtcatgattctaacgaagaagcgaatagaatagtggatttgggcgtacgtacttttgatagggcagaagttccagatacaggagcatccttagcttcagaaagaagagaagctagagggactaggcgtagacttagacgtaggagacataggttagatagagttaaaaaactatttgaagatgaagggctaataagtataagtaacttggaatcaatgtttaaaacatcaaaacatgcaaacgtttataaaataagatatgaagcattgaatggtatcatcaataatgaggaacttgctgcaatactatatcattttgcaaagcataggggatttaagtcaaataggaaatcagaagctaataataaagaagaaggaaaactattaaaagcaactaacgagaataaagaacttttaataaattcgggatatcaaactgtaggtcacatgttgtacaaggatagcaaatttagagctaaagattggaatggaaatgaaatattaatgacaagaaataaaactgatgactataagaatacaatacttagagatttattagaagaagaaataaagataatcttcaataagcaaagagaatttggaaatcgatatacaactaaagaatttgaacataaatacttagaaattttcaaatcccagagatcatttgatcaaggtcctggtaatatgcccaacgggcaacctagcccatatggtggcaatataattgagaaaatgttgggcaaatgtactttcgaaaaagatgaagaaagagcctgcagagcaacatatagttttgaatatttttgcttattacaaggaattaataatttaaaaataattatgccagatacatcaattagaagattaacagaggatgaaagaaggaaattaattgaactagcatttaagtcctcatcaattgattattcgaaattaaggagtactattggactagaagaaggttcgttttttaagaatctagattatggaaataaaagtataaatgatgtagagaagaaagcaaaatttaattatcttaaggcatatcatgaaattagaaaaaaggtagaaaaggtagataaagaaatatttcaaacatttgatattaatataatcgattatatagctagaactttaactgtttataagaacgataatactagaatattaaaacttaaagaggtaaatttatcaaatgaaattatagatgaattacttaacctaaattttagtaagactggtaatttatctattaaggcaataagaaaaataattccgtttttggaagatggttttatatataatgaggcttgtgaaatggccggttatgattttaaaggttccatatcaggccaaaagaaaaaactactcaataccgacatactaaaggatattactaatccagtagtttgtagagccatatcccaaagtataaaagtattaaatgcaataatccgtaaatatggaagtccacaacttatatgcattgaattggctagagagatgtctaaaaattttgaagaaagaaaaaaaatagagaagtcaatgaaagagaattcagaagtaaatgataaagctaaagaatatataaaatccctaggggttgttagtccaactgggcatgatatagtaaagtacaagttgtggaaggaacaaaacgaaatttgtgcatattcaggaagacatattagtgtaaaggatttatttgataaaagcgtagttgatatagatcatattattccttatagcatttgtttcgatgatagttataaaaataaggtattagtatatgcagatgaaaatagacagaaaggtaatagacttccttatgaatattttggacatgatttagagaaatggcataagtttgaagtatttgttaataacatcaaagaccataagaagagacaaagattattaaaacagaaactttcaaaagaagaaatagaagcatttaaagaacgtaatttacaagacactaaatatattacgactcaattctataattatataagagctaatttagagtttgcagaatctaagaagtattcaaaaagaaatgtaattactgtaaatggttcaataacaagttacttaaggaaaaactggggactaattaaaatgagggaagaaaatgacaaacatcatgctttggatgcagtggttgttgcgtgcactactagttcaatgattcaaaagatatctaaatatgtaaagggaagagaattaaaatatagtagatttagtgaataccaagataaagaaacaggtgaaatcttagatttaacgaaactttctagagaagaatttgatgaaattttcggcgtcaagttccctgaaccttggtataattttagaaaagaactggaaattagattaagtgatagaccttatttatataaagatattctttataaattagggtatagagatgaagaaataaaaccaatttttgtatctagagctccaaaacgtagtgtaacagggccagcacatttagatactgtaagaagtccaaaattaatagaccaaggatatgtaatatctaagaagaatctgaaggatctaaaatgggataagaaaaataatgaaattataggttattacaataaaaaagatgatagacttttgtatgaagctttatgtgaaagattaaaaaaatacaattatgacgcaaaaaaagcttttgcagaagaatttagaaaacctaaatcggatggttcagatgggcctatagttaagaaagtgaaaataatggaaaagcagacattaggagtgatggtgaataatggtgatggtgtagcatccaatggagatatggtaagaattgatatttttaaagaagatggaaaatattattttgttcctatatatgtatctgacacgatcaagcaacagctaccaaataaagcatgtgttgcaaataagaattacaatgaatggaaagagatgaaagaagaaaattttatatttagtttatattctagagatttggttatatttaaacataagaagggtgccaatgctaaaactagtcttggggataaaattattgtaaatgagcagccaatgtattatataaaagctggaatctctaatgccgcgattacattagaatcgcatgatagaagtttcgaggtggtgaatcttgggatacagagtttagaatacattaaaaagttacaggttgatgttttaggaaacattacagaagttaagaaagaaaaaagaatgaggttccctggtatggagggatattatggcgtatcggaatctatatgtgtctaatgatgtgaaaatatctacgcaaaaggaacagctgatagtatctggtatagaaaaaacgagtataccattggaagatattaactgtataatgatagataatcttcattctacaattagcacatatttatttcaaaaattaaatgaatatggcattgtactatttgttattgataataagcatttgccttgctcggtcactttacctttcgtaaagcattcaaggcatcttaaaatgctaaagtatcaattagcacaaacagtgccacaaaagaaaaggttatggcaaaaaatagtgaaagcaaagatacgtaaccaaggacactgtcttagctttttagggttagatggagattatctatattctcttgaaaatagagttaattcaggagatacaacaaatgtcgaagcaacagcagctatatattattttaaaactttatatggctacaattttagaagacgaaatgataatatagtgaatgcatgtttaaactatggatatagtattattcgtggaaatatagctagaactgtagtagctcatggatttgagccagcaataggtatttttcatgataatgaattaaatagttataatttagcagacgattttatggaaccatatagaccatttgtagattattatgttacaaaaaatatcctcttagatatggaagaagattatgattctgaactaaaccctgagttaaaaaaagaaattttttctatgttaagttactgtattaaatctaatgaacaagagcacaccattttaaatagtatagagatgatggtaagtagttatataagttttctttctggggcaagtaaagatctaattcttcctgacctaatagaattaaagcaatatgaatacaaataagtatatgcgaatattagtattttttgatttacccgtaaaatctaaagaggatagaaaagtagcatcaaagtttagggacttcttattaaaagatggttatcatatggtacaattttcagtttatgctagggtatgtaatgggtatgatgctgtcattaaacatgaaaataggattaattcaaatctaccgagaaaaggatctgtgagaatgttagttataactgaaaaacaatatgaatctgtaagaatattggtcggaagtccaaccaagtatgataccattagtgcaacagaacaattgacattcttataaaaagataagaaaataaaatatttttacagatttagagtttgttttaaacaaaaataaaccccagattagttgaaaaatctggggtttatgcgttccaattatattataccaatagaattaagggaactacaacaaaagcacgttgtatttctactggaaataaattatattataccaatagaattaagggaactacaaccacatttgcattgcattttagttgtaaataattatattataccaatagaattaagggaactacaactcgaaagtgatgttccagcaggtttgcatcattatattataccaatagaattaagggaactacaacgtacaaaaaaggctaatttaaagtatacatattatattataccaatagaattaagggaactacaacactagttttacatttgcatctaacgaacatattatattataccaatagaattaagggaactacaacagggaaaagtatggtaatcaaggtaatattattatattataccaatagaat

SEQ ID NO: 3909 - DNA, 4737 bp, synthetic construct
  misc_feature 1..4737: note = Synthetic
  source 1..4737: mol_type = other DNA
gcagattgtgagggaagaacaaaggaaaagggcaaataatcattataaaactttagtgtcacagatcagtgacaaagcctatatgatgttctcacagccgctcattgaagcgtgtgtgaaaatggtgaaagctgttgccggggagagacgggatattccgcatatgcggcagggaacgatcgattacattattaagacaggcagatgtatctgtggcacgccacttacggaaggctcccatgagctggaatgtcttttagaacagagaaattatcttccgcctgccgatatcggatcgctgttaggagaatttgagagaaccggaaatcgttggaaaaaccgtaccgatggaagttatgaagaattaattgaaatggcgcagaatgtggatgacagtgtccacgattacgaagaaacctgtaatcagcttgaaattttgaaccggcagatggatgcgtcatttgatttcgcagaaaaaagaagattgttaagacattaccgctccgaaatggaaaaaacgagtgtggaaaaaggagagtgtacaggaaaaatttcgaactacaaaaaagagattgaaaatattgaaaacaacatgcgcaggcgggaagctgcaaacgaagagaaccgcaagtggagggcacgtctggaagttgcagaagcgctttatgccaagatgaaaaaagaatttgaacagaaagagcggaaaacatttctggaactcaataaaatgtgcagcttaattttgaaaagatgttcaatgcgaaagataaaaagatccagctgaccgaacagtatgaaatacaaatgctttatcagacggagcgtggctaccgggaaggaaaaaaaatcatttccgagggagagaagatcgcccgtaattttgcatttattgtgactgttatggagtacagcagacagaaaaaggcggaaaagcttggagtcagtgaacttgaaggagatacgctgcctatcgtgttggatggtcctttttcaaaactgggagatgaaaatatcaaactgatcgcaggtgtatttaccggaagtctcggagcaggtgatcctttttatgctgaaaaaagactggaaatatacaggtttagattcttatgtaggtgcggcttactgtatttgataaaaaagctgaggaagctttcgcatttgatcagaaaaatggaggaactttaaatggctgattttgagttttttaagaaagagtttgaatttaaaggaaagcatgcaaagatggcacaggaattgtggtgagagatgacacagaacgtacttattttaagcgactgatcgatctgtatgtggcggcagctattgttgggtttcgtgtagacagaaaggcagaggaagattattcgccatttgagacaagcagtattttcccggaacagatgttgaaagaaaaggaaaatctggattttatattacagatgatgatcatgctgaattacagaggaacactgacagatgaagagtgtgtgaaaaaagcttttcagggggcacagacgaaggaagaattttgagcagtataaaaagatgttcaatgattatgtccgcggcggggtggaagagctatacgaacagcttatcatacgaaaggcagatccggatgacaagtttcgtgataacagaacagcaaatctgatggcactgatggaaagatatggtgcagggaaaatgaacgttattccggaaaatgaagatgaaaccgtgagaattcagatttaaaatgaaaaatattgtcaaaaaacagaaaaaaagtatttacaaatgtcggaaaaaggattagtataaaagggaattacaacataccaaataataaccggttactacaataaggtagtaaacctaaaagctctaatcccattcttcggaatgggattatcttttacccgtatttattcaagcgtatgaaataaatggcattgtcccgaaagaggttcaatgtagaacggaagtgcaaaaacatttttacatgtaacgttatgtctgtagttgatgaatgcagaacatggaaaggaagggttacttattatggaggaaaattttcagtacagaatcggattagacatcggaatcacatcggtgggatgggcagttttacagaataacagtcaggatgaaccggtacggatcacagatctcggggtaagaatttttgatgtggcagagaatccgaaaaatggtgatgcgttagcagctcccagacgggatgcaaggacaacccgcagaagattgagacggagaagacacagattagagcggattaagtttttattacaggaaaatggattgatcgagatggattcctttatggagcgttattataaaggaaatcttccggatgtctatcagttgcgatatgagggattagatcgtaagttgaaagacgaagaactggcacaggtgctgatccatattgcaaagcaccgcggtttccgttcgaccagaaaggctgagacgaagggaaaagagggcggagcagtattaaaggcaacgacagagaatcagaagatcatgcaggaaaaaggctatcgcacggttggggagatgctgtatctggatgaagcttttcatacggagtgcctctggaatgaaaaaggatatgtgctgacaccaaggaatcgtccggatgattacaagcacaccattttgcggtcaatgctggtagaggaagtgcatgctatttttgctgcacagcgggcacttggaaatgagaaggcaactgaagaattggaaaatgcgtatgtggagattatgacgagccagcgttcctttgatatgggaccgggactacagcctgacggaaagccaagcccatatgcaatggaaggattcggcgaccgtgttggaaaatgtacgtttgaaaaagacgaatatcgggcaccgaaggcgacttatacagcggaattgtttgtcgctttgcagaaaataaatcatacgaagctgatcgatgagtttggaactggcagattttttacagaagaggaaagaaagactataattgatcttttgctttctggcaaagagttgaaatatggaacgataagaaaaaaattaaacattgatccgtctttaaaatttaatagtctaaattacagtgcaaagaaagagggagagacggaagaagagagagtccgtgataccgagaaagcaaaatttgcaagtatgttttggacttatgagtattctaaatgcctgaaagacaggaatgaggaaatgactgttggacagaaggcagacttacttgatcggatcggtgagatactgactgcttataagaatgatgacagcagaagcagccgtctggaagacttgggattatccggagaagaaattgatggattgctggaactttcccctgcaaagtatcagagagtatcgctcaaggcaatgagaaaaatgcaaccatatttagaagatggtttgatttatgataaagcctgtgaagcagcaggttatgatttccgtgcgttgaatgatggtaacaaaaagcatttgctaaaaggggaagaaatcaatgctatcgtaaatgatatcacaaacccggtagtaaaacgttctgtatcacagacaatcaaagtcatcaatgcgatcattcagaaatatggaagtccacaggcggtcaacattgagctggcaagagagatgtcaaagaactttcaggatcgcacgaatctggaaaaagagatgaaaaagcgtcagcaggagaatgagcgtgcaaagcagcagatcatcgaattaggaaaacagaacccgaccggacaggatattttaaaatatcgtttgtggaatgatcagggaggttattgtctgtattccggcaagaaaatcccgttggaggaattatttgggggagggtatgatattgaccatattcttccatacagtatcacatttgacgacagttaccggaataaggtgcttgtgactgcacaggaaaaccggcagaaagggaatcgtaccccatatgaatacttcggagcggatgaaaaacactgggaagattacgaagcgagagtccggttacttgtccgggattataagaaacagcagaaattactgaagaagaatttcacagaggaagagcgcaaagagtttaaggagagaaacttaaacgataccaagtatattacaagagtagtttataatatgatccgccagaatctggaattggaaccattcaatcatcgaaaagaaaaagcaggtgtgggcagtcaatggagcagtgacatcttacctcagaaaacgctggggactgatgcagaaagaccgttcgactgacagacatcatgcaatggatgcggttgtgatcgcatgctgcacagatgggatgattcataaaatctcaagatatatgcagggcagggaacttgcctatagcagaaatttcaaatttccagatgaggaaacaggagaaatcctgaatcgggacaattttacaagagagcagtgggatgaaaagtttggcgtgaaagtaccacttccatggaattctttccgggatgaattagatatcggttgctgaatgaagatccaaaaaatttcctggctgaacacatgcggatgttcagagagagcttgattatccgggctggatgtacggagaagaggaaagcccaatcgaagaaggcaggtatatcaattatatacgaccactttttgtatccagaatgccaaaccataaggtgacaggttcggcacatgatgcaaccataagaagtgcga

SEQ ID NO: 3910 - DNA, 4152 bp, synthetic construct
  source 1..4152: mol_type = other DNA
  misc_feature 1..4152: note = Synthetic
gaccatcctgatccgtaaaagaagaaagaaccttattaccgtacatcagatcggtaacaatatcactgctctctaagtaaaccgaatccggttgcagattaaatcgcttgcccagctccgttattgccgctgcattcatttcggcacgttgctgcggagtatgaccaccacgcttggcaaacaggtaatatagcgtatcgccttccaccaccaccggcacgcctgttgtcatccgcctgagcgaatcaatacgcaatcgctgctttgccagcttcagggagtccgccgcatcatacttcagcctcatttgctctatctccatcctgagattagcttcattcaaccttgcaacctccaaatcctctttcatcttcagcagatgaaccgagtctgtatctgccctttgagcaacaacagtccccaaagtatcgtcattaaagacatctaataccttctctaccaactgggcagatgcaacgcccgcaggcaacagcaagaaccaaagacacaacgcacgtattcccttcatataaaagcccttaatcaggttatttagaaacaacaaattaattaacgtgccaaacatacggaatgtttttcgcttttcatgaaaggaattaattatatttgcacaaaaaacagaattctcatggatattctttctcttctcggaggtcttctcctcatccttttaggtgccaacggactcacagacggagccgcatccatcgccaagcgcttccgcatcccttccattgttatcggcctcaccatcgtagctttcggaacttccgctcccgaactgacggtcagcgtctcttcggctctgaaaggcagtgcggacatcgccatcggaaacgttgtaggcagcaatatcttcaatacactgatgattgtaggctgtacggcactcttcgctccaattgttatttccagaaatacactgcgcaaggaaatcccgctctgtatcctatcctccatagtattgctgatttgcgcgaatgatgtctttctggatcatagttctgaaaatataatcagtattacagacggactgttgctgctctgttttttcatcattttcctcggatatacctttgccatcgcttttcaagggaagaaagagggagagacggaagaagagagagtccttgataccgagaaagcaaaatttgcaagtatgttttggacttatgagtattctaaatgcctgaaagacaggactgaggaaatgcctgttggagagaaggcagacttatttgaccggatcggtgagatactgactgcttataagaatgatgacagcagaagcagccgcctgaaagaattgggcttatcaggagaagaaatcgatggattgctggatctttcccctgcaaagtatcagagagtatcgctcaaggcaatgagaaagatgcagccatatttagaagatggtttgatttatgataaagcctgtgaagcagcaggttatgatttccgtgcgttgaatgatggcaacaaaaagcacttattaaaaggggaagaaatcaatgctatcgtaaatgacatcacaaacccggttgtaaaacgttctgtatcgcagacgatcaaagtcatcaatgcgatcatccagaaatatggaagtccgcaggcggtcaacattgagctggcaagagagatgtcaaagaactttcaggatcgcacgaatctggaaaaagagatgaaaaagcggcagcaggagaatgagcgtgcaaagcagcagatcatcgaattaggaaaacagaacccgaccggacaggatattttaaaatatcgtttgtggaatgatcagggaggttactgtctgtattccggcaagaaaatcccattggaggaattatttgatggagggtatgatattgaccatattcttccgtacagtatcacatttgacgacagttaccggaataaggtgcttgtgactgcacaggaaaaccggcagaaaggaaatcgtaccccatatgaatacttcggagcggatgaaaaacgctgggaagattacgaagcgagcgtccggttacttgtccgggattataagaaacagcagaaattactgaagaagaattttacagaggaagaacgcaaagagtttaaggagagaaacttaaacgataccaagtatattacaagagtagtttataatatgatccgccagaatctggaattggaaccattcaatcatccggaaaagaaaaagcaagtgtgggcagtcaatggagcagtgacatcttacctcagaaaacgctggggactgatgcagaaagaccgttcgactgacagacatcatgcaatggatgcggttgtgattgcgtgctgcacggatggaatgatacataagatctcgatgtttgtaaaggggagagaacttagatttaacagaaatttaacaatagtagatgagaaaacaggtgaaatttttacaagagaacagtgggatgaaaagtttggcgtgaaagtgccacttccatggaattcattccgggatgaattagttattcgattagaaaaggatgatccgaaaaattatttgatggtacatatggacatgcaaagggagatagattatccaggatggatgtttggagaagaggaaagtccaatcgaagaaggcagatacatcaattatgttcgaccattatttgtatccagaatgccaaaccataaggtgacaggttcggcacatgatgcaaccataagaagcgcgagagattatgaaacgcgaggtgtggtgatcacaaaagttccgctgacggatctgaaactgaataaagacaatgagattgaaggatattatgataaagacagcgacaggcttctttatcaggcattggtaaggcaactgttattgcatggaaatgatggaaagaaagcattcgcggaagattttcataagccgaaagctgacggtacagaaggtccggttgtacgcaaggtgaagattgagaagaaacagacttccggtgttatggttcgtggtgggacaggaattgctgcgaatggtgagatggtgcggattgatgtgttccgggaaaatggaaaatactatttcgtgcctgtgtatacagcggatgtggtacggaaggtgctaccgaatagggcggctatgaatggaaagatagccagtgactggaaaacaataactttgtttttagtttgtactcgcgagatttaattcatgtgaaaagaaaaaaggttattcctacaatactatcatctggtgcaacatttaaacaagaggagttttatgcttattttacaggggctgatatatcgacagttagtatagcaggaatagcaaatgatagtagttttaaatttagaggacttggaattcagagtctggaaatttttgaaaaatgccaggtagacatcctcggaaatatttccgttgtccgccacgagaaccgccagggctttcattaaaaaaattgagggaaacatatgggatttcgaaatattatgatcagcagtaatatgaaactccgcattcaggatcagcagttagttgtgactgccggagatgaggtgcatattccactggaagatattaactgtattttaattgaaaatcagtcggtcacattatctgcctatctgttacagaaagttgcggatagcggtattgcgctttatgtctgtgatgaaaaacatttgccaaatgcagtgttattgccaatggtgcgacacagccgtcattttaaaattttaaaatatcagatggagacgggaaagccattgcaaaagcgtttgtggcagcaggttgtgatccagaagatacgaaatcaggcactgtgcctgcaattactggagctggatggacatgaggaacttctcagaatgtgtaaggaagtacagtccggcgacaggacacatgtggaagccaaagcggcagcatactatttccgatgtatgtacggacttgggttttcgagaggaaatgatcatattattaactcggcattgaattatggatatgcaatcatccgtggaatgatcgcacgttccatcatatgttacgggttagaaccatcgattggtatctttcatcacagcgagctgaataattataatctggcagatgacatgattgagccattccggccattggtggatctatatgtttccagtcat

SEQ ID NO: 3911 - DNA, 23222 bp, synthetic construct
  source 1..23222: mol_type = other DNA
  misc_feature 1..23222: note = Synthetic
caagaaaaactacgccctgttgcgatttgaatcaacgtaatatcttccctccgcgcacctcgcgactccgcgcgaatcctccttgaataaaagatcacgcggaggcgcggggtgcgcgaaggcaatttctatttccatttgttgatcaaggtgcgattctttggaacggaatgaattccgttctacggattcatttttagacagccgctttgtggatcgccggatttgcgccgctggcgggctattccgggctttggccgcgcacggccgccgggcggcccgccgggccgcagcggctcaacagatcggcgatcaggcattgctccagcgcggcgtcgcgcccgcgcgcaatccagcccgccgtcggcgattcgcccgtgatcggattgacgacgcgggtcagcgcgtcgtcgtagcggaaggtggccgcgccggcggtcgcgtggtcgggcttcttcgcgtcttccagccgcttgtagacggccacgtcgaaccagtgtccgccctgggccggcgcgggcgtcacgcggatgaccgcctgccgatgcatcgtctgcaaggtgttttccacccgttgtgcgcggtcgaccgtgtcgcgccgccacggctcgaagatcgtggggctgacctcggccgcggttgtcagcgtgcccagggtcggcacgttgcccaccacgcgggccggctgttcgctttcgatgcggaagtagtcgtccaccacgtcaaccaattgctcccacgcgcagtgcggatcggcaatcgggatgaagatcggattcggataaaccgtcgccgccggctggacgggcgttggttgcacgggaacttgttggacgggcgttggttgcacggggacgggcacttcctgacacgccggggcctcctcgaagccatagcacggcgggggcggacattccggcccgaccgccgcgcagcccgaaaagaacagcccgacgacgcccgccgtcgcggctgcgttgcgcaaaacaatccctgtccaggagcctaatccgcccatgatcggggcggagtatccccgaaacggcccgccgaggcaagatcagattaccgcgacagcaccggccggcggaagggcatccgcttgtgggaaacgccgttctcgctcaaaagccgctgggccttcgccaggtcgttgaccttgatgacggccagcccaccccccttggccttgccggaaccgtccgacgagcagtaggcgtagtcgatattcaggtgttcggtcgccaggcgttcgcagatatttcggaaaccgcccggcttgccggggatttccaccagcaacacgtcggaagcctcgtaatggatattggcctggtccaagaccgacgcggccgtggcgaaatcgtcgggcacgaagcgtaaaacgccccgttcgccggaatccatcaaacaaagcgcccggaacgaggccttgcccttgtgcaacgccgccagggcgtcggcaagtcgtccgggtttgttgaccaacgagaccgacagttgtttggccgtttgcatctcgttcatcctttcatggagtctgagaagtagccccccctttccgagttggaaagggccgattggctcggatcgctggagaagcctctatgtgaatcatacgattctctatgtggatcatagcaggaagttaaaaaccgtcaaatcaggccaaatttcaccaaccgaatgctttgcttaagttattgatatgcaataggatgcggcgttttgactctttggagtgcggcgacttgtcgccgctttccttgcgtcggttgaactttttccatagccaaaacgtcacataggacgaagggactcgcaaacgcgataggccgcgacggacagaccggcgtgggaagcgctattccaaaaatctatgggagaatcgccatgaaccgcctgctcattcgccttgccgcgatcatgttgctcgccgccccggcgtcggcctgggcgcagggcctgttggtggtcgtcgatccgcacgagtcggtccggttgccgcggccgccgcacatctggccgcacccgattccgcaccccgtgccgcctccggcgagctataaaatcaaggaactcgacgtgcaggcgcggctgaccgaccaaatcgcccaggtgcaggtgtcgcagatgttcgtcaacacgggcggccgggcgatggaagtggcgttcgtctttccgctgccttacgacggcgcgatcgagcagatgacgctcctggtcgacggccgcgaatatccagccaagctcctcgacgccgacgaggcccggcggctctacgaggaaatcgtccgcaagaaccgcgacccggcgctgttggaatggatgggcgcgggcctgttccgcacaagcgtctttcccgtgcccgccggcgcgagccgcaccgtctcgctgcgttattcgcaactttgccgattgcaagacggcctgaccgatttcctttttcccttgagcacggcgaaatacacctccgaggccgtcgaaaaggtttcgatccgcgtttcgatcgagagccgcgaggcgatcaagaacgtctacagcccgacgcacgccgtcgagatcaagcggcccgacgatcgacatgccacggtggccttcaccgggaagaacgaaatccccggcggcgatttccgcttgttttacgacgtgggcaaggatcggatcggcgcgcgggtgttgagctatcggcccgacgcgagccaagacggctacctgctcctcctggccagcccggagatatatggagcacagccgccctcggctgtgtcggacgaccattcccggccgagggcggccgggctacaggatacacagccgggggcagccgggctacatcacccggccaagaccgtgctcttcgttctggatcgctcgggcagcatgagcggcaagaaaatcgaacaggtcaaggcggccctgaagcacgtgttgaacaatctccgcccgggcgatttgttcaacatcgtggcttacgactcgaacgtcgaatcgttccggcctgagttgcagcggttcgacgaagaaacccgcaaggcggcgctgggctacgtcgagggtctctacgccggcggaagcacgaacatcgacggcgccctgcgcgccgccctgggccaactgcaagacgcgaaacggcccaattacgtcctcttcctgaccgacggactgccgacgaccggcgagacgaatgaaatgaagatcgcggccgacgcgaagagccaaaatcgtgtccgcgcgcgtatcttttcgttcggcgtcggctacgacgtgaacagccggttgttggacaagctctcgcgagaaaacttcggccagagcgagttcgtccggcccgacgaagacatcgaggaccgcattgccaagctgtaccaccggatcgaatcgcccgtgatgaccgacgtcaaactcgcattcgttttcgacgaagtgaaaaccgaagagggtggcccggtcaatcgcctctatccgaaggactcgttcgacctgtttgccggccagcaactcgcggtggtcgggcgctaccgcaaaccaggcgcggtcaaggtcgttgtgcagggcatggtcggcgagacgagccaagcgttcgacttccccgccgtgctcgccgagaaatcgaacgacgaaagcctcgccttcatcgagaagctctgggcggttcgccgcgtcggagaaatcctcgacgagctggacctcaagggcaaaaacgacgaactcgtgaaggaattggtcgatctggccgttcgacacggcatcctgacgccctacacgtcgttcatggccgacgaccgcgcgaatatccatgacacggccggcaacgcggcccgcgccggcgggcgattgatggaacttggcacttcatccggctatggcggattcgtgcagcgggagatgaaggcccatttgcaacaggccggtcaggcccccgcgtcggccgccgccccgatgaaggccatgatggccgacggcgcgggtcggaccgatggactgagtttcgccagggaggcttcccgcgaggccgacgccgccgagcgcaacgtccgcaatgtcggcaatcggacgtttttccgccgcaacgggcaatgggtcgattcgcaagtaacgcgcgagcaggaaatcaatgcgcggcgcgtcaaacagtatagcgacgaatacttcgagttggcccgcacccaaggccgccgactctcgccatacctggttttcgacgagccggtgcttgtgaacctcgacaaccaggcctatctcatcgagccgtaagggcttggcaaacaagcgtttgtggaaatggcggctcgagcggccgatcggtgggttttcctggaatttcaggccgcaaggaatttccgatggttcaagaatatcgcttgttttttccgatggatggatgtagacttcagtaggatctgagccccggggaagtctgggtcgtaggatccaccagggcccgcaagggccccatttttttcgctcgattaaagccggacgattccaagccgctccggatctttggttgaagcccgtttacagagcacaggcgccagccgttgcagataggcgttgccgccgtgccttttcatataggccgacggttcaatgctttgttttagcagaaacgcggcgcaatcggcggcctgaatcaaatacgaatttctcgaatctctcaaaacggggtcttcgatgaccacctgaatcggctcgtctttgtaaacaaacgccccgccccgttgctggattctcagcggattgctgcgccgcatgtcatcgagaaagcgtttgagttttccgccgtccgtgttgtcgggaaaaacaattccgcgttcgttgggatttttcggaccgggaaaattgccgtagcgaatcgtgttttcaaatcgttgaaacagagaataccaagcccatcggaacacttcattcttgtcgggcactttgccttgcttgtccacgacgacattgatgatgctcacgtcggagagggttttgattcggtcggcgaagtgacggataatggccaatcggtcatgtttgttgagtttgccgatcgacgggtccgccttgcccggcttgttgatcattgtcgcggcatgaatttcggcttcgaggtacacgccgtatttctttttaatccaatgccggaagcgcagcaattcggcgagagtgtctcgccatcgcaattcatggacgaccaatcccgacaggcaaaaaagccgcgacggcgatccatcttcgggcatcccgcaatcgccgctctcgtccgcgtacatcaagtacatgactttgaaagctcgaaaaaacaacgactcttgaatacggaactgatgacagcctatggtttttcatcatgccggtcaacatcccgcgttgcaactgccgtaaagagattccagatgatccgacggcaacggggcggcttccgcgccattctagcgcgacgctaaccaaagtctcggcgttcgcacatcaaacccttgcgccgccctgcaatgatggcgtgcgttcccggggtcgcgaaggcttcggggcggcaatttccattccctttttcggaggtgcaagatgcgagttcgtcgaatccgggccgaagcgcccgccggccgcgccgcgcgtcgcggtttcacgctggtcgagttgttggtggttatcgccattctcggcgtattgatttcgctgttgttgccggcggtgcagaccgcccgcgaggccgcccgccggtcccagtgcagcaacaacatgaagcaaatgggcctggcgatccacaatttcgagtcggtgcacaagaaattacccgcctgcggcgaaggcaccgattacggcggagggctggctccgcgcacggccttctcgaagcactccctgttcacgcagttgctgccctacatcgagcaaaacgacgtttacatccaattggacctgacccgaagctatcgcgacacgcggatcaatacgctgtcgggcaagagcaacgcgcaagtttgccagaggacgatcagcacctacgtctgcccgagcaatccctatgcaagttataaggatccatgcggattcggcgggctggattacttctcgccgtgctacaccgacatcagcgacggcacgaagtcgggcgggaagccggcgggcgtccgcgacgcgacgaactatcgcaccagcggcgccttggccacgaccgacggacggaaccttggcaccgacaaggacacggccgccaacttcatcgacggcccctcggccttctccggccccatgtcgatgatttccgacggcacgagcaacacgatcgccatcatcgaggacgccgggcgggtttgcccgtcggtcggcggcacctacggcggcacgatgggcagctacgtcgaacccgacaccacgaacttcgacgccgccgacatcgccgccacaaccgacgccggaggcgtctgccgccgttccgtctggcgctgggccgatcccgacgccgcgggcagcggaatctccggcccgaccaagggcaccgagaccgaaccctacaccggaaggatcatcaaccagaacaattatcccatcggcgggccggccgctttcccgtggacgaaaaacaactgcggcctcaacgacgagccgttcgcgttccacccgggcggatgcaacgccgtgttgatggacggaagcgtgcggttcctggccgaaacgcttgatccggtcgtgatgcgctacttgaccagccgatcggaaggtcgtccggtcgacgtcgagttttaacatcaaggcaacagccacgcgagccggcgcgacggtccaaccccgcgccggctcgcggtcttttcagccgtattagggccggatcagtcgttcccaggcggccagctccaatcgcttggattcgcccgaagcgaaaatcgccgcgcgggcctcttgctcgaaaaccagcgcgtcgttttcgatgatcgacggatcgccttcctcgacgaagagaaacgacagcagatacttgccgatcttgccgcaattttgccgcgaatggcgatattcgtgacagagcaccacggcgattgccccgtcgctttcgcagaataattgccggttgacgaccagacggccgcgaaacatgtcgtatttggccagggcggccgtcaattcgccggagttccggtagtcgtcgtgaaaaaccaacgcgccggcggcgtgcttcccgcgaacccaggcggcaaccggcggacttacccgatcgagaatggccagcgccggcgacaaaccgcgccatcgcgcctcggcgccggttcccgcggccacgcaccccgccgaggaaatgcggtagggatcgagcttttccaagggattcatggccggcatcgggccgtcgccccgcgaatcccaaaggttcaacaagccgaacgcaacgactagccccgtgagagtgcgggccgcatagcgggggacgttccgcaggtcggcggccacggcgcggccttgcgacttcagccgccgacccgttcgatgggccgccaacgccgcgcgggcgaaaatccgccgcgacgtcgctcccaaagtcccgcaaacgccttgttgttcggtcattgcaatcggctcgggcgaaccatcattactatatcgcaaggctagcgttcaagttgtgctagcattccgttagaatatggttttttgccaagttttgcaagagaaatctcttgcgtccaggccgtcggaaaagcagtgcagcgcgtttattgaccatccgaaatgaaatgcagtgcgtttagcagccgccggtgcggcggcttgcagcggacctagggccgacgtaccgtcggccgctatacatgcgctgcatccttctccgagcatcgctaggcggaccgctggcggcgctgtcgcagggcctcgtaaaacagcacggccgccgcggccgacacgttcaggctgtcggccgcgccgcacatcggcaggcgaacgccgcgaatgtcgtcgccgtgccagagcgccgacagtccggccgattcgcttcccagcactagggccgtcgggccgcgaaaatcggcctccgtgtagagcgcggacgcctccacccgcgcggcgtaaacggtgaattcccgatcgcgcagccacgccaagacctcgccggtcgcggccgcacagaccggcatcgtgaagatcgtgcccaggctcgcgcggatcgcgttgggattgaacaaatcggtgcgcgggtcggccaagaggacggccgagaggcctgcggcgtcggcgctccgcaatacggccccgacgttgcccggcttctcgacgccctcgagcacggcgaccaggggcggcgcatcgccgggaagctccagggcggccagcgggcaacaaggcgtttcggccacgcccaacacgccttccacccggcggccgaacgccaatttctcgaagatcggctcgctaacctgaagcatctcgcagccgctcttggccagcgcgtccaacagtcgctgcgccgccgcgctcgaacacgacgactcgcagacgaacgcctcgagaagccgcacgccggcgtccagcgcgcggcccagctcgcggacgccgtcgattagaatccgcccttgcttctcccggtgccgccgatcgcggagccgcgcggcctctttgactcgcggattgttgccactggtgattaggcgcatggggaagcggactcacgcatggcatggcgctggaaggccaacactttcaaggccagccgcgcggcggccggatcgcagcccggcgggatcggcgacggaacgaactcaacgatgtcggccccgaggagccggcagggcgattgcatcaccgcgcggacgacctcgatcgtctgccgccacgacaggccgtcgggcaccggcgtgcccgtgctcggcacgaccgatggatcaagtccgtcgacgtcgatggtcagatacgcggggccttcgaggcaacggagccgttcgagcgcctcggcccagcggcccggcagttcatgggcgtaaaacgtcgtgattcgcgggctcgaactcgccaattcatattcgcttttcgtctggctgcggatgccgatctgaatcagccggcagccctgctcccagagccggcgcatcaccgtgccgtgcgaccaccgcaagccgttcagcgtgtcggccaggtcggcgtgggcgtcgatctgcacgacggttacgtcggcgagatcgtcggccagccccgcgaccatgccgtgcgtgacggaatgttcgccgccgaggcccagcagaaacttgccgcgcagcggctggacgcggtcccggatgcgggcgaggcagtcttcgagcgcgccctcgtccgagacgggcggcagcacgtgcacccacggcgcgtcggcgaactcgatgtgcgtttcctcgtcgaaggtctcgacgtagcggccggcctcgagcacggcgcgcggcccgccggccgtgcccttcccgtaggaaacggtcttttcgatcggcagcggcaagatcaaggcgtcggcccgatccggccccggcgacggcaatccgagaaatgacgcaggttcggaggtcatgggtttatttcaggtgattccgcccgaggcgtcaagaggctttgcaccaatcggaagcatcgcgggccggttgccgattggaatgttcgcgcaaaaaaagaacgcccccggaggggcgtcccaggatgctcttgcgagcagcgcctcgcgcggacgaaagtccacttactgtgacttgcgggcaatcgtcgctcggatacactggcagtactctaccaggaggtttataatccgtcaagaggcagggggcatttttagaaacttttttctaagagcttacccagaacacgcaaaaagccgctttcggaacggttgctttggggttataggatacgtgctaaatctcggttcattgatgtcgtgtctgtttttgaattaccggttgagaatgaagtctcgggttgagaatctctcaatagccggaggctaacagcctccggggacgggctaacagtttccggggacgtgttttggaggacgcattttatggcaacggcgcaaaaaccgtatctcttgggtctggacctcggcgtgcaatcggccggctgggcggtcatcgacctcgattctcggggccgcccatgcggcgtccgccgcgccggcgtccgctgcttcgacagcggcgtcggcagcgaaaccgaaattgcaagcggaaaggatgagtcgcagaatatccagcgccgccggatgcggctccagcgccggcagctttggcggcgcggtcggcggctgaaaaagatattccacgtgttgcaacgcgcgggccttctgccgccggacgccgcccgaacgcccgaggaacgccacgaactcctcaaaaagctcgacgtggaactttccaagcagttcttgcccgacggcgaccgcgtggcggggcacctgttgccgtacaagctccgcgcgctggcgctcgatcagacgttgccgccgttcgcgctgggccgggcgttgtttcatttggcccagcgccggggattccagaccaatcgaaaatccgacgcccgcgacgatgaagaagccggcaaggtgaaggccggcatcgccgaattgtgggagaagatgcaagcggccgccgcccgcacgctcggcgagtatttttccacgctcgatcccgaacaagagcgcattcgcaagcggtggaccgcccgaaaaatgtatctcgacgagttcgagcgaatctgggcggcccaatcgccgcatcgttcaatgctcaccgaggagttgaaaaagaaaatccacgacgcgatttttcatcaacgcccgttgaagtcgcaaaaaggcctgatcgggatgtgcgaactggagccggattgccgccgcgcgccccgcgcatcgctcgaggcccagcggttccgatacctgcaaaaggtcaacgacctggaaatcaccgcgcccaccggcgaaatctgggcgatgaccgacccgaaacacgccgatctgcgtgataaactcatcgagcttcttgatactcagaaggaggtcgcgttcagttccctgccaacgaaactcggtctctgggcgaaattcggcatgaaaaagcccaaaaaggccgacaaagacaaggatttcgatttctcattcaatctcgaagccggcggcgagaagaagctcaagggcaacgccacggccgtcaagctgcgcgaggttttgggcgacgattacgaccgtctctcgcccgagcaattggccgaaatcgtcgaagacctgttggaatatgaaaagccggacgcgctggccaagcgattgacgaaacgctatggcgtcgctccggcgaaggccgaggcgttggccgacgtgacgctcgaaccgaactacgcctcgctctcgcgcgaagcgatgcgcaaattgctgccgctgatggagcaaggcgtgtctttcgccacggcgagaaaacaaatctatggcgaatatgccggccgcttggcgatccacgagctgcttcctccggttttagaggccgtgcccgcgctgcgcaatcccgtggtttgccgcggcctgaccgagctgcgcaaggtcgtcaacgcactgatccgccaatacggccgcccggagttgatccgcgtcgaactggcgcgcgacttaaaacgttcgcgccagcagcgggaagacctgaccaagcaaaaccgggaaaacgaaaaatcgcgcgacgcggcaagaatgaaaatcgcccggcaattaaactgcgatgaaaacgccgtgagcaatctcgacatcctcaaggtccgtttggctgaagagtgcaactgggaatgtccctacacgggcaagtcgatctccctcgagtcgctcgtcggcaaggaatcgcaattcgacatcgaacatatcatcccgttcagccgttccctggacaattcctttgcgaacaaaacactgagcgacaaaaaaacaaacctggaaaaaggcaataaaacgccctatgaagccttttcgggcgacgcaacgcgctggcgggaaatcatcggccgggtcatgcgttttcgcggctcctcgcggaacgccaagctccaaaagttccgacaagagaagttggacgacgatttcgccgcccggttgctgcaagacacccggtacatgtcccggttggccaccgagtatctcgggctgctctacggcggcgcgatcgacgccgagggaactcgccgcgtgcaggtcagtgcgggccgcatcaccgcctatctccgcgacgaatggggcttaaacgccattctcgccgacggcggcgacgacgaaaaaaaccgtgcagaccaccgccaccacgccgtcgatgccgccgtcatcgcgttgaccgattccaaaacggtcgaaaatctcagccgttcggccgaggtcgcctcggagcgcgggcatcggctcttcgcgctggaggaaatcgaaaagccctggccgacgctcgtcgatgacctgcgccgcgccgtcgaggccatcaacatctcctatcgcgtcaatcgccgcgtttccggcgcgctgcacgaagaaaccaactacagcaagccgcacgtcgcgcgcgaccaaaacggcaaggagatcgaatatcgccacgtccgcaaacccctgcaaaacatgtcggccaacgaagtggaaaacatcgttgacgacacaatccgcgccctggtccaagccaagctcgaacaaatcggcggcgaaccgaaaaaggtcttcgccgatccgggcaatctgccctatctgaccgccggcggcgacgaaaaccggaaaatcttcatccaaaaggcccgcatccgaaaaaacgtcgccgtcgtgccgctcgggaaaaacggctccccgcgctatgccgcgccgggcagcaatcatcacatggagatttatgccgttctcgacgatcaaggccgtgaaatacgttgggaggcccatacggtgaatctcttggaggccacgcaacgcatgagggccaaacagccgatcatccaacgcgatcacggcccgaacaccaaattcaaattttctctggccgggggggaatatctggaattggacgacgacaagggggggcgccgacttgttcgcgtcaccgtgatttcaggaaaaatcgtgcaatttcgtttgcacaccgatgcccgtccaattacgctattaaggaagacaaaaggaggcttcgtcggtctcacgaagactgctgacacattgcgcgaagccaacgcacggaaggtggtcgtcgaccccttgggaaatatccttccggccaatgattaaccgcatcctcgacttttcggagtcgccggcgcggctccgcgtccgctacgcccaactgatcgtccagcgcgaaaacctgcctgaggtctcgatgcccctggccgatctggccgtcgtcgtcgtggcccatccgcaagtcacgttcagccaggcggtgctttccggtctggcctcggccggcggggtttttgttacgtgcaacgggcagaacttgcccgtcggcatgatgctgccgctaacctgtcatcatgcgcagaccgagcgcttcgccgcgcaggcccgcgcggccctgcctgtccgcaaacggctctggcgccaactggttcgggcgaagatcgccgcccaggccgcgctgttggtcgagctgcgcggcacggacttcggcctccaacaactcgccggcttggtccgttccggcgacccgagcaacatcgaggcccgcgccgcccgacgctattggtcgcgcctcttcgccgacctcgactttcgtcgccaccgtgaaaacgaagaccaaaacattttgctcaactatggctacgcggtgctccgcgcgatcgtggcccgggcgatctgcgccgccgggctgcatccatcgctgggcatccaccaccacaaccgctacaacgctttctgcctcgccgacgacctgatggagccgtttcgcccggcggtcgatcgcgccgtggccgaatatatgagcacgcacgacgaaccctatcaactggaatcgtcggccaaacagaacatcatcggcgaattgacgggccgtttcatcatcaacggcgagcagcggacgctgttcgacgcggccgcccggatggcgtcgagcctcgccgaggtgttcctgggcaatgccgagcgattggagttgcccgactgacaaggcatgatgacgacaacaattttcacgcaaaggcgcaaagacgccaaggcttgaaatagtttctgttgcgaaaagcattttgtcgcctttcgctccgcaacagaaacaaaataaatccctttgcgtcttcgcgcctttgcgtgaactacgaagttgaagtgccaagcgattttcacgaagcggccggaaggagttcaagatgccgcgaaaagaattggttctatccgggtatcaaggcatgtggctttttgcaatgttcgacctgcccgtgacgaccgccaaggcgcggaaacgctatgcccggttccgcaaattgcttttggaacagggcttttcgatgctgcaatactcggtctacgcccgctattgcgcaagcgaagagatggcgacgacgttccgcggccggattcgtgccgaactgcccccggcagggtatatccgcctgctggccgtcaccgatcgtcagttcggaaaaatggaaagctacatcggaaaaatgagcaaaccccttgaaaatcctccttcccaacttacgcttttttaacggtcttgcgtccgcaagggcttgtggcgtaaaggtttgtgcccgaggtagtgtatccgagcgacgattccccgcaagccacagcgtatcgagattttgacctcccgagacgctgattcgccgactcttgagtgggcgagtcagcgtctcgggaggtcgcgccgcaaaaatgccaacgcctccgccgagaacctattccctcgcctccgcgccctcaatacacgaccgccgcgtcggcggggatccagcagccttcttgatcggcggccgggcggatttcgagccagtcgccacgacgctggacgacctcgaactccgtcccgtcggtcaacggcgcggtgaaggccggctcgtagctggttgaattgcccttgcgcgcaatgacctcgtcggccaccacgacgccgtgttcctggtggtcgaagcgaaaccagtcgtagccggccgagaacgcgaggatcgacgcgagcacgacggcccccacggccgcacgcccgagccaccgccgctgcagaaccaagccggccagccccaagcccaacgccccggcggccacgcccgcggtgagacgccacttgcccgggtagctgatccagtcttgccagaacagcagatgctgcacgagcggcttcgccacggccggcgcacccgcgatccgcagcgcgtaatcaagattggccgccaggtaagggtcgctcgggcggtagcgtgcggcctggcgataggcggcgatcgcgcggcccggctcgttggccttcatccatgcgttgccctggttgtagagcaccgcgccgcacaccacgcccgagtccaagagcgcctgatacatcgcggccacgcggcggaaatcctcggccgaggcggcccgatcaaacgcggcctgggcctgctgaaactgacggacgacctccagatcgaccgaccggccacagcccgggtgtccgaccgccgccaccgccagccccagcgccgcaagtcccatcacccatcgtttcatcccagccgcctccggagcttcaacgatcgaaccatcgcgtcaaacaggacgtccgcctcgcgggccaagccgtctgcgccctccggcgagggcgcgtagcgcgccgcctcgcatgccgcaagcgaccggccgacccgctcgacgagcgcgtcgtccacgccgcagtcgcgcagccgctggcagacctcgcgcggcgtgagcgccccctcgggcacgccagccgcgtcggccacaagcgagacgatcgccgcccgaatgtcctgggccccttcggccgtctgccgggcggccagcttcgccgtgccctcggagagttttgcccgcgcccggcccaccgccgtgcgacgtcgccgccgtgctgggtccgcctggagccgccgatagcgccgcgccagcacgaccgccgcggcgtacaccccggccatcccccccagcgccgcgatccacccgagcggctcgacccgctggtccgccaactggctcgggtcggtcgcgttggcaaaaatgccctcccggtacagctccaactcgccggcgccgtgctccggccgcgggccgccgacgatcgctccgccggccagccggtcagcctccgcgacgcggatcgggatcggctcggtctggaccgtgacgtacttgccggccgccacgtcgaaaaacgaagcgggaatcggcggaaactcctccagacccgcccgcagcggacgcagcgtgtaggtgaactcgcaccggttgcccttgagctcgcgggtggccttgtacgttttgaaattttccgccacggcggggatctcggccagctcgggcgccatggccccggcgagtgaaccctcgcccgagagcgtcagcgtcagcgtcagcggatcgcccacgtggcattccgtcggggtgagcttcgccgaccagtcgaaccggccgaccgcgcccaggtagctctccggccgctcggcctcgggcacgggcttcacctggacttcgattgcgggggccacggcgcggacctcctcgccccgcagttggtcgcccgaggccccggaggcaaacacgcccgccagcgacgccggcccgaaccggtagcgaccctcccgatcggccacgaaccgccgcgtgaagtcatagacccaatactccgccggatcgccgtccgcgtcgcgctgcgtcacccgtcgcggctgcggctcgaaagtcagcgaatcctcctcgccaaacagggagaagatcgaatctcgggcgtagttgttgatcccgaaaccggtgcccgcggggttggcgagtccacggagccatcgctggtcagacacgctgggcacgagccctgccggcaaccggccgtcttcgacccacgggatcagaagtcgcggcggacgcggcaggaccgacagcggatcctgcccagcccgtgggccaggcaacgccttgacggccaccgacagcgtgacctcaagcggctgggtcggatagaccgcctccggcttggcggtgatccacatccgcacgaggtcctgccgatccggcgggatcacctcgatcgagacggcccggccctcgagcgtccgcccgtcgacctgggccgtcgggccgggaatcacgagcattccggctcggcgcggcgtgagctcccagacgtaggcccggccgtggtggacaatctcggaacgctgcccgttgatgatcgtaatccgccgcgagctaaggtcctgctgccccagcggccgcacgtcgaaatcggccatctctcccagcaccggcggcgtagggcgctcgacgtggttgagcgtcacctggtactggaccgactcgccgaggtaaacccggtttttcgacagctcgaccaggacctctggctcctcggcagcggccgacgctccgcaaagggcgaccagccccgcggcgaatagtgctttggcgattctcgtcatgcgtcctaccaatccttctcgacgtcctggggccgcgacagatagagcttgatggctttgtccatttccttcttctcccgctgccgctgccggatctgaagcatcagagcctcggcctgctccttcgagacgtcgcggggctcgcgctgtctctcttgtctttcggccttttcctgctgctgttgcggctgcgggggctcgggttgcggcacgccctgcttgtcctggtctttcttctcttggtccctcttgtcctgatcctgcttcgcttggtccttcttgtcctgctgatttttgtccttctgatcccgcttcttgtcttggtcctgcttctgctggttctgctgctgtttctcgtcttgattcttctggctctgattgggttgctcaagcggcttggcgatctcgcgcaacagccgcagcgcctcctgctgcttgggtagcgcgtcgccggcacggcccgcgtccagatcccccgccgcctgggccgcgagctcctggaccttcggtcccagcttcacagccagctccatcgacttgcgcaagccctcctgcttgcgccgcgccgcctcggcaacggccgcctgcggatcggccggcttggatgcctccgacgtgacaggcttcgcgcgggggtcggcaggctccgccgtcttctcgcgcatcttctcatccgttttgccatccgtcgcaggcgcctcgggcgatggcggcggcaggttcttcagcccctgccgggccttgcccaccatgatcggcgtccaacgctcgacgaaccgctgctcccagcccgtctcggacaaatcgtcttgcgtgattccaggacggtgctcggctctatcgtcgggaggaacgcgctccgtcgcgtccgccgccgcgggcttcgtcgcaagcgtctcagccggcccgcgcaccacggacgtgacttggccgaccagaccctcctccttcttgaccgacttctgcacgagctccgggtagggcgtcaccaccgtggccacctggtcgagctcctcgatcgcgccggcctgcgccacccgagcctcggagaacaactgctcgttcaggtgctcggctgccgttcgcatcgactcgcccgcccgcgtggccaactgaccgagcacctcgatcgcccttttctgctcctcggggctcatcgccgacacgcccgagcccggcgcggccaggcggttggcggcgttgattggatcaaccgcgcccatcgaattgggtccagccggctccggtgaggccgagatcgcctgggcaatcttcgcacgcaagggctcgatctcctcgatcaagtcccgttgtgcctgcttcgcccggtgtacggccagccgctgcaccgggctcttgggcatcgcggccagctcgggcaccgcgctccgctggccgcgctgttgctcgtcgagccaatcgagatactcgcccaagttcatctgctcgcgtcgccgctgccgatcgcggtcccgccacgtctcctccattttccggccccacagccgcgccagctccaggttgtgccgcgcgtcctcatagtccggctcggccgccaacgcatcgcggtagtgggtgatcgccttctggagttcctcgagtgccttcgagcgaacctcgggcgccgcctcctcgggcttggggcccaaagccgcctgggctcgctccagggcaagctggcccaggttgtagtggcacgccgcagccagcgcagcgtccggcgtcaccgccgccttgacccacagctcgaccgccgcgtccgtctcgcccgtggccgccttggcgcaggccagatcgaagaggatcttcgcgtcctcgggccgcgcagcctgggcctcggcaaacgcccgggccgcctcctggaattggcccgcctcgaactcggcaagcccctggcgcaccttgcgcggcgcatcattcacgcccgcggacgccccgccacaaagcgccacaaggccgatccccactgcacagctcacaagataccgcacaatcagtcccccgacttcatctggacgcgtagggtaggacgcagtcccaccaatcccgttctttggtctcgtaagacaataaactaccgtaacacttcagccgaatggtggccccttgtcatcctgagcgaagcgaaggatctctagctcgctggttgtagagatccttcgctgcgctcaggatgacgtggcaaattacggcaagttattcttttacagatcctttgctgacaatcagtgctggttcccggtgcgacttcgtcccaccctacatctgaccattaaccactaaccactaaccactaaccactggccactaaccactggccactggccactaaccactagccactctcatccccccgcccatactcgcccacggccatctgagctaacaagagcgccaggccagccgcggcaaaccactggaatcgttcgtggtagcgccggcgctcctggctctgatactcgccgcgcgccaggctggccagatggtcttcgtagacgacctggcccaggtcgtaggccttggtgcccgccgggatgtaggccccgccggtcaggatggccagcttcgccagcagcccctcatcggccttcgcccagacctccttgcctgcataccgcatataccgcagattaccagactcgtcccgaacggggatcctggccccctcggtcgtgtctcccatgcccacggtgaagatcctgattccccgctctgcggcggccctggcggcctcttccgggtaggactcgtggtcttcgccgtcggtgatgagcacgagggcctggtcgcggtccgttcgctcgggcagggcctcgatcgccttgcggatcgcgtcgccgatacacgtgcccccccgcggcgcgctggtcgtgtcgatctcgtcaagcatcatctcgaagaagccttggtcgttggtcagagggaccttgacctccgccttgccggcgaaggcgatcaatcccacccgatcgccacggacccgtgccaagagatcgcggatgtccgacttggcccgctccaaccggctgggcgcgacgtcctcggccgtcatgctccgcgaaacgtccagcagcacgaacacgtcggccccacgctgggcgacctcctggaaatagaccccgaaccgcgggccggctgccgcgaacaccagaagcccaatccccagcacgatcgccccggctttcagccacggtcgcgccggctggcccgccggcaagagccgcccaagcatcgcccgctccgcaaatagctgggcggtggccaggcgctttcggtgggcgtacacaagcagcccggccaccaccggaaggacgatccacagactccagagataatgcgggtgttcccaatacatcgagtcgtttcctcacggcagcgtgcgaaatcgcgtcgaaactagcgtcacctgcgccaagatcaacgccaggcccggcagcagaaaccagcgatacagctcccgatactccgtgtagagctggccctcggaccgcgtcttctcaagctcgtcgatccgggcgtatacgttcttgagcgcctcggtgtcgtccgcgcggaagtgctgcccgcccgtctcgcgggcgagcatttcgagcgtcgcggggtcggtttcgacctccgccatcttgagcgcgacgcggcccgagcggtcgcggacgggaaagggcgccatgccgcttgtgccgatgccgatcgtgtagatctttaccccaaacgccttggccgcctcggcggccgcggttggatcggccagacccgcgttgtgggccccgtcggagagcagaatgatcaccttgctcttggccggagcgtcttttagccgatcgacggccaggaccaccgcgtcgccgatcgccgtggacagctcctcctccaggatccgggcgttgaccacccgaccctgggcgtcgtagatcggctcgggaatctccaccgaatcgagcacctccagaagcgccgcgtgatcgagcgtcaaggggcatttcgcatcggcaaaaccgccgaaggccaccagaccgatctggtcgtcgggacgcccgggcagctcgtcgccgtcgccggccacgaagtcgcgaaatacccgcttcacggccgtcagccggtcgacccgctcgccgtcgagcgtgaaatccatcgcccccatcgagccggaacgatccaggcacatctccagggcgatcccctccgtctggatccgaaagtcctcgagcccctgctgcggccgggccagagcgaccgcaaccagcgccgcgccgcttagaaacacccatggcagatggcgcttcacccgcaccgcccacgtccgaggcaagtcggccaccagacgcacgtccgaatagagcacgctcgccggccggcgacgcaccgccaggtaggccatcacaccgatgggcgccaacaacagaagccaccagggatcgtggaaccggaagctcaacatgccacttcccctctactcgcctggggactgtcccgatttcggcgccggggactgtcccagtttttgcgcagcaaaaacaggactgtccccctctgtatccaaaaccggactgccctcatccccctcccctccgcgctgataccccacaaaacccttcgcccgatccaggctggcctcgatgtcctcctcgcgcggccgatgggccgcgaatttcaccaagtccgccgcctccagaaagcttttcaggcggcgattctccgccggcgaaaacgtcgcgcgcacggcgatctcgcgcaaaaactcctcggtcgtctgctcgggcgcccgaatggcggtcgtttgctcgatgaaccggcggaccacgccggtcagttcgatatagaagcgcttcacatcgcgatgggccaggtcctcttcaataattcgctcaagctcacgcatcgcaatctccgccggcgtgagtatccgcggcggggcaatcgctttgcgtccccggcaatgccaccacaggactccggcggccgccaacacgaccagccctcccgcaaccccccaaatccacgccgcataggaaaatggcagccccagcggtcccgccttcggacgtaggtccgccagtcggggggcctccgcgtcgacggccgagcggacctcgaccgagagcggctcggtcgacacgacgtgctcccgcccgtccccctcgggccgcgtgtccatgaacgtcacgtcgaccggccagatctccagttcgcccgtgtgggtcggctccagcgtgagcacctgttggcgaatctcgcggccctgttcgatcctcgcaagcggctcgcgcagctcgacgaccgcgaaatcgccaaacgcctcgccgaacgccggcggctcgaccgtgactcccgccgcgtggtcaatcgacaccgtgagcgtcacgcggtcggagagccgcggccgcgcgggctcgacctcaacagtgacccgcaccggccccgattccacctggctccgcggtggcgcgaccacagccggctcgccgccgccacaaccaaccaccaccggtgctaccaagagcaccatcagcatcgccggcttgcagggcatcttgtagggtgggacaaagtcccaccggaagacggtggtggaacttcgtcccaccctacaatttgacctgtgggtcgtggctcggtcacgatacgcaattacgtacatcagcggaatcgcctctccc

SEQ ID NO: 3912 - DNA, 23204 bp, synthetic construct
  source 1..23204: mol_type = other DNA
  misc_feature 1..23204: note = Synthetic
atttggtagttggatggggggcgaccgcgacggccatcctcacgtaacttccgacatcactttacaaaccgtgttgtggctgcgtcatgccgcggtcgaggcccatctcgatacctgcaagcgattgcttgaatcgctgagcatggcatgcagtcacacacatagctgcgacgatttgcttactcaaacggagtccgcttgcgagaattggccagccttacaggccgaactcgaaggacttgcaccggaggaaggctaccgccagtggctgcgcgtgatttggtggcgactcgagcagacccgcgcgcttggtctcgaaggaccttggcccgatggtgcctatgtgtcgtcgaaggagttggccgccgatctggagttggtgaaaagtgcattgattgagactggcaatgtcgaaatcgctagctcggagttgcaggcgtggctcgatcagatcacggttttcggattgcacttcgcccggctcgacattcgtcagcattccgaagtctataagtcggtaatcgaagagatttggcgtgctacgcgactgatcggcgatggcgaactgactgaagaacgccggatggaggtactgcaacaaacattgccagtcgccccgaacctgtcgccggtcgaggtgtcgagcatcgcccgcgagacgcttcaactgttccgcgtgctccgtcgcatcgctcgccgatttggcatgggaccactcggcatgcatgtagtaagcatgacccacaacgcgagcgacttgctcaatgttctctggttatggaagtggtcggagcgtgtcgacggaggccatcccagtgacccggaactgcgactgccgattgtgccgttgctcgaaacggtttccgacctgcagcatggatcgcaagtgttgcgcgatgctctggcagtcaccgagtatcgcgagcatgttcgtgcactcggcgatcagcaaaccgtgatggttggatacagcgacagcaccaaagatggcggctatctggctgcgaactgggcactgcaacttggtcagatcgaagtgttcgaaacctgtaagcaactcggcgtgcacgttggattcttccatggccgtggtggctcgctcggccgcggcggcggccccaccgcccgcgcgattctttcgctgccaggcgaaacgttcgacggctcgttgcgattgaccgagcagggcgaggtgttggccgaacgatacgacgacacgctggttgcctatcggcatctggagcaggtgttctggagcacgctcatggcagcaacgcacgattattcaaccgaccagatcgacgtctggcgaggcttcggcgaacgcatggctcaatgctcgctcaaggcctatcggtcgttgatcgagcagcccggctttgtcagcttcttccgcaatgcgacgccgatcgacggcatcgaacggttgcaaatcggctcgcgccccgcgaaacgcaaggggagcgatcggatcgaggaccttcgagcgatcccatgggtcttctcctggacgcagtgccgatgcttgctgcctgcttggtacggaatgggaaccgcggtcgctgaggaattaaaagatccagaagcaaccgccaaactgcaagagatgtaccgcagctggcgttacttccgtgccatggtcgacaatgcggtgctggcagtgtcgaaggccaacatgccggtgttccgtcgctacgtcgcattggcaatggagtcggccgccgaccccgaaccaatcgagcggatcgccgaggcaatctatgccgaacaccaacgcacccgcgaagcgctggaagtgatcaccggcagcgaatccttactgcaagacattccttggctgaagcgttcgatcacggtgcgaaaccggtacgtcgatccgctgaacttcatccaagtcgaactgctccgccgaaccaagctgaaaacaactgacgaagccgccgtcgaggaactcgaccgggtgagtcagctagccatcaaaggcgtggcagccgacatgcgaactaccggctaacgaccgacaatcagcaccgtcgacgggggggggacggacgaggttcccactaagttaccggcttggtagaatactcggctgcggacttttcgccatcggccaagagtcccttgcccatggcaacgaagcgttgcccccgtagctcaggggatagagcatcggtttcctaaaccgtgtgtcgcaggttcgaatcctgccgggggcgtttgggtctagtgcatcacgcggttgctgtagagcggcaggtggcggtagtagacctccaggatgtaaatcgacaggcaggtggtgtagagtcggccgcctgcggtgccatgacggtcgcccgcttgagtccagctgccacgttcgcggcccgttttttcttgcttgctggggagtaattcgcgcatgatgccgttccactctttccagggctctccctccatgtgatgcatcacctgcgtcgcatagtaccagtgatacatattgcgttcgttccactccggtaagaagcctcgcagatagctcactccgtctacaaggcgatgatcgtctcgagaccatcccaggtactgccggcaaagcaagccttcggctgtcatcgcaggggtcacactttggttgggttggtaggaatagcgactgccatattcgtgatcgaagctgttcaagtaatttcttaggttctcgaacgtgtcgctagggacttcgacgccagccatccgggcgctctgcagtgccatcgcaaaccaaccggtcaccgaaaggtcttcatcggttccgggagtgtaacgccagccccctttcttggtttgaatctttacgcagtagtccaccgctttttgggcgggcttacgaagttcgtagtcgcctgtcatggcatagagttcgcataaagccatcgtgcactgggcgtgggtatacaggcggtcgttgccgacttcgccataaaaatgcccatcgtcgtgctgttgtgaaaggagccaatgccagcctcgggcgacaactcggtagaaaggatcttcgggcggcgatttgtgagtatgtccatgcccttgaaaggcgagtagcgccatggcggtggccgcctcgaggttctcacggctagtcgccccaccacgataggggccctgtaaactccatgaaccatcacgtcgttgattgcgggcgagccacttgagtccctcgatcacggcgttctcggtgccagatgttccaccggtggctgccagcatcgcttcgcgcatgccaggctcacgaccttttagctccagtccgactgatatcgaaggagtatcgctccccagcaccagtccgttgggttgaatcgcagtcagatcaggcatgctgaatgggttttcgaccaccggcaagtcctgcggcatgatttcgtcggtctgaagctccaggtcggcggtgggagtaagatcgggaatcgcatcgagatcggcatcgatgtcgttttcaccaaactccgccaccaagacgaacgggctatcctccactaccaccatggccaataggccaagcacaatgaaagccaccatgtgtattgccgcactcaaaagccacggcggggcaccgcgaatcaccgagccgaagtcgaacagcggttcgaccagggcagggggctcctcggaattggggtccatggccgaagctggccgccggccaggaggggtgatatcagagtcgatcgccgacggcagctcaaccaggtcgagatgggcatcggcggatggcatagaaatatactcagaaattgcgagggtttaggcgaaccacgagccaaccgaagggtctctataggaaacctatcgaccacgaggcgagccggcaaccaagttgccagcaccagcgggtcgaaacatcggagaaagttccccctgacgatcaaccaatatatatttcggcaagaatcgctcaggcattcccatttcgatggacgatacgctttatttgtgaggtagtattgctggtggacgcccccctttgccggagtcggccacacacgatatactctttacttcccggtcagggcaaatagcccagtaactgacccgcaggaacaaatgtcgcggggtggagcagccaggtagctcgcgaggctcataacctcgaggtcgtcggttcgaatccggcccccgccactttttctaaacccaagccaaacctggacttaggttacccggccacgcgagccggagcggccctttgccgaagccaaagagggaatgctaagagggatgttgcacagacatccctctttgcgccctctgcaactgcaaaggtcgtccccatgccccgcctttttcaccggccgccgaagtaccgtttgcacaagacgaccaagcaggccgtcgtatcttttttcggcaagcacatctatcttggaccgtacggctcgcaaaaaagccatcagcgataccaagaagtgctgaaggactgggaagcggctcggcaccagccatctgaacagcggcaaactgacgaactccccctggagcccgccgagaagctcgtgctgagcgttactccaaacatgctgcgagagaagcggcttgccggttcgcccatcaccatcagcgagcttatctacgtctaccggcaacacacccacgagtactaccgcaaaaatggcgaggtgactcgcgaggcgggggcgatcgacgacgccttgcgtctgcttcgaaaacaccatgcaacaacctacgttgccgagttcggtccgcttgctctcgatgaattgcggcatgccatggttagagagctggattggtcgcggaagtacattaacaagcaggtcaatcgaatcagggcgatgtttaaatgggcatcgtctaaagagatcgtcgatgccgccgtgcctgtagccttgcaacagcttgcagggctaaagaagggaagaactaaggcgagggaaactgaacgcatcacgcaagtggacgatgctgtgatcgatgcaacgcttctacatctccccccgatggtagccgatatggttcgctttcagcgtttaacgagcgcccgacctggggaagtatgcagtctttcgccaggcgatattgatcgttcgggggaagtgtggatttatcgaccagcggagcataagacggagcatttcgaaaaggaccgagttgtagctatcggtcctcaagctcaagccatcttgaagcagtacttaggtaggttagagaccgactattgcttttcgcctgcggagtcggaacggatgcgacgagccttggcgacagctcgacgcacaacgccactctcttgtggcaatcgtcgaggcaccaatcgcaagacatcgcccaagcgatcggccaacgatcgctatacaaccgccagctaccgccgggccattcatcgagcctgtgacaaggcaggtgtcgataagtggtcgccaaatcgcatccgccataccgcttcaacagagattcgaaagcggtttggaatcgacgcggcaagagccgttgacggacatggttcgactagtactaccgaaatctatgcagagctagacctgcaaaaggcgatcgaggtaatgcgagagattggttagagccctgcttcgtcgagagcagaatcaattgcaccacacaggtcatccacttcttggggtgtttccaagacgggattgccgataaaccgctccagtgcttccagggaagcaaaacgaatccccccaatcatgacggtatccaaacgtcggccccgagcccctttggtagcccaccgatagagcgttgaatagtgaatctttttgcctcctcttttgggcaagagattcggtaacgcctttagtgggatcagtcgattcggatcggtagttcgatttgtcatgatatgttcgtccatgattgggggattgagacggaagagaccaaacaacacttgttgatctgcaacgagaactggcacgagtcaatctgtggtttcgtggacatcgacaccgaatccggccccgacacacgaaggccaattcttgcatacccacagagtatagttggagtcccatttcatttgagttgacgggtagcactcaccacatcgtatgcaaaacacctcgcaggcacgcttgggaggacgataggggtctctgtaatcgggggctgatgaccgacggagaccccgtctatgcttcttgtagtgacgagcctttgcttgttttctactgcgtttacttgccatcgcacgagtcctttctagtaacaaaaaaagagtgttagtaatcaatcgccgtagagggttccacgccgagttccaacgctttgcgatcgacttcaatcgccatattgcgcttgccgactccgccctgcagatcagccaggacttcgcggaagaattgctcgttgtcttcgatcactttcgagatgcgggcatacatgccgatgaagatgcccacgacctgggctatctgcttgcttgagtcaatgtgacctttggggagtgcggtgagatctgctcccactgacaaaccggtccagtccttaaagcgttcccgcatgagttcccaatcggtgtggttgggagtgcttttaggatgcttgcgattcactgggccgtctgtgagtcgcaaccaatcttgagtgagcttgctgatgatggctgagcgtttactgatccagtcgtcgaccgtatcgactccgaactgagttagcttggcacgccgcagctgtatctcgatgcggattgctgcttctggcagttttccccatctgcgactgataagcaggccacgcttgtaaggattgtgcgaggtctcttccagcttgtcgtatacgacgaggcgcagaggtgatttgccaatggcaaagccggttggtttgcgggcggccaggtgctcactggcgaatcgcaaatcatggtacgcttggcggtgttttgcccgcgtgaccatatgcccttctttgaaggcatggtacaacgaatcgatggcaacacctgggaggtcaacagccgcatcgactctagagagggcgtgccggtgaatcttgcttccgagtgcctcaaatagtgcttgcatctcccgccaagtatccaggaagcccagcctcattagagtcgccgaagtggcttgggccgtggcgttaggcgtatgaccttcgcacttgtccgaatctctcagcagaagctcaatgccttgtccgctttggagcttccacttaatggccaatgcccggttgccacctcctaaacgaccgccctggggagccacaacaagccggtggtctccaagatggagaacgtcgttgtttggtggagtgccacgtttaggatcagaacgctctctcgatcttgcggatgcctgtgctatttcgagttgtttctttaaggcatcgaagtcttcgtactcgacccagaagctaaccgtgagatagtcttcaccgccggtagtgaggttctgccagggggtgatactagctgccccctggctgtcttcccattcgccaggatcgaacgagaggtcggcgtccgatagataggactgctgcgcagccgtgttgtcgccttcggcggggactgggggaccccccgccgttcccccagacccccttcccaccacctcttctctgtgttcctggggcgggtgagggttctgtcctccgctgacgggagccggctgcgccggcccccgctccgcggcggcttgggaccgccggcgcggagcgggggtcggcgagccttgggagtcgtgttcagattgattcgagctgttcatgcccgaatcgtagataagttaccgtgcacaaccccggatagtttctatccagtttttgtccgggggcgctagcatgctgagtttcgacaagtactgacggatcattcggccgaaatcgtcgttggttttagataagcagagttctgcaatgtcgtctgcacggctttcactcaggtcaatacacagttcttttagttcgccagcatcagggcggtcatctatcaaattcgtaatgcctgccacccatgcactacagatgcccaacgcggcagtgttctttctcggcttcctgaatggcgtgctagttttccagactcgcaccattggttgccgatcgcccggctgctcctccacccacttcttgacataccgcatgcgtgcggacgtgtgatctagtcgtaccaaggcttctactgcatcggctgctgcagcccctccctcttttactcgttttagtagctgtggtacttcgcagccatacacgagccagcacggaatccaaatccacagatagaacgcaaacgcaggagggatatcgttgtcgtcgtttgcctcttcttccatctcaggcaactccagcaggctagcaagagcgtcggagacgtcgtcagccttgtcgtacgacattggcgttaggaggccgaccaacaaggcgaaaagttcccgctgtgcttcctccgtaccggtttggggatttcgcagtagtttcaaaagtgcgcgtgcttcgtccccctcttcctctccgagcagccccctgaagagttgtttttctaaataggcagggtgggtatagaacttgagccagtcggggtggtcggttgggggatcgccagtaaacagccccgttcttgattgtcgatcggcgaggaacgcgtcaacttcctccacgctatccatgccaagaagagccaagccactcgccaaaaggctcctccccttcgcaaactcgctgcaaagtgctcgggtgtccctgattccgttcattgtatttctttccttacagctgtagatatttcagctccctaccccttctaccatgcagaagaaccgattatgcgtttatttcctcactaacggctaacagtccgcaggtggcaggctggggattgccagggttttgctatttccttcaaagcagcttaccaacgatgaaaccagagtcgagatagccgatgttacagtacatgacaggcctcctgccgtcatgttgtccagcaaaatgcgtaacagctcgctttttgcatcttgatttagcatttcgtatccctgtctgtacatttcccggacacggatgtccactagcggccgaaatggctctatcaaatcatctgagaggcagaacatgttcccgcggtttgaatgcttgaggcctaagcttggatgtaatccagctccaactaatgaacgacttattgcggcacgaagaattgcatagccgtaattaaggaatccattgactcccgagcttttcggatcacgacgaaaaggttcggaatccagggcttcggaatcgtctgcatttagccaattcgcccaatataccttggcgccctgagcctccacattcgtggtatccccggaacggacttgtcgactcagtgcgagcaatttcttgtgagcaggttgcgaggggctcagtgcacatgcctgagctctcaacttcgcgactatgagttgcttccagagtcgcttttttaacggttgagatgcggcgacttggtcgttaagccgccatacaacttgagtgtgacttgagagcggcaggagcattgcaagcggctgatgatcgtttccgcataaaatgacaacggcatcttcatttgcaagattagttagcgcttgatgagtatatgtcgcctgtggatgtgacacgactaccacccccacctctgaacatggcacctggccgagaagctcaccctcatgttttaacacaagctgcttgtgacgaactgatagatgcgcagctttttgggaaatctctacagttcttttcattgttgtcagccctaacgattagcaaaagatggcattcctgaaagccacactttcacattagtcagccgacatggcgaaatccaatgaactacttgtaacaaactactgtatgcgcacaaaaaaacgccccaagaaggggcgtagaaaggttgcggatgaaccgcagcgccttgcgagcaaaagccttactatgattagtggcaatcgccgctcggatacattacaaatattattgcgtggtgtacatttagagtcaaccgtcttttccagggggatgtgaattgtctgcgaagatagaatgtgagcagttgcttcattatgggctggggattgatgccggttgtggctcggtcggctgggccatggtattgcttgataaagatgacaatccggtcggcctccattctttgggagtccgtcggtttgaggccggagtcgagggcgacatttcacgggggcgtgaggaatcaaaatcgcaggcccgccggttagcacgtgggcctcggcgaaatacttggcgtcgacaatggaggctgagtaaggtctttggtgtccttcaagggggcggattgttgcctgttgctgaatcaaccgaccatgactctcgccacaaactgcttttatcccttgatagccaattagtggacgatttgaaactcatttcggatcgtcgtactgcacacgtcgttccttatacgttgcgcgcaagagcactagatggcccattaccgctctatgctttggggcgagccttttaccacttggcacaacgtcgcggctttctttcgaacctcaaagctggaaggggcgacgaggaaaccggcaaggtaaagcaagggatttcacaactaagcaaagatatggaaacctccggggcgcgaaccctgggcgaacacttcgccggacttgatgccgacgagcagcgtattcgccaacgatggacttcgcgacagatgtaccaggatgaatttgaggctatctggcggactcagattaagcaccacccccatgttcttacccaaaagctaaaggaagagctttccgaggctattttccaccagcggccccttaagtcgcagcgacacttaattggcaaatgtgatctggagcctagacgtcggcgagctgcaatcgcgagtttgccgtatcaacagtttcgcgtactccaaagggttaatgatctccgggtagaatccgagctcgacttgccacgcccactaacccacgacgaacgggagcaactactaatccgcctcactgtcgaaggcgacttgagttggaacgaagttaagaaaaccctcggcctgcgcacaaccaagaaacaaccagttaaatacacattcaattttgaaggagacggagaaaaaaagttaattgggaatcgtaccgccgctaagttttccgaagcactcgggcagccctgggacgatatggatgaacccactcgcacgcgtttagtagatagcgtgttaacattcgaggacgaacaaccgttgctgcaccatctgcaacagcattggcagtttggagagcaacaggccgtagcagtggcaaatcttacgctagaagctggttatggaaacatatctcgccgggctatcaataagttacgccccttgatggagcaaggccaggcctactcaacggctcgccgtcagatctaccccgaatccttcgaggcccggccccccgaggaacggcttccgcccttttctcaagtagctcccactgttcgcaatcctacgctagctcgggccatggcggagcttcgtaaggtcgtcaatgccttagtggctcagtatggaaaaccgcgttttatccgcattgagctggctcgcgatctgaagcggtcgcgtaaagatcgtcagcaattcaccgatcaacgcgaccgcaatactaaatctcgggacgatgcccgtaaacgcctactcgatcgaatgggaaaggcggctggcgaacagcttaataagccacacaatattctcaaaatccgtttggccgaagagtgcgggtgggtgtgcccttttacgggccgcggaatcgaaatggagacactagtcggagattcgccccaattcgatattgaacacatcattccttacagtaaaagcctcgacaattcatacatgaataagacgctttgctatcatgaggaaaaccgtcatgttaagcggaatcagacaccgtatcaggcctaccactcaacagagcagtgggaagatatcattgccagggtgaagcatttcaaaggcagtgctgccaatgcaaagttggcaaagttcttagctgataaactgcccgaaatggatgagtttgccgaaaggcaacttagtgatacccgctatctatctcgtgcggcgaccgattacttagctactttgtatggtggccgtgttgatggcgatggcaagctacgcgtgcaagcctcacccgggcgattaactgcaattctccgccgggcatggcaattgaatcgcattggttatggagatcccgaagatggcgaccagaaagaccgagccgaccatcgccaccacgctattgatgcatttgtggtagcggttacgaccacagccaccgtacatgcagcaaatcgggcagcttcacgtgccgagtcctactatgcccgtgatctgttagaaaatatcgatctcccctgggagggctttgattggaaaaacctagccgatgccgtggacaatatagtcgtgtcatcccgtgtaaatcgaaaactcaatggaggccttcacaaggacacgatctacagtaagacctatgaagtggttgatatcaagaaacccgacacgaccaaaacagtccatcatgttcggaaaccgctcgaagccatgtcgcttggcgaaattgaggccatagtcgaccctgcagttcggcaagcggtgctagacaagcttgagcgccttggtggcgatcccaaaaaggcatttgccgatcgcaacaatcatccctacctgacaaccaagaacaaacgactcatcccgatccatcgagcccgtattcaaacgagcgtcaccaccatagccatcggtaggggaagtcgccaacggagagtagctgcgggagataaccaccacatggagattgccgccgttcttgataaacaaggaacccccaagaaatgggaagggcacattgtctctcgtttcgaagcagtccgtcgacatacggctggggaaccggtagtgagaagagatcatggaccggggaaaaagccggtattctctctggccaatggcgagcatgtcttgttgcccggagaaggggacaccgaaccgcaaatactccgagtctccgtaatttcaggccaacaaatcgagtttgtgcctcacagcgatgctcgtcccattaccattcgaaagaagataccaggggctcgtattagggcttcggtcgataagctgcgccaaatgggggcaatgaagattgcgatctcgccgctggggaaatggacgcccgctggcgattagttggtttttgggttgccggaaccgatgtatccgagcagcgacagccaatccaaccacagctaaaatgttttctgagcccttagtggtttgctaagacatcattttttggatgatcgccagcgagcgtgcattgcattctacggtgatgatcgtagaatgcaatggggactaaaatgtttaccagtgccatggtggtgttgagccgaaacccaaaaaggatttgtcatgattgaaactcgcaagtcttccatcgctgtggcgcattggagatgcgcagtgaagtcttgctcaaaccagctagacatcagcatggatgagcattcgcaccaggagtacgtcgaaatacagagcattcccgacacacagctatccagtggtctgcgatagcccaagactttcggacagcggcgggggctattttctattacgccgctacggccggggcgtattcggcttcgaatgcttcgggggttttataaccgagcgactggtggagtcgctggcgattatagaacacgtcaatgtacttgaacacgctcaggcgtgctgactcaaggtcggcgtactcatagtgcttcgtccactcatgtttcagactccagaagaacctctcggcaaccgcgttgtcgtagcagttgccccggcggctcatcgaacactcgatgccaagtgtctgcaaggtccgttgatagctctcactcgtgtactgacaaccgcgatcactgtgatgcagcagttcgccagtacgtggttgtcgtgactcgatggcttgacgtaacgcatcgctcaccagcggggtggccagcgaatgactcatcgaccaacctaccaccttgcggctaaacagatcaacgacgaccgccacgtacacccaaccagccagcgtcggcaagtacgtgatgtcggtcacccatttctggttcggacgctccgcatcgaagtcccgatccaagacgttcggcgcttgctgtttggacggatccgccttggtcgtcgtcggcgtgaaccgcttacggactcggcttttcaggcccatttctttcatcgcagaagccaccgtgttacgacaggccgtctccaactcctcgtgttgctggagttcgtgagcgatcttctggggaccatagatcgtgtcgcttgcctcgaagacctgccgtacggactcgtgaatcttggccgtccgctcggagcgtttacttcgcggacggtcgaccgagtcgtagtagcccgatcgactgacctgaaggagctggcacatcagggccaccggaaaggagtcgcggtgctcgctaatccaggcgtacttcatgtcgactccttcgcaaagtacgccgtggctttttttaggatttctcgttccagttcggtccgcttgagttgtttgcggagccgagcgatctcggctcgcatctcctcgaccgtggcgtcgtcaccgcacggctccggcgggggagccaatttggcgtgccaggcccgcagcgtggcatcgcatacccccaccgcctcgcaggctgccttgaacgaataaccttcctcaactaccagtcgcaccgcgtctcgcttgaactcatcgctatacgtcggccgctgccgcttcgcttgctcgtccatatttcggacctcctatgggaaccattattccggctcccgccactgtccgaaagtcttgggttatcgcagtcctaagaatgagatgatggaaactggttcactaagtcgcctaatgcggttgtgttggtttttgcacaattgctggaacagtctctggaattagcttcgcaactgctgaactcagtgattaggctagaagatctgaatggcaggattctatgagtatggtgccaattctctatgcccttatccaagtaccgagctatgtggctggtggcgatgttcgatttgccggttaccaccaaatcggcccgcaaggcgtatgccgagtttcggcggacactgcttgagcgggggtttaccatgctgcagtactcggtttacgcccggtattgtgtgagcgaagaggcaagcgagacccaccgccgctatttgtcgcggaccttacccagcgagggtcaggtccgttttatggcgattacggaccatcaattcggaaaaatggaggtctattttggaaaaaaaagggccacgaccgagcaacctcctgatcaaatgctccttttctaattgcgtttctcgacgtaactgccggtggggtaggggggtaggaatcaggtgaaatgtatccgagcggcgattcctcaccaaccacagcgtcccagaaccggtactcgcagatctaccgaatgtacccaagtgacactctcgtggtacaggtgcagtcgtgtacgttcctcgcttccccctttggctcctcccgatatggcaacacctaccaaaacccgacaaacattgcgtctacttgcaatcgcgcaaagggggaagtaagatcaaaagacatcggcaaaacaaggtgttttttgaattcgcgggattagcctcataacctcgaggtcgtcggttcgaatccggcccccgccacttcaacgatcggtactgaaacgcaccgcttcgcaacttcacgcataagcccaggtcctgcctgggcttgcgtcgtttctggagtctcagtgcgagaggatgcgtgcaggtgctgcgttggtttctgcgccgtttgtgcgtctgcttctgcgctgaggcccgcccccttgtcaaagtcgaagtcggtaacctgaagatagtgcttcagtgccactttcggcgtgttccccatccaagccgttacgacatggatcgggtgctcgcgggccaactctgtttctcgactcgaccgcatcgattggaacaactttggccagggcgagaccccctctcgtgagatgatccgattgaactgtgtccgaaggttgcagtttctccacccttccggcgaatcagcagactttcgaaggtcgccaggcacgacatactccgcattgggctcagccgcctcccatgcttcccggagtacctctacaagttctggaaaaagcggaattgtccgctgtccttttcccctgtgctcggtcttcggggaatcgacagtaatccggttctccggccagttgatagccgcccagcggagcgaaaggacttcgctcgggcatcgcagccctccgtatcggctcagcgcgataatcaggcgccaagtcaggtccgatgaggctattagtttgtcggttacttcacgcgtgacaaaatgttgccgctccactggttgaacggcgatagcggatactccagcgaagggattctctgacacgatgttccttcgtacggcgtcgcgaaagatcattcgtactacttgcagtcgtttgtgaaccgtagtcggcgccaagccttgctcgatcaagtagagtttgaagtcctcagcgtctccctcatcgatgttagccatatcacgttgcttgccgaagcacttcgtgaggttattgatcgcatgtcgccagatgaccctggtagcgggctttacatcggtccttcgttcgacgtaggcagtaaggtactcatcaagttgagcacgttgttgttgctcagggggctcaatcaagccgacccgagccagcttgtctgccaaccccccgcggccgagttccgcaacccaccgggcggtgtcattgtccaaggcgtagcccatcgtcttggacgcgactaactgctcaatccggaatttcacctgttcagcggcacgcagagtcaccttgcccaaataaatcgtgcgtctcgtttgtttctgaaaggggtccacaaactggacacgacgcttgccactcctatcggttgttacacttgccatttactcagctccttgaaatatgttctatcgatctaattcttgttaagcgtgttggtcaggtgtcgacgttgacaaaaccgcctgtatatcggggaacggggtaattgtgtcagcaggacaggagtctgtgagcacaaaagctcttgtggggcgtccgcctttctgtccaggaggtttaatctcccagcttcctaatcctccatcaactagttttccgagggattgctttgccgaatcagcgttggcccattgtcgcgaaccacgcattagttctcgtggggtggtgattgccagattgtgctcctcttggaacaagctgttgatttggtgcgagtccttggtcgcatccctacagccgtgtggagtggcgggcgccttctgtcccgtgcgacgcgggaacacagcgaggccgtgtttgttcgcgtaaaattgtgcggcttccacgacacttgttaacacaacctcggcgttctgtgattcttgaggagttgtgtaaatgtcgaccggtaggggctcttggatcgtcaggtcgcgcatttggcacctccttccgacgaagcagatacaaggcggtggagttccgcgacagagtaccgtacagagcgaccgagccggacacaggtgatctcaccgcttgcggtcatagtccacagtttccgtggactgatcgacagggcttcagaggcctgtttggggctcaaaagggttggcggagccagttccctcccaatctggtagggatttgaaagacatgcgggggagttcatattactcattcctaaaaagggggaaattggcgacacacgtcgcctccacccttgagcggtcacgagcaatcggagacgatctcgaacagcatggtgtgctgtaagttcttgcggggtaatggtttagggggaattggaaaaaactttgccggtcacgtaagaagttgtgaccggtcacagggactacctgaaatgcagagtccacttgttatgcgagacgtgtgttttactttgtttgttccattttcttatacgcttcgagctttttccaagcgtcggttttgtggaccgttccttttgcgcaaccgattagatcggcccagccctggagtgataattgccgtgctcgatcgtggtccttcgagatcatggcccacatcttcctgttcacattgagtttggagttcttgcggcgagtcccgacgccttttgtggcagccggccgactcgctttcgtcgcggtttgggcccattgcccgaagtccaaggaccttggatcgcgtacatacgatgggtgttggctgaagtcgacattactttgtcgtagctggttctgtacccacaccatcaatccctgtggacagtgtttcaactcatcgccaaatagctcgacccatctttgcacccatctcacgtccgaccagagctctgagagccacagtctgtccgccatatttacatcaagcaggtggatgaagccatttcctaaccgcagccatagtcggtcgacagagtttgcgagctgatgtcgaagggggctgtcgaccgtgttttcgagccaagactgaagtgtggcgttcaggtcgcgtaaatcatcagcaagcatctcataggctagcggaatgagcgacgacttctcggtgtcgagctgtttaagggcttccttttcacgcttgaatcgcaagtcaactaagctcttaacaatggtgttcttgagttcgttgcgtttccaccactcatctgcagcgtcaatggtgagcaaatgctccgcgccctcttggacgatatgcagccgcctcggccctggttcacaccataaatcgacatctcctttatgttcgtatacttcaacagtttgggttatccacgattgggcgtcgtccagatcacatggagcaacggggtcgtcctcttcatagcaccaccccgagattgaggtgtcaacgagaacttcgatactccatggaaaaacttcgtcattgacgtgcgagtcgaagagttgcaggaacaatagaccatcgaataattggttcgcggcatgaataggatcgataggcttctgcttgctagcccgatcttctacgtcgttcagcaactgaatgacgtgatcacaaaagattgcggaccaatcggaacggatttcagatgcttgtcgatttggcactttgagcctccattcatcttggactccataatgtaacgcataggagtcactcccatcacttcgcgcctgcctggaaaataatagaagaagtcaggggtgcacgtcgattggttagtatacctctcagtgtcgaatttttcgctctcgatcagcaccttcacaaggcgaaatctggtgaaggggcatgacgggcgtagggagcggaaaaatggaagtgaaaacgagtggctcggccaggtgtttgtgatgtgttccggtcgaccgggccagctgctggccagtcaatgagcactagtacgtcgtcccggaagtcatttcctatagagttcagggaagacgcgtttggcgtcttttcgatggaaggtccaattgattttgattttcttccgattgcggtcgcgtgaacagtgggagagttcgctttgaaccttgtcgagcgaagccaaccgacgtcccaggcattgtcgctgtatggccgagatttcgatctcggccatgttgagccaactggcatgcttgggggtaaaatgccacacaatccgctccagcattggccgagccgcctcctcgccaaaggtttcgatcaacgacttctcgttgtgcgtgttgaggttgtccatcaccagatgaacccgctctgcgtcgggatagcgcttcaagaggtcgcggacgaaccgggcgaagtcggctcgcttgcggtgacgcttggcctgaacgaatcgcttgcccgccttcggctcgaccgccacgaacacgctgcaggttccgcagcggcggtactcgtagtcctgcttcgcgatcttgccgggtgccgcgggctcgggcggccgcgcgtcgtcgaccctctgatagggctgctcgtcgaggcagacgaccggctcgttcgggtcgagcggcttctcgtactgctcgaggacgtcctccatccgctcacagaactcgtcgttcagcttgggcacgcaccaagtttttttcgccacggcttcaggtcgtgttccttgagccacagcgagacctccgtcacgctgagcgaatcgacgaagccttccttcaccgcgtgctcgcacaacaattccagcgtccagcgagcccgtccctcgggcggctcgctgcacgccagggcgattacctgttgctgctgccgcttggtgaactctggggggcggcccgagcgaggcgcatcgtacaccgcccgctggacgccctcttcgcagaaccgctttcggacggctcggacgttgcgcgtcgtgcagcccacatgctcggcgatctcttcgtcggtgcatcccgagtccgatttcaataatatctggcagcgacgcaccacttgcgccgcgcgggcgcctgagcgtgctagctgctccaaacctccacgggcctggtggtccaggcaaacaatgtgctttttcattccgcagcatatagcagcggaatggatttcaggaaagacgtactagtactgcatcatcaggttcttgcaacccttgtattcgactatggagaccttgattctccacccaagagggtttgcacgagaatcgatcgagttgagtgttctaagagtgttggagtgttcgtcgcgtggcttcaaatcttggccacctttgaattgagagtaattgtacaggtaatgcaagttctggacgggggctggggccaagtatgttgagcccggtccactacaatcgagatacataaggggtcgggaggacgttcactgcccattcgaagccgggagaatctgctacaatcttctcgcacattccgctggcgtgttgcggcctgaccaagccgactttgttggccaaggaatagtgtaccaatttagaagagctacttgggtccaccgaatagccgaaagacgcgtctcgcactgcaatcgtggtgtttttggggcagtgaagtggtctgttcgtgccagaaactgtgtgaatgccccgagtagccaacaatccgggcaatcgactgtcagtttcatcttttcccccgaattcaccaggggctgcgaagtcgctagtacaaggaccgctgaattcgcacgaacagcttcagtgttcaagatgacctctgcgttgccgagagggatccagtactgataatgaagatggtgccgtgacggtgtgaagtgaaaggcgacgaggttgtctgggaggtgctaccgcgcagtgcctgattttggtattgttgttcagtcatcgtaagccaaatccagctggtcgattggaattgcaaacaaaacctatttggaaggattcttgtggatggaggcggcggagcgactcggcgtcgctccgaacgagttgcggagctgggaacgcagcggcaagatcgtctggtcgtatcgcaccgtgagcggctacttcgtgtgcaccatgccgctgctcgatgactgctggggggattacaaacagaggccagccgccctggaagctcagcaaactgatgtggcactggcatgccagacactcccttttccgtaatttccacgaaaaattctgcactcactttgaggtggctcgatggatgtcttcgaccttcacaagcatgtggtcgacgactatgcgaattataccaacagcttcattcgcatctcggacgaacgtatcgccaaagcagtgcagcaggatatctcagagggcctgctctggcctgaacccctgttgcaactcaacccgtcgtttgcttcaggcaagcggattgatcagctcatttccgaaggtctgctgcacgaggactgcggccgcatcttccgtatcaagcgagacgataatgatatgggtcgcgagctaaggcttcacatccaccaggaacaagccattcgcaaagcagccgctggcgagccctacgtacttacgactggtaccggctcgggaaaaagcctttcctacattgtccctatcgtagaccacgtacttcgttccgggagcgggagtggcatcaaggccatcgttgtctacccgatgaatgcattagcgaacagccaacgcgaggaactagataagttcctcacgcgtggatttggggaaggccagcagctggtgaccttcgctcgctacaccggacaagagggcgaacaagaacgggaacgaattctcaatcacccaccagacatcttgctcacgaactatgtgatgctggaactcatcctgacccgcatcgaagagcgtcgactcgtcgagcaggcacgcacgctacgttttctcgtgttcgatgaactgcacacataccggggaaggcagggagcggacgtggcaatgctcgtccgccgttgccgcgaagcttttcaaagccaatcgatgcgatgcgtggggacttcggccacgatggcctcgactggcgactcggtcgaacaggcccgcgtcgtcgccacggttgtctcgcagattttcggtgaggaagtcccgactgaaaacgtcatcggagagacgctccgccgcaccacgaacgagtatgatttccaatcccccgatattgtctcccgccttcaagcgaccatcgagtccccatctaaaccagacacggagtacgacgctttccgtgagcagccgctcgcttcatggattgaagagaccttcggactgaggagagaagaggggactgataagctggtccggcaaacgccacaacccttgaaaggtgataccggcgtcgccaccaagcttgccgagctgaccggctgcaatgttgaggcctgcgaggctgctttgcagacctatctgtatgcggggagcgaatgccgcgaccccgaaacgaactttcccgtgtttgcgttccgccttcatcaattcattacgcgtggcgatacggcatgggcatcactggaaagcgaggacgaacgcatcatcactttacgcggccagcaatttgtgccgggtgaccggaacaaagtcttgctcccactagtcttctgtcggcactgtgggcatccctactatcgagtcgaccgacctactcacggccaagagagccccgttgttccacgagaagactttggccgcaccgtaagtgttaacgttgaat

SEQ ID NO: 3913 - DNA, 23168 bp, synthetic construct
  misc_feature 1..23168: note = Synthetic
  source 1..23168: mol_type = other DNA
tcgactgcgccaagttggtacattgcctcttgtctcgattagagtgatacgtccgtttctgcctcccaatcttctgttgagaccaagccttccgcgcgagagtgtcggcccgtggttgttcactattcggttgtgggcgcggcccgcgctagagatttgggttctttgaagtcgtctcgcggcgtattgacgccccgtcgaaaaccgccacaatagggccacgaaaggaagttcccatgatcgattctcatgccctggcgtttttcaaaacagttttggagactcccagcccctccggctatgagagcccgttgcaggaggtggttcgccgatttgcatccggttttgccgacgaggtgaaaaccgatgttcacggcaacgtgatggccgtgcgcaatccgcaaggtcagcgccgggtgatgctggcgggtcactgcgaccagatcgcgctgatcgtgcagtatatcgacaatgagggcttcatctacattcaatccattgggggctgggatccgcaaatcctggtcggccaacggacgacggtttggaccgaaagcggccccatcgcgggagtgattggacgcaaaccaattcacctgcttaccgaagacgagcgaaagcaagtgcccaagctgaaggacctttgggtcgacatcggttcgaagaacaaagaagagacggagaaacttgtcaagatcggcgatccggtcaccgtggagttggcctaccgcgaactcctcaacggccgggcggtcgcgtccgccatggacgacaaatgtggcttgtgggtcgtcatggaagccctgcggcggatcgacgcgaggaaacttggctgggccgtttacgcggtttccacggtgcaggaggaagtgggcctgcgcggcgcccgaaccagtgcatttgggatcgatcccgaggtgggcgtggccgtcgacgtgacccatgccaccgactgtcccaccgtcgaaaagaaggaagaaggcgatattgccttgggtaaaggaccggtcatcgagcggggaccgaacatgaatcccaaggtcgtgcgccgactggtgaagattgccgaagacgggaaaataccttttcagatggcggcgtcgggcaaggcgacgggcacggacgccaattcgattcaggtcacccgggcgggagtcgcgaccggcctggtgagcatccccaaccgctacatgcacagcccggtggagatgatctcgctcgacgacctggaccactgcgcaatgcttctggcccgattctgcgagggccttgccgcggatgaaaactttaccccctaggagggatcactgcgtggtcccgccggatgagtttcgctccggcaggtagagattctctggcatttgcggctggaatttacgcacggtcgattcgtccttcgggcttggccacccggcgggataacctgggggactaaggttgctttcctcgatcaccggcggctcggaatccggggcgatcttggccgcataattctggacggccagaatccttgccgcggtctgctcgggtgtcgcggccttgcgaacctgaatgactcgacgctcaggcggcgcttcggtgaggatccagcggaccttgacctgcccggccggcgacagctcgctattgttggcggtgaagtgactgtcagacaaaaggttctgacgacgccacccactttgaatcatgctcggaaacgccgacctgaccgcctcgcgatcccagcaatgataggggcacggccactgattgacttcctgaaaatcacggacgagggccctgaagaaatccccgcgaactggggatgtcgatgcaagcgcgagcgcgcaagtcgcgagcaatgaaagccggatggtcatccctgaacccccgtcgaatccgtgtacgcggccgcattcattcctcattcatcatcggccgaccacgcggtggcaccggagaagaatcccaaaacaacacgtacaggtagggatgaatgccaagccagaagggttggctttgtctggaggagattctcgcaggtgatggcttttccggctcgaacctggccgcggacctggcgcgcggacgatccacggctggtcagcccgttactttccacctgacattagtgggaacatctccctcaccatggtgatggccgctggaccgaccaggaccacgaagatcccgggaaagatgaaaagcaccaggggaaagatgagtttgacggcggttttggccgctttttcctcggcgatctgccggcgtcggactcgcatggcatcgctttgcgtccgcaaggcttgagccacgctcgatccaaacttctcggcctggatgagaaccgccgccagggttcgcacgtcagccacgccggtccgctcgccaagttcgtgcagcaccgcggcgcggggcctgcccatttgaagctgcatattggccagattcaattcgtcggcaagggcaggacaggttttctgggtctcttcggcgacgcggcgcatcgcctgatccaggccgaggcccgcctcgacgcaaaccaccaagaggtcgagggcgtcgggcagtcccaggaaaatcgcctcttgacgtttttgggcaattagccaaaccgcgagatcgggaagataaaacaagcctccgcccaatccgatggtcatgaacgtggactgttgggtcgcgccaaaaaacggaaagaacgcgccggcgcccaacacgagccccgccagcaaccccatgaacttcagtcccagaaaggccttgccggccgcgtcggaacggaaaccggccctggccagtttgagcttcagccggctgagttcctcctcgctcttgggttcgagcgctttggcgaaggcgggggtcgccttttccagcaccttggcgaccgcgtcgctctttttcagcggcaagtcatcaaggttcgggcgcgagcgcgggtttttcaaggcgtcgaggcgttccagggtccgcggcttcgccgcggccagccaatccagaatccaccacgccagcgcggcgaacatgccaaacaccgccaccggcgttagggtttccaaaatagatgcttcggccaggatcacggtcgcctataccttgatattgacgatcttgcggatgaaaaacgccccgagcaactggaggaagatcgctcccatgagcatttttttgcccatcgggtcgcgaaacagcaccatgacataatcgtagttgaggcggagcatgacgaagaacaagagcacgggcagggctaaaagcacaatgcccgacaggcgtccttcgccggtcagcgcctggatttgtccccaaatttggaagcgttcgcgaatcagtcggctgatcttgtcgaggatctccgccaaatccccgcccgtctgacgctggagaaccaccgccgtggcgaagaaccgcagatcgaggttgggaatccgctcggtcagggcgtccaacgagtcttccaaattcacgcccaggttttgctcctcgtacagccggccgaattcccggcccaggggggcggcaatttcgttggctaccagatggaatcccgcgttgaggctttggccggagcggagtgctcgggcaagcatgtcgagggcatcgggcagttgcacgccgaaggccttcagacggcgcttccgccgctggagaagccaaacgatgggcaccgcggccgccagcgtgccgatcagcggcaacaagcccgggtgcaggccgtaaagccaccccgccgtgatcgccgctccggcaagcagcgcgcagatgagcgccatccgcgacggtgcgatttgcacgtcggcttgcgcgaagagccgatcgacgtcgccgaatcggcggatcaacgattcgagaattcccggctgcttatccagcggctcggccagaatgctcgacttcttggcgaactctttcgcggcgggcgaactgatccccgtgagaagctccagccggtcctcgatcttggccgagggccggtcgaagaggagcatggcaaccccgcccacaagggccgccactcccacgaacgccgcgatagcgatcaggatcgggctcataggcggcgactaatcctccaacatcacgcgctggcggaaagcgctggccggcaggcggatgccgcaggcctcgaggcggggcatgaacgtggggcggatgcccagggaaacgaacttgccgtaggcccgaccatgctcgtccacgccctcctgttcgtagcggaaaatgtcttgcatcacgatggtgtcttgctccatgcccacgatctcgctgatctgggtgatcttccgcttgccgccttgaagccggttggcttggacgatcaaatccacggcgctggcgatctggctccgcatggctttcagcggcagctcgaagcccgccatcatgatcatggtttccaaacgagccaacgcgtcgcggggcgagttcgcgtggagcgtggtcatcgacccctcgtggcccgtgttcatcgcctggagcatgtccagcgtctccgccccgcggcactcgccgatgatgatccgctcgggccgcatgcgcagggcgttcttgaccaggtcggtcgcggtgatggcgcctttgccctcgatgttcggcggcctcgtttccaatcgcaccacgtggtcctgctggagctgcaattccgccgcgtcctcgatggtgacaatccgctcgttgttggggatgaagctggagagggtgttcaagagcgttgttttcccggagccggtccccccggaaatgataatgttcagccgggccttgatcgccccctcgagaagcatgaccatttcgggcgtgaatgccttgtagttcagcaggtcctcgagcttcagcggattggccccgaagcgccggatggaaacgcacgccccatccaaagccagcggggggatgatggcgttgaagcgggaaccgtcggccatgcgggcgtcgaccatcggacaagtttcgtccacccgccgccccacccgcgatacgatccggtcgatgatctgcagcaagtgctcgttgttgcggaacgtgacgttcgtcttttccatcttgccgcgacgttccacatacacgttcttcggcccgttgatgaggatgtcgctgatcgtcgggtctttcagcagggcttcgagcgggccgagaccgaaagtttcgtccaggacctcctccacgagccggtcgcgctcgctgcgattcaaaagcgtgtcttctgtgtcgcacagccgctcgatcaccaggcggatctcgcggcgaaagacctcgctttgaatgtctcccgcgcgagacagatcgagcttgtcgaccagcttggcgtggatccgctgcttcagttcctcgaaactggcctcctttccctcgcccggccggatcgtcatcccagacggtttcagcgcagacggcaaatcgcgtgcaagagccacctttgttcacctaccgaaaaagtcgttgcgagaatcgagaattccctgacaagcatagcttacagccaaacgcccggcgaaatggcgagactgagcttctcctacaacctgccacgcaacaccgatccaatgcatgaagtaccgctaaagatggggtagttggccgatgcgtctaccatcgccgcgagtttttcaaagcggttaattgctgcaacgcacgaaccctctctatcgagggggccgcgccccaccgcatgtcgcatccccatggcctaacgcgggccgtgcccgctaccgaatagggaacaatcccggacaccaggctcccacggcaggcatggtcgcaacagaagactgggagccagacgggcaatgtttcgctttcatcgagacaacaggcaagctggtgcagtcggtggaacgtgggcaaatcccggagcgcgggcgtctcgcccgccaggtccggagcgcgagcgtcccgcccgtcaggcccggagcgcgggcgtcccgcccgccaggcccggagcgcgggcgtctcgcccgccaggcccggagcgcgggcgtcgcccgcaaaaacaaatgcgggcaagatgcccgcgctccacagaggaaacggcctgaacgccgcccgctaatcccggagcgcgggcgtcccgcccgtcaggcccggagcgcgggcgtcccgcccgcaaaaacaaatgcgggcaagatgcccgcgctccgaagaggaaacggcctgaacgccgcccacaaatcccggagcgcgggcgtcgcccgcaaatcacgagcgcagcgagaagcctcgtgaacggggcttgaggttcgccacgggatggaaaccgcgacccggcgtcaaacgccgggccaaagaccgcctaattcggacaaggcccgtcaacgggccttcaccgaaggaatcggacccaatgccgccgcggcgcgaagccccgtcaacggcgtttgatgttccgcgatggactggaacctcgccccggcgtaaacgcggcggacaaggcccggcaacgggccttctccttggccgattccccgaggtggtccgcggccgcgaccaaaaactcgtacccgtgtacaacccaggcaaagtcccagcgtttcgcgaaaaaccatgccgattgcctacgctattgaacaacattcgcgcagggcgcgcgtatgttacgaactgagaacctaaactcgccgccaaccatccgccgctccactccccacgatgagatttgcattccccggtaacgagtggtacactcagccctaggctgtcagtcgctgcctggatggcggcgctcggggcttttcagcgcggggtgaagctatggccgtggaaaccgccgcatcgtttctcgaagtcctcgaaaagagcaagctcctcaaaggcgaacaattggacatcgcccgtcagcttgccgcaagcgcctccgatgcccgctccctggcgaaagctttggtgcggaaggaattgcttaatcgatggcaagcgggccagttgctagccgggcgaacggcctttctctggggaaaatatcgcctggtggatttgctgggccgtggcggaatgggaagcgtttttttggcctggcatacgatcatgaatcgggccgtggcgctgaagatcatcgccaaggaactgggcagcgacccggcggccctggaacgattcttcactgaagcccgcgccgtggctgccctggatcacccgaacatcgtccatgcctatgacgtggccaacgagggcgaccgctattatttggtcatggaatacgtcgaaggccgcgatcttcagcggatcgtcgagcagaacggcccgctcgatttcgcccttgccgccgactacatccgtcaggccgccgagggcctcgcccatgcccacgaccggaacgtgatccactgcgacatcaagcccgccaatctcctcgtcaaccagcaaggcgtggtcaagattctggacatggggatggctcgggccgtgggcgtcgaggcccgagcggccgatggctcggcccaggaagatcaggcgatcttgggcaccgtggattacatggcccccgagcaagccgaaggcgtcgaaaaactcgatcgacgatccgacatttactcgctcggctgcactttctatttcctcctcaccggaagccctccctttcccgacggcaccctggcggaacgcatccttaaacaccagaaggaagagccgaaagacatcgccgaacgacgtccggacacgccgccggaattgatccgcatttgccgcaagatgatggccaaggatcccgacgatcgtttccagaccgctgacgaggtcgcccggttgctctccgaatggcggcccgcgccatcggcgaaaatcctccgcgccaaaccgctggaggaagtcgaggccgaagccgagccagtcgaggacgaatcgtcccttgctgtttcctcccgggaaataaagcccttggcgaggccagaggccaaggcatcacttgcgtcccaagcgctggatcgggcgaaggggtggatcgactacgtgaaggccgaccgccgtcggatgatcctttggggcggagcggccggagcggtcgtgctgttgatcgtttgtggcctgttgctggcgatcgtcttatcggtaagaaacgcccgaaggcagcatcaggtcgcttcccaagcggcggccacgtcgaaggcggagaaaatcgagaggcgcaagtccgccgacaacgacttcggcgagcttgagtcggaattggaaaagaagtgggcgtcggaaaaggaaggcaaggatgcccccgacgcgaaggccgcgtcgggtccgccgccgaaaccggtcgggccgccgcctaagcccggcgggccgcctccagtccccggcaagacgccgcctcccgccgcgccgccggccaagccggaagcgtcggacaccaaggccgccacccctgcggccaaggccgagtcgaagtctgaaccacattcccccgctgaaaaaggggccaaatcgaccactcccgccccggccgcggagaaaatctcggccgagaagcccaagaaggcccctgaggagaagaagacgccggccgcggaaaacaaacaggcttcgccgccgaaacctcccgacaagcccgcgccaccggccgacgccttcgccggctttccgccctacgtggaattgccgcccctgcccgacgccaacgccggcgaatttgcccctggtcccacgctcctcggcggcatccatgccccgcccgatgtccccgtctcggtcgatttagtcggtgaggaaacggccgttcgaggcaaacgcagtttcaccttcgcgccgtgggaaaacaaggacgcacaacaaggttgggtcgtgcgtctggagtccaccggcaaggaagacgcgcccgccgaagtggccacgttcttccgcgacggggatggcctcaagtttcgttgggcggaaaaagcggccgaactcggggccgcggccgagtacctccgcaattgcgctttggaactccgcggcggtgggcctccccacttggtcgcgctgcgaaaaccggcgctggtcgaacctttgacgctcgacctcaacaagggcgtcagcaccgtcaatgtgcccatcgacttcatgcccgatccggcgaatctccgcatcgagtttgtcaaagtgtcgggcccggccggtcccctcgtcatcgatcggttggagaaacctgttttcaacccgcccgcgccaatcccccccaaatcagccgccacgcttctttttcctcgcaaggccctacgcggccacctactcccgggcgtcgaatttggcatcaagacgtttgtcaaaggcaagggggtctcgattaccgtcagcctcgccaaccctccgccgcaacagttcaaggggctggtcgcccagatgaacatccctgccgtccgcaacgagctggaacagaaagtccgtgggcttcccaaccaattcgccgccgcgaaggaggaaggccagaaagccaaaatcgccgaggatttcgacaaccgcagccttccgctttggtatgacgagttctaccgccaagcgcatcgcaacgcccggctgcacttccgtatctttctcgacgccaaggatcatcagatcgacctggccgttacggaagctcccaagtaaaccccggcgtgggtttcgcccgccgcgcctggcattggcttggcactcgcccgacacgcaagcactggcttaggaccgacgcggcccgagaaatttatgcgacgttgcgaaccatttggccctgaccatcgccccgtgaaaacaagccccaaatgatcacgaattgcaaacgactggaccacgtgcacgtgccgcacgactatcccgacaccggagtcgaagaacgaggacaaggaaaagaaagcagagcgatttccttcgcgcgcatgaaaaaagcgtctcgcggggagacgcttgcgggcatggcgataaatcgccttgccctggtcctcgcccagcgatgctggcgaggttgcctttcgcgaacgaaagtcccttactgtgacaaggggcaatcgccgctcggatacactggcgtgtaggttagcagcaactaggttttaagtcaataccccgggaggaaaaaatgggtgaccaacaaactttacaagcaacttcctattgtcttgggctcgacgtgggggttcagggcgtaggatgggccgtgatcgacctcgatgaccaaggccagccgttgggggtccgacgaaccggcgtgcgttgcttcgatagcggcgtcggcagtgaaaccgagttcgaaaagggcgtcgatgagccgccgagcacgaagcgccgtcaagcccgccaacagcgccgtcagctttggcgacgggcgcaacggcaacggcgtgtattccgcgccttgcaggaagccggtctgttgccgcccggtccgccaacgcctgtatcgcgagacaagatccttcgaaccctggacgccgatctggccatccagttcggttcgctcgaggatcggatagcggcgcatctgttgccgtatcgtcttcgcgcccttgccctcgacacccccctgcctccctacgcgctcggtcgcgccttctatcatctcgcccagcgacgaggctttctcagcaacaagaaggccctcaaggaggagaaggaggccggcgaggtcaagaagggaatcgcggaactccaagaggagatgaaccgggcgggggctcgcgccttgggtgagtatttctcctccttagaccccgagcaacgccgcattcgaaatcgctggaccgcgcggcaaatgtacctcgacgaattcgatcgcgtctgggaggcgcaatcgcggtaccatccgcgattgacggacgagttgaaaaccaaggttcgtagggcgatcttcttccagcgcccgctcaaatcgcagaaaggactgatcggccgctgcgaactggaaccccgtcatcggcgcgcgccgcttgcctcgttgcttgcgcagcgattccgctactggcagaaaatcaacgacttggaggtcatccaacccgacggagtcgtccgccccctctcgcccgaagagcggcacaagctcgcccactttctcgaaacccaagccgaggccacgttcgcccgcatccgcaagttgctcgacttgaaaaaacccaaggggagccaagaggatttcgcgttcaatctggaacgcggcggcgagaagcgaatcctcggcaaccgcacggccgccaaaatggccgccgtgctcggccaacgctgggccgcgatggacgacgaggacaaacgccgtttggtgaacgaaatcctttccttcgagaaggaggcgccgctcgcccgacgcctcgtccgcgcctggaacctcgacgaacccaccgccgcgcaactggccgcgctggactttgagccgggatatgccgcgctttcggcccgggcaatccgcaaactgctgcccttgatgcaacgggaaggaatgcgattcgcgaccgcgcggaaacaggtttacggggatcatctcctcggcacgcgcgcctacgacgccctcccgcccgtcgccaaggccatcccctcgctccgcaatcccgccgtctgccgcgccctgaccgaggtccgcaaggtggtcaacgccctggtccgcgcctacggaaaaccagcgatggtcagaatcgaactcgcccgagatatgaaacgtggccgaaaacagcgcaaagaaacatggcaagccatgcgcgagaacgagcgttgccgccttgacgcccgcaaacttcttcaagatcacggcattcaagaacctcggccggcggacatcctgaaagtccttttagccgaggagtgcaactgggaatgcccctacaccggcaaagccatctccatggacgcgttgatcggcagccaaccgcagttcgacgtggagcacatcattcccttcagtcgatcgctggacaattccttcctcaacaagacgctttgttaccacgaggaaaaccgaaacgtcaagcagaatcggacgcccttcgaggcctatgggggcgacgaacaacgctggcatgaaatccttcaacgcgtccgccgcttccgtggaagcgcggccgagtcgaagctgcgaaagttccaattgcggcaacttcccgccgatttcaccaaccgacacctcaacgacacccgctatgcctcgcgattggccgccgattaccttgccctcctctacggcggacgcgtcgatgcgaacggccgacaacgcgtccaggtgggaaccggagcgacaaccggcttcctccgcgacgagtggggcttgaacgccatcctcggcgacaacgacgaaaaggaacgcgccgaccatcgccatcacgccatcgacgcggtggtcatcgcgttgacgggccctgggacggtccaggcgctcacccgcgcagccctgcgagccaaagaattgggccgcaggctcttcgtgcctctggacccgccctgggccgaccgcgactccttcctccgcgacgtccgcgcctcggtcgaagcaatcacggtctcctatcgcgtcgaccgaaaggtctccggccagctccacgaagagtccaattacagcaagccccacatgaccgtggacaacaaagggaacctcgtcgagcatcgtcatattcgcaagccgctcaaagacatgtccgtcgaggaagtcgaggccatcgttgatgaccgcgtccgcaagctcgttcaggaaaagctccgacaacttggtcaggaacccaagaaagcgtttgccgacgaggccaaccacccttacttcacgaccgccgacggtcgccttgttccgatccacaaggcacgcatccgcaaaaccgtcgccacgatcacggtcggcccgccccaatgccctcgccatgtcgccccaggcttaaaccaccacatcgaaatcctcgccgtccgcgatcccgccggcgccgtaacgcattgggagggcgaactggtcagcctcttcgaggcggcgcgacgggtcaaggcgggcgaaccggtcgtccgacgcaaccacgggccaaataaggacttcctcttctcgctcgccaaaggtgagtatgtcgaaatggagctccagccgggcaagcgccagttgttccgtgtcacggtcatctccgcaaaacagatcgaatttcgcttgcaccacgatgcccgcccaactatgctgttaaggaagacgccaggagcgcgggtgatacggagtcctggctcactgttcaaggccaaagcacggaaggttgccgttgatcctctaggcaacgtcttcccggccaatgactaaccgcatcctcgatttctccgagtcgccggcccgcttgcgcgtccggcttgctcaactagtcgttgagcgctccgattgtcctcccgtgatcacccccctggccgatgtggccgtgatggtggtcagccacccgcaggttacttgcacgcaggccgttctttcgggtttggcggaatcgggcggcgtgttcgtggtctgcaatgcgaagcacctgcccgtgggcatgttgctccccttggtcgcccaccatgcccaggtggaacggttcgccgcccaggcccaagcctccaagccggtccgaaaacgcctttggcaacaactggtgcgggcaaagattcgcgctcaggcccagacccttttggacctccacggcacggaccacggcctgctggccctactgccgcaggtgagatccggcgatccgcgaaacgtggaagcgtgggctgcgcggcgctactggggccgcctgttcggcgaactcgatttccgccgccaccgtgaagacgaggaccacaatctcctcttgaattatggctacgccgtgctccgcgccatcgtcgcccgggccatctgcgcggccggcttgcatccctcgctcggcctgcaccatcacaatcgctacagcgcctattgccttgccgatgacctcatggagccgctcaggcccatcgtggatcgggccgtggtcgagtacctcgccactcacgacgcagtctgtggtctggaaccgaaggtcaagacctggctcgtccaagccctcacggaacgatacgaaatcaatggcgagcaacggaccgtttttgacatcgcgacccgaatcgcctcctccctggccgacgtcttcctcggcaacgccaccaccctcgaactaccggacggagtccgcccatgccgcgaagggaactaacgctttcggggtatcaaggcatgtggctctttgcgatgttcgatttgccggtcgacacgcggaaggcacgaaaacaatacgcccagttccgcaaagccctcgtccgcgagggcttctcgatgctccaatattcggtctacgcccggtactgcaacggcgaggactcggcagaaagccaacgccgccgcatccgggcggtcctccccccggaaggttacgttcgcctgctcactgtcaccgaccgacaattcggaaaaatggagagttacgttggaaaatccgtccgctcaaccgagaaacctccggcacaacttcagcttttttagccccccttcgctcctaaccggttacgccgcaagaccttgcggaaaaggtagtgtatccgagcgacgattccccgcaagccacagcaatctcgtaggcggcgcgtaagaggttgggagtgtatccgagcgacgattccccgcaagccacagccgatcggcgacggcgtgcttgccaggccgtagtgtatccgagcgacgattccccgcaagccacagccaccacgggcgcgatccgaagcaccgacgcagtgtatccgagcgacgattccccgcaagccacagcacacggccgcgcttcagccctacgtcttcgagtgtatccgagcgacgattccccgcaagccacagcagcaagggcaacagttgcgtcccggatttagtgtatccgagcgacgattccccgcaagccacagctatcgctccgtggaggatcactcggcgtttagtgtatccgagcgacgattccccgcaagccacagctatcgcccgcgatacgaattggctgacctagtgtatccgagcgacgattccccgcaagccacagcgatccgatcgccctcgatcccttggacccagtgtatccgagcgacgattccccgcaagccacagcgcgcgtggcggcgcgtcgcacgccagacctagtgtatccgagcgacgattccccgcaagccacagcaaggaacagacggtgagaacctggtttgcgagtgtatccgagcgacgattccccgcaagccacagcgcgcggcgtggtccgcgcggccgccaaacgagtgtatccgagcgacgattccccgcaagccacagcgtggcggtggagacgttgtggatgccgtaaagtgtatccgagcgacgattccccgcaagccacagcacgtgttgtccggcgcttcgcgcaaccgctagtgtatccgagcgacgattccccgcaagccacagccaatgattgaaatatggcagcgcggcgatcagtgtatccgagcgacgattccccgcaagccacagcaggcctggcgcgtcggggcgcggcgtggcaagtgtatccgagcgacgattccccgcaagccacagcgcctgcttgatccgccaaagagtgatccagagtgtatccgagcgacgattccccgcaagccacagccaaataggcgacgtcgcgcggagtgactccagtgtatccgagcgacgattccccgcaagccacagcctcggcgcgtcaatctagactgcgtgcccgagtgtatccgagcgacgattccccgcaagccacagcttgtgtcgcattgggaagacgctgtttgacagtgtatccgagcgacgattccccgcaagccacagcatggccacctaccaacgcccagcgaaatcgagtgtatccgagcgacgattccccgcaagccacagcacggatggagattggagacgactggaaggaagtgtatccgagcgacgattccccgcaagccacagcggcgaggtggcaaacgtcgcgatctgccaatagtgtatccgagcgacgattccccgcaagccacagcagattgtccaagaggaagccgacgcccggaagtgtatccgagcgacgattccccgcaagccacagctggaggttcacttgcctcctaacggaggagagtgtatccgagcgacgattccccgcaagccacagcggatcgcgatcgagcgcgagcgctggccgatagtgtatccgagcgacgattccccgcaagccacagccaaccaacacatggatgatgcggctatccagtgtatccgagcgacgattccccgcaagccacagcttccacgatggaggtgaacgcatgtggaccagtgtatccgagcgacgattccccgcaagccacagcgaccgccgaaggcggtgaaaacactgcctcagtgtatccgagcgacgattccccgcaagccacagcagctaacgaagacgcgaccggcccgccgacagtgtatccgagcgacgattccccgcaagccacagcgcactgccgtcctggcaagcacaacgtcaaagtgtatccgagcgacgattccccgcaagccacagccaagcggcatagctgtgaacattttcaccatgcctgggctttgtagtgcagagtaccctacgatagctcaatcccctgccggcgttggcgtccacgcttgacatctcccgtgcggatgaggaaaactagggcaaggctcgagatcgtcatcgcttccacgcccgccgtggtgcccagattgccctgtcgcccccgtgtcgcacgcgtacatttccacaccggaacagttggctggtttttgcgagcaactggcccgcgcccggcagatagccttggacaccgaattcgtgtccgagcagtcgtatcggccggtgctttgtcttgtccaggtggccgccgatggcgagcttgccttgatcgatccgttggcggtcaaggatctcaagccgttttgggaggcgatcgcccgaccggggcacgagacggtcgtccacgcgggccggggagaactggagttttgttttcaggcggtgggtcgcgctccggccgggttgttcgacgtgcagatcgcggccggactcgtgggcatcgagtacccggcgggctacggcgcgctgatctcgaaattgctcggccaaaagcccaacaaggccgagacccgaaccaactggcgccagcggcccctctcgcggcgacagattcagtatgccttggacgacatccgctatctgccggccattcgggacgagttgaacgctcgactcgccagactccagcggcacgactggatggccgaggaaatggcggcgatggaggaagaggtccaatgggcgctgtcgcaggagcgttggcgacgtgtatcaggcaactcgggcctgaagggccgcagcctggcgattgtccgtgaattgtggcgatggcgcgaggccgaggcccagcgccgcaattgtccgccgcggcgcgtgctccgggacgacctcttggtggaactcgccaaacgacagaccgcggaaatcccgcggattgaagcggtgcgggggctggatcgcaatgacctcaagcgccatctgcccaagattgccgaggcgatccagcgcggtttggacctcgccgaggacgactggccggccgccgtgcgtcaggacaacgtgcctcaattgacggtcctgggtcagtttctttactcggccttggcaagcgtgtgccggcaggcggaagtggccccgccgattgtaggctcgccgaatgacatccgggaatggatcgcctatcgcatcgaccggggccacacgcgccacgcgccgcgactggcccgcggctggagggcccaactggtcggcacgctgttcgacgatttgctggcgggcaagatcagcgtgcgggtgggggatccgaacgccgaatcaccgctggtcctcgatcgccgggagtccgactgacggctcggcgattccgcaaagccaagacttgtttgccccattggacatcttatccgcctgagccatgccaagctgcgaacgttactatgcggcggtctgtcagaccgatcatccccagccgacccaccgcgacgaaatccgccgccgcgtggatcggatactcgagttgatcgatcacgcggttttgggctaccagccgtttttcgacgtacgcctggtggtctttcccgagttttgccacgccgccccgatttacccgaccgccgccgaattgttggaatcgctggccgttccgatccccaacgagcacacggcgcgataccaggcgaaagctcgggaactgaatgtttacattcaggcggggacgtttctggaatccgacccgcggtggcccggctgcgtcttcaatactacctgcctgatcggccccgagggaatcctggccaaataccgcaaggcgcacccgtggatcccttgggaggtgtcgactagtccgcacgatcttgccggttacgacgagccggtctttccggtggccgacacggaaatcggcaagctgggggcggccatctgctatgactggctgtttcccgaggcgattcggcaactggcgttcgccggggccgaggtgttggttcgcgtgtcggcctacatggatccctggggatcggccgagcctctgaattggtggccgctggtgaaccgggttcgggcgatcgagaacatggcttacgtggtggcctgcaatcaagcgtcgagtctgaagaactacccgccctttagctggccgggcgggagcatgatcgtcgattacgacggccgcgttctggcccaggccgaaccaggccccggcgaacggatcgtcgttgggccgatcgacctggccgcgctccgcgccgagcgcgagcgccgtcgcggccaccatatgccgtcgcatctgcggaccgagctttacgaggcctatcgccgccaggtctttccccccgcccgcggcgcaccctagccttccgtgccgtcgcgtttttttcccctgcttgtaacggcaaacgccgtaagacaaaatatcgctggattcggcaagcggggcgggcgagtgccgccctatggttcacgggcaggcgcggtgagcggcccgcgagaaatcggcagttcatttttccagacgccttgagatcgtggggacaagccatgcagcgtagagagttcttggcaggggcggcggccatggccgccggccggtggattcaatcgaaaacgctgccagcggcggagaacgccgctgcgccgtcggacgccttcgtccgcattgaagaacccttcgacggggccgttctgaaccgccgccacggcgaagcggtggacggcgggctgaagattcgcgtgtgcggggccgcaaaggcgggccgggtgacggtcaacggcgagccagtcccgtgcgaaaacggccggttccgcgcccacgtggtgctccgcgaacccgtgaccgagatcgtggccgtggccgagggtccgtcgggccgcggcgaggcccgcgccaaggtccgctgggacaagcactccatgccgcgctatcgcttctccatcgatgacaacatctttttcctccgcgacatcgcccaacaaggctaccgctcgctgttcgactcctggtatttgaagatgctcaaggacttcaacgccaaatacgggacgaagttcacggtgaacatctactacaccagcggcgacgacttcagcttgccccagttttccgaccgctatcgcggcgaatggaaggacaacgcccactggctgaagctggcctttcacgcttgggccgacgagccgccgcggccttatgaggacgccccgccggagaagttgatcgccgatctcgatcgggtggcggagcagatccatcgtttcgccgggccggagacctacgccccgccgacggtgatccactggggcatgacccgccagtccgcgctcaaaccgctggccgcccgcggcgtccgcgccctaagcgggtacttcaagttccagggaagatatgacgtgaactatcgcttcagcgacgcgatttccgaatatatctcgcggcacgacgcctggatggatttctccagcggcattgtcttttcccgggtcgatatcgtctgcaacaacgtgccggcggaccgtgtcgccgcggaactcgatccgcagctccaggaccccaacacggcggagatcatggacctgtttacccacgaacaatacttctggcccttctaccgccattacctgcccgaccacccccagcggctggacgtgacgctccgttgggtgaccgagcacggcttcaagccggtattcttccacgagggtttcctgggcgcgccggaataggagccgcgtcgcgtgatccgggaacaagcccgccgcgcgtcggacgccgtcggggcgacgggccatttcgcgccacgggaaacgccgcccccggttattctttgagcaccatgtcgatgcacatgacggcggcgagaatgagtcggcggatggcgctattgggcgggacctcgggcgagatgctcagcatgtaggtgtcggccgtggtgaacatctccttgcccaagccggcccacttcttcgtcacgcgggcaagctccagttcgtctcgcacgaaggcgaactcccagccggtccatttccctttgagcgagcacaccggctggcccgtgcgatccaaaacgtcgaattttccgccgatcgaccacaatttctggcggaaaccgccaatctcttcctcgttgtggtcgaagaccttgaccttggagaggaagatcgtgacgccccgggtgacgcgcacgacgggttggccgtcgggcgtgcggatgcggatgtcgaacggcgtcatccgcttgtagtcgctgaatcggaagatcttggtgaaaaggcccaggttttcttcccggcattccatgaccttctcgccagactccggatcgaagacatcgaaattgttggcggccttgaacaggcccacatgttccttgacgatgaactgattcctgttgagggcgtcggtcattgtgttgccttgccttgaagcatggatcgaaaagccacgcggaactcgaccagtccgccgcgtcccatgcccgaacaacttatcggaaacgccggcgatccttgtgtcgcaatggaacggcagaccgacctcgccgcggttcacggcgacttcgagtccacgccgatcgcgaacaggtgcgtcgccgtggaaacatagagcgtgcgtccggcggccacgggcgtgctatggaccggcccgcccacgttgttcttggcgagcaccgcaagcttcttgccgaacgcgaagacgaccacgtcgccgtcctcatcgcccaggtaaatctttccgtcggccagcaagggcgaaccccaaatggccgactgcaaatcgcaggtccaataggcccggccggtcttggcgtccaggcagtggaccaacccggcatggtcgccaatgaccaaaagcccgtccttgatcgtgggcgagccgagcgagcgatggaaaacaccttgaaactcggcgttcacgccgcctccgctggccgcgtcctcgtggtattccggggcccgctccgcgccgggagccttgcttccccgataatgccagatcgcggccgaattcggattgggaacggccttttctccggcgttggggtcaacggcctgtcggagccgaggggcaaggggtttgccctcgcggtccacggccagcatggcgctggtgtcgccgcgccgggtgggatcgatgcaccacagatcggcctggccctcgcccgactcgggatcctgccccgtcgccacgtacacgagcccctcgtgtaccaccggcgtggccacgatcgtattgcgttcgcccgaaccggcgccctcccaaacggattccttcgggttgcagtcgaatcgccagagcagtctggccttccgatccggccgtggcgtcgcctcgaagctatagacccaaccgtcgccgccggcgaagatcgcctggggcacgccgccgagcacggcataggccggcgaggaccattgtccgtcgaggatattctcgccaggcgaggcgtcggcccaaaccagttttccggtgttcttgtccagcgcgatgaagcttggcgcccgcggcgccgggatcttgttgtccacgcttcggccgttcgacgtgcttaccaaaagcaggtcgccggcggccgtgatcgaggcatttgccatgtagcgctgcaccacgcccaattcgcgcggcatgtcgaaggtccagatcggcttcgactccttgcccgcgccgcccgcgtccaggcaaaccacttcgccccggttggtgaccacccacaagcggtcgccctcgacaaggggcgaggcgcacatgccgacctccggccagtcgacgttcttgccggccggatgtttttcgacggaatgctgccagagaaaccggccgtcggttcgatcgaaacagagcaagcaaccgaggtccacggaagcgggataacggggcaagtatccggcgccgttgttggtcgcgcagaagacccggccgcctgaaacgaccggcgtcgcgtagcactggcttcccagcctggccacccagcggatttcgggcgaggcccccagccatcggcccgtcttccggtcgagcttgcccacgtcccacttcacgggaagcggcccggcggcggagacgttgttgcggcagggcgaaccgccccactgcggccagtcggccaggcccggcgccggggcctgctgggaaaccacgatcagggcgaagaaccaaggcgcaagcggcaagtcatgtctcctcttggatcgcgagaaataccccgattcatgcgtgcaatgagaacaggggaacctgtcggctagcggctcttgcccaacaggtgttcgatgacggccaattccagggcctcatagtcccggttggcgatgcattgctgttccagatccttcgggaaggtgcgcaccttttccagcaggtgaaggaaaatagtgcggctgttgctgagatggcgcgtggcgacatcggccttctggctccgcatggccttgacatccagccccacgaagcggccggtcgcgggataaccgcccagttcgagcacgcggacctggttgtaggccgcgcggaggttcgccgccccgaaggtcttgtcctggtcgaacttcaaaccgttctgatcgttgagatggacgctccacaacttgcccatggaaagcgcaaaggccatttcatccgagggatcgaggccggccagcagggcgtgggccgtttcgatcagcccgcccatgcgtttcggg

SEQ ID NO: 3914 - DNA, 15024 bp, synthetic construct
  misc_feature 1..15024: note = Synthetic
  source 1..15024: mol_type = other DNA
ccacttgtacttgctggtgattcgttctaggctacgcagagcggcgcgcagaccttgattgtgatcgattcattcgttctgcaaaagggaccttcgcgatgaatgcaccgcagacggttctgcaccggatcatgggcgtaatcgaagttcgcaaaagagaccgccccgccgactcctacaccacgctcctgttggacagcggcacgcagcgaatcgcctcgaagcttcgcgaagaggccgaggagttgatcgaggccgccaccgacaccacctgtacctcgccgaagttcgtgatccacgaggcggccgacctggtctaccacatgctcgtcctcctggccgattgcggcgtttcgctccaccaggtcgaggcggaactggaaaatcgcttcggcgtctcggggctggccgagaaggcgtcgcgcggggggagcggggccggccatctgccgcggaagggctgacagcccggtgggcggaagccgttaccgtgccaccggcgcggccagtctccctgctggcctctgacggctggcggccgcgggctcgacggaatcaacggcgtgctacgaattgcggcgtttccgggcagtctttctgcggacctgcgccttggccgccgtgcgtttcggccggcggacgacgcggaaatcgagctggcggcggtcgatgtcgacccgggcgaccgccacccgcaggaggtcgccgagccgatacgcgctgcccgagcggaacccggcgagcgtgtgggtcgtgcggtcgaactggtagtagtcgtcggccagggaatcgacgtggatgaacccctcggccggcaacccgacgccctgggcaaacagcccatagctctccacgccggtgacgaccgcgttcatctcctcgccgatccgcgtgctgaagtaggccagcagtttcagcttgatcagctcgcgctcggcgtcttcggcgcgctgctcgcgttctgagcaatgttcgcccagggtcaccagcgcgtcgtagtcggcggccggaggccggccctggatcaccgcgtcgagcaagcggtggaccgtcaggtcggggtagcggcggatcggcgaggtgaagtggcagtagcagtcgctggccagggcatagtggccaagcggctcggggctgtagacggcccgctgcatcgagcggaggagggcatactgcacggcctgctcctgcggctggccggccacctgggcgagcaggctctggatcgcaaagcggctttccaggccgccggtctcaaagccgagctcgtcgacgaattcggcgagcgccttgagcttccgcgggatcggcgattcgtgaatccgccgcaagaaggggatttccctgccggccagggtctcggccacggcctcgttggcggccagcatgaactcctcgatgatctggtggctgaccgtgttctcggccttgtgggccccgacgacctgcccatgcttgtccagatcgatctccacttcgggcaggttcatgtcgagcgcgccgtgctcaaaccgccggcggcggaggatcatcgccagctcgtgcatccgcccgagcagggcgtggaccgccttgcccagcttcctcgtccaggcggccggatccgccaggtaccggtcgacctgttcataagtcagccgcttgctgctcttgatggccgcgggctgggcttcgacgtgcgtccgcacgccctcggcggtgaactcgatgtagacgctcttggtgtagcggaccttgcccggctgaaggctggccagcccgttggaaatcagctccggcagcatggggatcacgcggtcgggcaggtagacgctcgtcgcccgctgccgcgcctcgcggtcgagcggcgtgccgggctggacgaagtgcgaaacgtcggcgatgtggacccccaatcgccagtggccgttgtccagccgctcgagggaaatcgcgtcgtcgaaatccctggcgtccgccggatcgatcgtcacgacggtctcgcccagcgcgtcgtaacggccatcgatggcggactggtcgaagcgttccacctgccgccgcgcgtcttcgagcgcgtcgtcggcgaactcgccgggcaggctgaactcgtggatgatcgccagcgtgtcgacgccgggctcgccccgctggccgaggattcgcgtgatcacgccttccccgtcgtgggttggcgacgggaagcggaccatctcgacgacgaccttgtcgtcggggacgactcccgcggcgccgggatcgccgacgaggatcggtcgggagaacacggtcccgtcgatcgccaccaggccagagccatcgcgttcgaaatacgtgccgacgaactggctcgtctggcgctggaggatttcaacgatttcgccccgcggcccgggccgcttgccgccgccggcgagcaggcgaacggccaccacgtcgccggtcgcggcgtccttcgtccgcttggcgggaatgtagacatcggcgtcgcgggcggcgccgcgcggagtgcctttggggcggacgaagccgaacccggcctcgttgcggcggaaggtgccgaccagccggttgcccgccgccttgggagcgtcaggcgagcgcaccaggtggccggctccgtaggcgagctttcccgccgcgaccagcttcttgaccgcggccttgacgtggtccccctccgtcttgggcagcccgagccgctgggcgatcgagcggggtttaatcggccggtaccccgggcttgccaccagtcgaaggatcgcttcgctcagttcggcagcctgcatatcgtctcctcgattctagggcggatgattcgaacctcccccaagcagccgcacggcgcgcgccacggccgcgccggtgaagccgccgccgctgatcttcatctgggcgtcccgtctcgctcgccataacccttgaacagtttcctgcccatgttctggttgtagtgggtccaggggctgccggcgttcggatcgttgcggagttgctggtggaacgagaacagcttggcgtccaggttgtcgaggtaatagagggccaaggcttcgagggtcatgggcagcttggggctgccgtagtcatactggccgtggtgggcaacgatcatgtgcttcaagcggaggaccttctccccgtcgagcggcccgccggaaagcttctccgcctcgcggaccttggcttcgagcatccccaccgccatcaccaggtgcccgatcaattggccctcgtcgctgtaggccatgtcgcggtcgtagaccaattcgtcgaccttggccatgtcgtgcaggaaggctcccatcacgagcaggttgcggtcgatctggggatagcagggggcgacccgcgacgccacgtccatcaggttgaccacgtgctccagcaggcctccttggtaggcgtggtgcagcttgatgcccgccggcgcccgggtgaacttgcccatgaactcctcgtccatgaggaaacactcggcgagcatcaccagctcggggtcgtccaagccgcggagcaactcggtcaaccgcgcacgcagccgggcgatctccgcctcggtgaggggaaggaattcctcttcgttgacctcgcagggttcgatcaaggtgatccgcgtggcgatcagctgcatcgccccttgaaagagctgcgtcgtcccctcgacgcggagatagtcgccattttcaaacgaccggtaaacgtcctccgacgcattccacatccgcgtcggaagcgagccgcttcgatcggagagctccatctggaggtagagattgccgtttcgattcgggcggagttgcttgccggtgacgcggaagacttcatcgaccgcctcctgttcttgaagttcgcccacgtaccgacgcaccatgaagagactcccatctgttcagtgaaagaaagcggatccaccaccccaatcgaccactggattctagaggtgcgggcaaattcccacaagtagcggatgctctatccccctaaggacaaccacgcccccgacctgtccgccccgctgccggctttcgggctctcccccgtccggggtcgcaaccactgcactttccgactcgccccgcctcctttagaatgccgtcttgcgcggtccccaggctccagcctcggctggtccccaagctggagcttgagaacgaggcgaaccctgaaccccgaatcccgaaccctcacccccgaaccctgcccatgtactggtcgcgaacgttcattcccacgatgaaggaaacgcccgaaggggcggagattcccagccacatcctgatgctccgcgccggcctggtctcgcaggtgatggccggggcctacacctatctgccgctgggcctgcgatcgttgaccaaggcggcccagatcgtccgcgaggagatggatcgggccggggccgtcgagctgatcatgcccgccatgtcgcccgtctccctctgggaacagacgggaaggaccgaggccttcggcaacgtgctcgtcaagttcgacctgccgcggcccgggcggaaggtgcgggtcgtgctcggccccacgcacgaagagatcatcaccgacctggtgagccggcagatctccagctaccggcagctgccgatcacgctctaccagatccagaccaagttccgcaacgaggagcggccgcggttcggcgtcctccgcaccagcgaattcctcatgaaggacgcctacagcttcgataccgacgtcgagtcgctcggcaggagctacgaggcgatgtacaaggcgtactgccggattttcgagcgctgcggggtctcttacctgccggtggaggccgagagcgggccgatcggcggcgacgccagccacgagttcatgatcccctcggaaaatggcgaggacacggtcgtccactgcccggattgcggctatgccgccaacacggagaaggccgagatcggcccgcgggggaccgagcggccggcggtcgaactggccgagatcaacaaggtcgccacgcccggagcggcgacgatcgaccaggtgagcgccttcctgaaatgccgcccgcaggatctgatcaagacgctgatctacgaggccgacggccagccggtggccgtgctggtccgcggggaccgcgaggccaacgagaacaaggtccgccgcctcgtcggcgccgcgcggctcgaactggccgcgcccggcgtgatcgagcgggtgaccggcgcgccggtcggattcgccgggccggtggggatggccgagaaaatccccatctacgccgattgcgacgtggcggcaatcgccaacggggtgaccggggccaacgcggccgacgcccacctgaccggcgtgaacccggggcgcgacttcgagccggagcagtatggcgatctgcgcaacgccgtcgagggcgatccctgcccgcggtgctcaagcagacttacgatccgccaggcgatcgaggtgggccatgtcttcaagctcggcacgaagtattccgaggcgctgggcgctcgcttcctggactccaaggagcagctccacccgatcatcatgggctgctacgggatcggcgtggcgcggattctggccggcctgatcgagacgagccatgacgaggcgggcatcctctggcccgtcgccctagcgccttacgaagtcgtgctcgtgccgatgcaggtcaaggacgaagcgacgatgcacgtcgcccgcgaactgcacgaccagctcgcggcggccggcgtcgacgtgctcgtcgacgaccgcgacgcacgggcgggggtcaagttcaacgacgccgacctggtcggcttcccgctccgcgtcgtgatcggctcgcgggggctcaagcaaggcaaggtggagatcaagtggcgctgggacgcggcggccgagatggtcaacctgcaaggcgccgccgcggcgatcgcccgcctggtcgccgaggagaaggagacggccgcgcggttcaagggccgcgggcggtagagcagcgccgccgcgtcgcgcccaggccgcgtcgcttgctctggcccgggctctgcaacgcccttggcgcaaccagagcaggcggccgcgcccgccgcgtcctcttgacgcgatcgcgcgattcgggctctacttaacactttggctgatcaccgccgaccccacgtttggagcatccgcacttgatgaccgtccgcacccgtttcgctccaagtccgacgggctacctgcatattgggggggtccgcacggccctgttctgctggctgttcgcccgccgccacggcggccggttcatcttgcggatcgacgacaccgaccagcaacggaacgtggaagcggcgctcgcgccgattctcgaaggtctgaaatggctggggatcgactgggacgaggggccgggcgcggggggcgactatggcccctactaccagtcgcagagggccgatctctaccaggcggcggtcgacaagctgctcgcctccggccatgcctatcgcgactatgccaggcccgaggaactccaggcggagcgcgaggcggccgaaaaggccagacagcagttcgtctacagccgccgctggatgggggagaccgccgacgattgccgccgcttcgaggccgaggggcgccaggccgtcgtccgcctcaagatgccccgccaggggaagctcgtgatcggcgacctggttcgcggcgacgtggagttcgattgggcccgcgagcaggaccacgtgatccagcgggcagacggcacctgcctctaccacctggccagcgtggtcgacgaccacgcgatgcggatttcgcacgtgatccgcgccgaggagcacctctcgaatacgccccggcagatgttcatcgcccagagcctgggctacggattgcccgcgtacgcccacctgccgtttgtcgccgagccgggcagcaaggtcaagctgagcaagcggaaactcgacaagtacttgaagaatcgcgatttcgcccagttgctcgagcacggccagcggatcgcccgggcaatcggcctggcggtccagcgcgataccttcaacccggtgatcgtggatttttacgagcgggtcggctacctgcccgaggcgatcatcaactacctggccctgttgggctggtcgctcgacgacaggacggagcatttccgccccgaagacctgatcgcgtcgttttcgctcgaccgggtgaacaaagcgccggccagcttcgatccgcaaaagctcaccgcgttccaggagcgccacatgctcggcgtgccgctcgatcaacaggtcgagatggtcttgccttatctgcaaaaggcccggctgatcgccgcggatgccggcggcccggtccgccagcgcgtccgccagatcgtcgctgccgccgccgaccggatcaaggtttcgggcgacgtgctcgactacgccgattttttcaccgccgacgacaagctggaatacgacactcaggctttcgacaagcggctgcggaaggacccgcaagccgcgaaactgctggccaagttccgccggcggctggccgaagccgacgcgttcgacgcggagagcctcgatcggctgatgcgccagttcgtggaagctgagcagatcaagctgggtcagatcatccatgccgtccgcgtggcggtgaccggcaaggcgatcgggttcggcctcttcgacgcgctggcgatcctcggtaaagaaagctgtctggcgcggatcgatcgagcgctggccatggttgatcaccgcacggattgacgatgcgacgcgacttgcccgaaatcacgccggaccctctaatcgaggccggcggcggagagccgccaccgaccgagtatccgcgtgggcttgccccgcgcttggggcgccgcggcggtttgaatcgtcgagcaagctcgaccggcgtcgagaagcctcggcgcggcagccgagagagatttaaagacggagccatacgatgagcagcaatagccagcccggttccacgctggatttcatccgtgcccggatcgccgaggacttgaagactggcaagtccggcggccgcgtccacacgcggttcccgcccgagcccaacggctacctgcacatcggccacgccaagtcgatctgtctgaacttcggcatcgccgcggagaacgagggcgggctgtgcaacctgcggttcgacgacacgaatcccaccaaggaggagcaggaatacgtcgactcgatcaagcaggacatccgctggctgggattcgactggggcgatcgcgagtactacgcctccgactacttcgatcagctctacgcctgggcgatccagatgatcgaggacggcaaggcctacgtctgcgacctctcggccgaggagacccgcgcgtatcgcggcacgctcaccaggccgggcaggaacagcccctaccgggatcggacggtcgaggagaacctcgacctgttcgagcggatgcgggccggcgagttccccgacggttcgcggacgctgcgggcgaagatcgacatggcgcacccgaacctcaacatgcgcgatccggtcatgtaccgcatcctccgcgccgagcatcaccgcaccggcgacaagtggtgcatctatccgatgtacgacttcgcccacggccagtccgacgcgatcgagcggatcacccattcgatctgcacgctcgagttcgagaaccaccgccccttgtacgactggtatctggaagccctgggcatctaccggccgcagcagatcgagttcgcccggctcaacctgacctatacggtgatgagcaagcgcaagctgctcgcgctcgtccaggaggggcacgtcgagggctgggacgacccgcggatgccgaccttgagcgggctgcggcggcggggatgcacgccggaggcgatccgcgctttctgcgaccgaatcggcgtggcgaaattcaacagcacgatcgatctggggctgttcgagttctgcctccgcgaggacctcaacaagcggtcgccgcgggtgatggccgtcctgcggccgctgaaggtcgtgatcgagaactacccggaaggccgggtcgaggagctcgaggcggtcaacaatcccgaggacgcggccgaaggcacccgccaagtgcccttcggcaaggtgctctacatcgagcgcgatgacttcatggaagacccgcccaagaagttcttccgcctcgccccggggcgggaagtccgcctccgctacgcctatttcctcacctgcaccggcgtcgtcaaggactcctccggcgaggtggtcgagctccgctgcagctacgatccgcagacccgcggcggcgacgcgccggacgggcggaaggtcaaggccacgatccactgggtctcggccgcgcatgccgtggatggggaggtgcggctctacgacaccctgttcagcaaggaaaatccggacgacgccgccgacggcgaggatttccgcgagcgtctcaatccgcgctcgctcgaggtgctcaccggctgcaagctcgaaccgagcctggccacgccgcagacacggttgccctaccagttcgaacgcctcggctacttcatggccgatcccagggcctcccgcccggaaatgcccgtcttcaatcgcaccgtcacgctccgcgacacctgggcaaaactgcaaaaacagcaggcggccaaggggggaccgtagccgaccgcccggccgcttcctcaaacgcatcatccagccgcacaggatctgcgcgtggagccgaaacgacgcttcggtgaacgcaggcaacgccagatcgagtcggccgacgggatcctcgcaaacatcaccggcgaccgcgttgtcacctctaaatggcaggggcttccgcgcccgagccgccccgatcccatcgatgctcgtctccgtccgcgcggccagcggccctgggggtctcgcgttccgaagatcgggcaattgcgcccagtcaacctgactctccgccacacccgatgatgcttttttgcgcgatcaaactcgggtatactggttcttggcgcataaaaaagcgccccacacgggagcgcgataggtcgctgacatgcagcgttgcctgacgcgtacgaaaccttactgtgacaagtcgaggaatcgtcgctcgaatacacgcctgccagtttaccgcagggtgcgcggttgtcaaccctttttcccgaattgtctcggcagagggggggcaggctcatcaatcactcaggggagatttgccgtgagcatgccgttttcgaggggcgcgacggagaaccgctatcgtttggggattgatttggggagcggttcgatcggctgggccgcggtggtcgatgcggacggcccgtcaccgcagatcctggggatgggcgtgcggcgttttgaggccggcgtgacagggtctgccgacgagatcgaggccggcaaggacaaatcccgtgccactgtgcggcgcgatgcccgcgggccgcggcgccagacctggcgacggcagtatcgcatccgcaaggtgtttcacctgcttcagcgtctcgggctgctgcccgacagcgacgacgattcccacgacacgcggaaccgcgtgatcgccgacctggatcgccagttgcgagccgagtatctgaccggggcggaccacccggcgcaacaggtcctgccctaccggcttcgtgcggcggcactcgacgagcaggtgtctcgttttgccctgggacgcgccctttatcacctcgcccagcggcgtgggtttctctccaatcgcaaggcgggcaagaaggacgaggacgcgggcgcggtcaaagcgggaatccgcggattgtccgacgaaatcgaacggaacggttgccggactctgggcgagtacttcgcttcgttagacccggaccagcagaagattcgtgggcgttggacggcgcggcagatgtatctggatgagtttgaaaagatctgggctgcgcaaagccaacactacgacgacctcaacgacgagacacacgatcttctgtttgaggcgatctttcatcaacgaaagctcaagtcgcagaagggcctgatcggcgcgtgcgagttggagccaggcaaacgccgcgcgccggccgcgagcctggagtatcaggagtttcgtttgctccagcgggtcaatgatctggtgatgatcgacccggcgaatcgcaaattctcgctgatcgaacgcgaggatctgcaaacgctccgcgatgccccgcagaagcgcgccgcgttgattgcagcgcttcaggaagcagaatcgctgagttttgccaagattagccggattctcggcctcaaggccgaaaaacacggccgtgcatccgtcaagtggacgttcaacttcgaggagggcggtgagaagcgaatgagggggaataccacggccgcgaagctggtcggcgtgctgggggatcgctggacccggttcagcgaggaggagaagccccgcctggtggatgagattctctccttcgaaaccgaggaagtgctcgtgcgccgtctgatacgcggctgggcaattccggagaacgaggccaagcaagccgctgatatccatttcgagcagggttacggggcgctgtcgcgaaaagcgatccgcacgattcttccctatctagagcgaggcattccctacgcaacggcccgcaggcaagcctacggcgaggacgcgacggtggggacgccggaggacagccttccggcgaaccgcaactgcaagctgttgcgagacgtccgcaatccagcggtcgagcgagccctgagtgaactcagactggtcgtcaacgcactgattcgcaagtacggcaagcccgaatcgatccgcgtggaattgacgcgtgagttgaaacacagtcgggatcggcgaaagaggatcaccgagcggaaccggaagaacgagaagttccgctcggacgcgcgggcgaagatcctcgaggagatggggcacgaacgatactgctcggtctacaacattctcaaggttcgtttggcggaggaatgcaattgggagtgcccctacacgggccgaagtatcgcaatggcccagctggtgggcgaccatcctcaatttgaggtcgagcacatcgtccccttcagccgctgtttcgacaactcgtttgccaacaagaccctctgccatcacgaggagaaccgcaagaaaggcaatcgaacaccgttcgaagcctacggccatacggaatcctgggccgcgatcctgacacgggtcgggcgattccgcagcgagcgctccctggtgtcacgcaagcttgatttgttcaaacgcgaaaaattggacgacaccgaggagtttaccagccggcaactcaccgatacggcctacatgtcgcgcctggcagccgaatacttgggacttctctacggcgggcgaaccgatccagagggaacgatgcgcgtacgggtctcgccgggccgcgtgacgtcctatctgcggcgagaatgggatctcaacaagattctaggcatctccgatgagaagcaacgcggcgaccaccgccaccacgccatcgacgccctggtggtggctctcacgggcgctaacgagattcaggcgctgagccgagccgctgagaaggccgaagcgcagcagcagcatcggctatttgtggcggtcgatcagccatgggagggtttcttgggtgacgtgttcacggcagtcgagacaattaacgtctcgtcgcgtgtgtcgcggaaactcaacggacagttgcacgacgccacgatcctttcaccgccaaagccggccatcagcaaggacggcaagccagtaaaggttcatcatgtccgaaagaagctggaattgctcaccaagacgatggtcgacgatattgtcgatgatcgcgtgcgagaactggtcaaggagaagctcgacgccttcggcggagacccgcgcaaggcgtttcaggactccgccaaccatccgtacttccgctcaaaggatggccgcgtgatcccgatccacaaggtgcggattcgcacagggcttcgcggcatccaaataggcaaaggtagccgtgcgcggtacgtggctcccagggcgaatcatcacatggagattgtggctcgcttggatgcccgggggaatgaaaaggcgtgggagggtcatattgtaagccgccttgaagccacgcgtcgtcaccgcgaaggtctgccgattgtgttgcgagatcacggagacggcaaaacgttcaagttttccctcgcaatgggcgagcatgtgattatggaacatgaggaggaaataccccagctatatcgtgtcgagtcgatttcagaaaaagtcttagaatttcggttgcatgtggacgcgcgcccaagtaccgtattaagaaagatgtccaaggcaaggattacacgaagcccgcgcgctctgctcagcgcaaaagccaggaaggtcaccgttgaccccttaggcaatatccttccagccaatgactgaccgaatcctagatatctcgcgattggccgcgagattgtcggtgcggcacaagcagctcgtgatcgaccagtcgccggagggtgaagtaacgatgcctctggccgagttggccgtcgttgtcgtatcgcacccgcaggtgacctatacccaggccgtgcttgcctgtctggccgaatcgggcggggcattcgtggcctgcaatcgccagtatctgccggtgggactgttcttgccgctggtcgcccattttgcccaggccgagcgattcgcggcccaggcacgcgccgcccaacccctccgcaaacggctctggaagcagatcgtccgcgagaagatccgctcccaggcccgaacgctgcaagtcctgtacggctccgattgcgggctgttggcacttgtctcgcaggtccgctctggggataccagcaacgtcgaggcccgggcggcgcgccgctactggccccagttgttccttgatgtcgagtttcgccggaatcgggacaatcaagaccagaatctcctgctcaattatgggtacgccgtgctccgggcgatcatcgcccgggcgatctgcgctgccggactgcacccctcgctgggaatccaccaccacaaccgatacaacgcttattgtctggccgacgatctgatggagccgtttcgcccgattgtcgatctggcggtcgtagaatacatcggcgaacacgacgagccgtacggagtggaagcggccgccaagcaacatctcatcgcgcgtctgacgcgacggtatctggtcgacggggcacaacgcacgctgttcgatacggtgacccgcctggccgggtctttagccgacgtcttcctgaacggaacgctcaagttgacactgccgacgtgggaagccggcatcccggagccggctggggagtcggaattggggggtgaggagaattgaggggagaagttgcgagaatgccacgacgagaatacacactttcaggataccgcggcatgtggctgtttgcgatgttcgatttgcccgtcggaaccaaggcagagcgaaaacgctatgcgaagttccgcaaaatgcttgtggaagacgggttctcgatgctacagttctcggtctatgcgcgttactgcgtggacgaggaatcggcactggcgcaccggcggcaggtccgatcagccataccaccggagggctacgtcaggctgctgtcgattacggatcgccaattcggaaaaatggaaaacttcgttggaaaaaagcccgttccagcccaaaaagccccccagcagctttcactcttctgagcgaagctgtgccgcaagcccttttctggtcgcggtttgcggaggaaggagtgtatccgagcgacgattccccgcaagccacagcggctcagcctgcggtcgtggcagcgattacagtgtatccgagcgacgattccccgcaagccacagcaggacagtgcgacagtcgctgcgaaagccaagtgtatccgagcgacgattccccgcaagccacagcgttctggtattcgtgcgggcgcaggtagtcagtgtatccgagcgacgattccccgcaagccacagcgtagtgtacatgcgcgatacgctccgtcccagtgtatccgagcgacgat

SEQ ID NO: 3915 - DNA, 14545 bp, synthetic construct
  misc_feature 1..14545: note = Synthetic
  source 1..14545: mol_type = other DNA
cagcgtcgtcgtgtctcggttcttgcttcggggtaggaataaccacgctcttgtcggtgatgagcaccggggcgtcgtaaatgggaatgtctttcagtacggtcttctcaccctcggtaaccacgcgttctttgggcaactcgtaaatcgcgccggtcactgtatcgacccaaaccggcgtctggaacgtgacgcctgtcagcgtgatctgagcgggagtcgtctcgttcgtgttgtccggatggctcgaagagtcccaaagggccaagaggctctggaggctcccttgcttcttgaacagataggcggccgtcttcttttcgcactgaatctcgcaagcaaacccgaggacgggctccagcgactggtcgaagatggaagcgatattctgcacggtgtaataggacggtttgaccttgagcaccttgccgtcctcgttgcacttgatgagccccatccgcttcatgaaccggtcttcccgcgtgcgaatccagagcgggtcgacaaatctcgtgtagcgttggggctggtcataggccgggtcgtagaaggtgaacagcagcgactcgatcccatggccaagatcgccgatcaaccgccgggcgttccatttgcactgcgtcagctcgctattccatttctgtgaggagatcggcgccgaataatggggagcggaggtcgcgcccgactcgccctgccagatcttcatgttgggagcgtactggtgaatcatcgtcacaaattcctcgacacgcggatagatcgagtcggggttgagcgagtagtcgtgatagatgatccactcgaagagtccgatcttgcctcgctcgctgaggaccttcatgtaacgttccccatagcgggcatcgggccaaccaatcaccaggccggcgattcgagcgtcgggaatatgcttcttgatgatctcggcggtgcggatgttgttgtcggccacgatttccggcgtgttgcccttgcagttgttcggctcgttccaggtggaccaatcacgcacgcgccctttatagtggctggccaaggcctcgatccagcgatcccaggcggccagggccacgtcgccggtcggcagcccgtcactcagcgacgccccacccccgccgggatagatcggattgccgtaggacgtttccatcagcacatccatgccctgcgcacacagatagtcgacctgtcggtcgagccaggcgaagtcaaaaaccccttgaaccttttcagtcttcgcccagccggcttggagacggattcgcttgatgcccagcggctcgatataggccttgaactgctcaaaatctccatagtcgcgatcgagcatctcgcaaccgatcgtcagattcgaccgcccgacctcacgtgcaccacgaggcttaaccgtcccgattcgcttcaaatcgggagcaagggtcgtctgcacgcggtcgtgcgtgtcgtcaatcatcggcctgatcgtctcgcttgcgagaagcggcaaggctggccccagcagtacagccaagagtgaaagcgaacagcaggttttcatgagccggttcctgtttttcgaaggcaagtatcgagaaaaacggactctctgggaattgggggcgtaggtgttgcagtcaaaccatcgtggcggggcggcccgttggctgtgcataggccgaggaggaagacccatgcggtgaaaatcaggtgtcgcgttgtcgtgctcggtcttcccgtgccgcggtggatgggctgcctcgtcacgctaggttcgattcttggtcacggcggagcttgcgtcaatgtaagatctagcaaataatgtgaccaaattggccacatcgacggagtaccaccagttggggtttgacgaacaggatcggtaatagcccctgtagggaacgccctccgtgacgttccgggaagcagaaacgacggaacgccacagaaggtgttcgctacaggttttgtctgtcaaagcccactcgggagaagctgagatgtcgacaccgagatatccgcaagtcgccctgctcattgatacggcgaccgattgggggcggcgtatgattcgcggcattgcgcagtatgcccaacagcagggcggttgggatttgtggctcgaacaacgctgccagttcgccccgggccgactgccgccgggttggcgcggcgacgggatcatcgcccgggtggccgatcttgcgatggcccggcacttgaagcgggcgcatggcctggtggtcaacgtctccacggctcgtgtgccgggggtaagcttcccgacggtgacggccgacctgcatgccgccgcaaagcttgccatcgggcatctgttggatcaaggcttccggcatttcgcctattatgccccgatgaacctttcgttcgtggaggatcaccatcatagctttgtcgagacgcttgccgagttgggctactcgtgtgcgctgttgcactcccccagcgccaaacgcccacgccagggttggcagagacagcagaagaagctggagcgttggattcgcgacttgcccaaaccagtggccgtactcacctggaccggccggcgcggccgtgaggtgatctacgcctgccgggcattagggctttccgtccccgagcaggtggccgtgctcggcgccgacgatgactccctgttgtgcgagccgtgcaatccacccctgtcggccttggctctgacctccgaacagatcggcttcgaggccgccgcgttgttggaccgcatgttgcatggcgcgaagccaccggccaagccggtgctgatcgagccgacgcgcgtgatcgtccggcaatcgaccgacacgctggcaatcgacgatgaagacgtggcccgggcaatcgctttcatccgcgcccacacgtcacaaccgatccaggtttgcgacatcttgcgcgccgtgcccgtgtcgcgcagatccttggaccgtcgcttccaacaagtgctgggccgcacgccggccgacgagatccgtcgggtccacctggagcgggccaaacaactgctggccgacaccgacctgccggttcccaaggtggctgccgcctcggggtttcgttcccgcgagtatctggcccgtgccttcaaacgcgcgaccggcttaagtcctcgccagtatcgtaaccgggtgcagggacgggcctgaacggtgccacagccttgccgggcctgccttcaatacgcattcgtgagccataccgcttggctttttctcgacacgcctagcatgcgcatagcgccgaaaccacccaaagcgcgcagccgctacccagaaagaggcaggactccaccaggaggcgatagcgaggggcgatttccgggacgaaaactcctactaatggcgggttgatcacgcagaaacttgcgatagaaagccgcggaaggttaagatagtaaggtggtggagtacaattcgtcgcggggctcgtgtggatttaggatgtgatcagcgcatgacggccaccccgaatgattcctggttctatcttgctggagagcagccggtcggtccgctgacggcagagcagttgcgagcagcggttgcggcgggggtggtgcgtccagagacaatggtccacaacacgggttggaccggttggtgtcaagcgtcgcaagtaccagggctgttcttcgacctcccggtggcgacgccggtccaagtcggccagcctagcgaggccgagcccacgccccccgcaggaattccgatccaagtgaatccgtcgccgcagccgcggcacggggccgtgagcacggtgcgaaggaagaagtccccggtggggcaggtgcttctgcttctgggcactctagccatcgggttggtggcggcgttcgccctgtggaccgtcctctccaagccggcgccgaagcgtcccgtagccaaggcgcccaaagaacccgtcgtcgaagaggaacgggaagacctccggcggcgacggccggttgttgttcacgaggaggaagacagtgcctttcccgatttgaaaccgggacgggatctggaggcaggatttgaccggaagaccttcgagaccgacgagcgtcctacgccccaaggccgaatcgacgagttggtgtttgccaaatggaaagagttgaagatcgagccggcgaacatttgctccgacgcggtttttctgcgccgagcctatctggacgtgatcggtaccctgccgacagtcgaagaggcccgcacgtttctcacggacaagagccccgataagcgtaagaaactgatcgacgccctgctggagcggcccgagttcgccgactactgggcgatgaaatggtgcgatatcttgcgcgtgaaggccgagtttccgatcaacctctggccgaatgccgcgcaagcctatcaccgctgggttcgtcacgcgatccgcgacaacatgccctacacccagttcgtgcgcgagctgctcacctacagcggcagcaacttccgcgcgccccaggtgaacttctaccgtgcccttcagaacaaggagcccaaggggattgcccaagccgtggcgttgacgtttatgggcacgcgggccgacaagtggccggccgagcggctggaggggatgtcggccttcttcctcaagatcggacgcaagtcgacccgggagtggaaagaagagatcatcttcttcgatccctacaagaccgaggccccgccaccagccccagccgccaaaccgggcgaaaaacgaaaatcgacggagaaaaagcccaagccggctcccccacccaagccggtctttcccgacggcacgaccgtggaaatccctcccgacaaggatccgcgcgaagtgttcgccgactggctgatcaccccgcagaatccctggtttacccggcacattgtcaaccgtgtctgggcgtggctgatgggacgggggattgtccatgagccggacgacatccggccggataacccacctgcgaacctcgaactgctcaacgcgctggctgacgagttgatcaagaacaattacgacctgaggcacatctaccgcttgatccttaactcgagcacttatcaactttcctcgctccctaagagcaagcatccggaggccgccgcccagttcgccttctacacggttcgccgcttggaagccgaagtgatcatcgacgccttgaaccaaattacggggacgaccgagagttattcgagtattattccggagccctacacgttcatccccgaagtgcagcgtgcgatttccttgcccgatggcagtatcaccagcagtttcctggagttgttcggccgcccttcgcgcgacagtgggtttgaatcggaacgcaacaatcgaatcacggccggccaacggttgcacctgctcaattcgagccatatccgcaataagatcaacaagggaccggcgttaaagaagctgatccaaggggaaaactcttccgagaatctttatttggcaattctctcccgctttcctgccgaaggcgaaggagggggagacgggacgaccttggcgtggattttgatcaataccacggaatttttgtttcggcactagactatcccagattacggcgcggcctgcggaacggtcgaccgtacagcattcgacacgaggtgagaagatggccaggaatcgtgaagtgtacgtgccgttgttcgacacaaccgtttcattgaattgcgagcgggtttcacgccgctcgctgttgcagtctggggcattgggcctgggggggctcctcctggggcaccgcctctgctccgccgctccgccggccacctcggccaccgcaacggcgggttccgcggcacgcgagcccaaggccaaagcggtcatccagatttggctctccggcggccccccgcacaccgacaccttcgatcccaagcccgacgcaggctccgattataccggcccgctgaacggatacctcgaaacgaatgtcaaggggattcgcattggccaattgttgccggagttggccaaagtggccgacaagtactcgatcatccgtagtatgacccacggccagaacggccacgagaccgcttcctacatgctccagacaggccgcatgcccggcggacgcctcgtctatccggccgtcggcgctgtggtcactgccttcaagggcttccaggaaggctcgaagagcctgatccccccgtacatcgtcctcacccagccgcagggacggttctcggaagctggcttcatgggcatcaagtacaagccctttgccaccggcggcgacccgaacgcaatgcgttttgccgtcgaaggaatcatcgctcccggcatctccgatgaggagcagcagtaccgccgcgatcaactcgaccaagccgacgccctgagccatgccctacgcgaaaaccccgagattatggccgccaagaaggccgagaaggaggcgtacgaactgatcatcggcgacgccggcaaagtcttcgacctctccacggaaaaggaagaactccgtacgcgctacggccggaacaccttcggccagtcgtgcctcgccgcccgccggctcatcgaaaagggggtcaagtacgttacgatcaaccagttcgtctgggatacccacaaggagcatttccaggccatgcgccggctgttgcccaacctggataaaggggtggctacgctgctgaccgacttggccgaccacggactcttggacagtacgatcgtctggtgctgcggcgagttcggccggacacccaaagttgcctgggagtcgccctggaacggtggccggcatcatttcggggccgtgttttccgtactcgttgccggcggcggtttcaaggggggccaagtcgtcggttcttccgatgccgaaggcgaaagcgtccgcgatcgtcccgtttatcccggcgatttgatcggcagcatctacgagttgctcggcattgaccccgacgccaacttgccgcatccaatgaatgaaatcgtcaaggccacgccgtcgccggccgaaggcctgaagctggccgggcggctcaaggaaatcatgtaactggtcttcgccgatccccgctccccctcgcgcacgcgaggaagcggaacggcttgcttgttgtccgtgtccctgctgttcacgcggagcttacgatgatcgtctctcgatggtattgggtccttgggctcgccatgctgctagcgaccgcctccgagcttgccgcgcaagtcgctgaaaagcatccccacatcgggtatgtcttccccggcgggggctgccgcgggacgaccttcgaggtcgtcgtcggcggcgagaatatcaaagaagtcaccgaagcttatatctccggcggcggcgttaagaccaaaatcgttcgttggtaccggccgatgacccaaggagaatacgtcgcgctgaatctgaaaatcaacttcaagatggaggagttggagaaaaagaacggaccgggttcggtgactcgcgagcaggtcatcaagatcctcgggatcaccgatgaacaactcaaggaaatggagatttatcggatgcgggaggcggaccccaaacggcaacccaacccccagatcgccgaggagctcaccgtccgaattgaactcgatcccgatgccaagttcggcgaccgggaactccgcctcttgaccgccacggggatgtccaacccgctctggttctatgtggggcaatggcccgaaatccgcgaaaaggaaccaaacgatatcacccccgatccttcggtctatatcaagtttccgatggtcattaatgggcaaatcatgccaggggatgtcgaccgcttcgcctttgacgccaagaaagggatgaagttggtggcccactgcgccgcacgggaattgatcccctacctggccgatgcggtccccggctggttccaggccgtgatgcatctctacgacgacaagggaaatgaggtggcctttgccgattcattcggcttccggcacgatcccgtcctgctctacgagattcctaaggacggcaagtacgtcctcgaagtccacgattcgatctaccgcggacgcgaggattttggctaccggatctcgattggcgagatcccctacatcaccggcctgttccccttgggcggccgggtcaacaattcctgcaccgttgaagtcaaggggtggaacctgcccaccaactcgctccgcttctccccctccttcgaccgcggccgcagcatccaaccggtgttcctcgaaaaggacaacatcttttccaaccaagtggccttcgtaatggacattctccccgaggtcgtcgagcgcgagcccaatgataccctggagcccgctcaaagcctcggctcgcccattacaatcaacggacgcattgaccgccccgacgatgtggactatttccagttcgaaggggctggcgtcgtcgtcgcggaagtcttcgcgcgacgtctctattcccccttggattccgtggtcactttgaccgatgtccgcgggaaagtgatcgcgcataacgacgactttgaagacaagagctggccgctgatcacccaccacgccgactctcggctcctggcggtcgccccgggcaggcactgtattgcaatccgcgacgcgcaacgccgtggcggtcccgacttcgcctatcgcctctatgtccgccccccacgccccgacttcgacctccgcgtcacgccctccagcattaccgctcaggccggcacctgggtgccgatcacggttcacgccattcgcaaggatgggttcgaccaggacatttccctggaactggagaacccgccccctgggttcgccctcagcggtgcgtgggtgccgggcggacaagacagtgttcgcctcaccatgctcgtttcccccgaggccaccaaagagccgatcaccttgcagctcaacggccatgcttcggtgcgcaaccgccgcatctcccgaccggcctttcctgccgacaccatgacccaggcgttctcttatcaacacttgatgccgaccaaagactggaccttcttcgtggtcggcaacccgcccggcaaacccccgtgttcgttcaccgacacctggctgcggattcccaaaggcgggcaggtgatgatccgcgtggccgtcgagcagggccgcaacgccaacgagctccgcttcgaattgagcgagccgcccgatggcatcacgatcgaggaccccgtcgcctttggcaacggattggccattcccgtcaagtgcgacgctgaaaaagtcaaggtcggccagaaaggcaacttgctcttcagcctcgcccgcgaattcaccgtcatcagcaagaaggacaaaaaaccgaccgccgctcgccacgtcatcggtttcctcccggctgttcccttcgaagtcgtgtcgaaccgctaagggttcgcgcggccggaaacgcctcacgcgcattgagaggcaggaagaggcaaggactgttgcacgtccttgcttcttcctatttgcctaacctatttctccgcgacccctgatctgcagttcacacgaaacccacgggtcgtagctccttcgaatcgcttgcccgcttaagcccccatcccacgcctattaccttccggtcaccacattcacctccgcccactccctcatccttctgcattcccccctcccttgtcccttggcgaccgcggatgtagaatcgcgtttttcccggcggggttttcaaacagcgggacgcgggagactggggctatgccgaccaccgtaggccgagcgcacacgcggccgtggcgcgagtttctcactcgcgatcacacgttgaacgggggcattctctctatacgcgacggatgtgcgatcgacggacaagccttcgtttgctcgaacgcaaacaaaagagaacagcgcaaaaaaaaggcgtctcgcagggagacgccgagggcgctccagggagcggagcctcgcgcgagcgaaagctcacttactgtgacttggagcaatcgtcgctcggatacactggggttgaacttaacacgttcttgcctgcttgtcaacgggtcgaaaggggagaaagatgcgcaacgattctgagcatcgtccgtatgtgctcggactggatctgggggtacaatccattggttgggcggtgctcgatcttgatcggcagggccgccccttcgcggttcgacgtaccggcgtgcggtgttttgacagcggcgtgggacacgaaaaagaaattgagcaaggcaaggacgaatccaccaacatcaaacgccatcaggcccggcagatacgccgtcagctctggcgtcgttcacggcgattgcgaagcgtcttcgtagtgcttcagaaagccggacttctgccccaaggccctgccaaagaggctgagcaacgacaccagatcctcgtggaactcgaccgccaattgggcgccgaccaaggcatctccaacaatcgcgttgaagcccacctcctcccctaccgactacgggcgaaagccctcgatgaaccacttagcttgcatgccgtgggacgcgtcttctaccacctcgcccagcgacgcggcttcttgagcaacaagaaggcccgaaaggaatccgacgatgaagggcaagtcaaggcgggaatcgccgagttgcaggcggccattgacaatgcgggagcgcgaacgttgggagagtactttgccggccttgaccccgagcaatcgcgaatccgcggacgctggaccgcgcggcagatgtatctcgacgagttcgagaagatctgggattcgcaatcgccctatcacaaggctttaacggaagagctcaaacatcgcctccatcgagccatgttcttccagcggcccctgaaatcgcaaaaaggggtcgtcggcaagtgcgagctggaaccgggctctcgccgggctcccctcgcttctctcgatgcccaacaatttcgttatctgcagaaggtgaatgatttggagatcattgcccccgatggccagatcctctccctcaccgaacaacaacgcaccacgctgatccaggctctcgaaaccaatggtgagctcacgttcagcgcaatccgcgccttgctcggtctgaagaaaccgaagggagcagagcacggctacactttcaacctcgaaaccgggggagagaaacggcttgtgggaaaccgaacggccgagaaactggccaaggttctcggcgaccgctggaccaccatggccaacgacgaccgtcatcggctggtcgaggaactccttgcattcgagaaagaagacgctttggcccgacgcctccaaaaagcctggggctttgcttcgcccctcgcctcccaattggctgccttgacctttgaacccggctacagtgcgctatcccaccgggcgattcgacggctgctccccaagttgcaggcgggggaacacctcaatacggcgcgaaaggaactctatggtgatcagttggcggaaaagactgtctacgacctgctgcctcctgtcttgaaggcggtcccgtccttacgcaatcctgtagtctgtcgtgctctaaccgagttgcgcaaagtcgtcaacgccttggtgcggcagtacggcaagccgagcctcgtgcgaatcgagcttgcccgcgacatgaaacgtggacgcgaggccaggaagcgtgctaccgaccagatgcgacagcagaagagactccgtgaggcggccgaaaaacggattctggcggaaagcagcgtccgcgatccatcgccaggcgacattctcaaggtccttctggccgaggagtgtaactgggaatgtccttatacgggcaagccgatcagcatggggactctcgtcggccagatgccgcaattcgacatcgagcatatcattcccttcagccgttcgctcgacaactcattcttgaacaaaacgctctgctaccacgaagaaaaccgtaatgtgaagcagaaccgcacgccttgggaagcctatgcaagctcccccgatcggtggcaggcaattctccaccgcgttcgccggttccgtggcgaccaagccgaggctaaactgcgacgattccaaatgcaggaaatcgcccaagacttcgcagctcgccagctcaacgatacccgatacatctcccgccttgctgccgactatgtggggcttttgttcggtgggcgaattgacgaccacagccgactgcgcgtccaagtcagcgccggccggaccacggcttatctccgcgatgagtggaatctcaacagtatcctcaacgatggcgggagcaaggaccggtccgaccatcgccaccatgccgtcgatgcggtggtgatcgccctgaccgaccctgcggccgtgcagcttctcagccgggccgcggcgcgcgccgaggaaatggggcggcgcctgtttgcccccatcgatccgccttggcagggatttctcgaagaagtgcagcaatccatcgatgccgtcaacgtctcttaccgcgtcaatcgccgcgtctccggcgctctgcacgaagaatcgttttacagtccaccgttccaggccatcaagaaaggcaagccagtcgagtatcgccacctgcgcaagcctttggcgagaatgtccctcaacgaagtggaagcgatcgtcgatgacgccgtgcgcgaatgtgtcaaggccaagctggcgcaactcggcggcgatccgcaaaaggcctttgccgatcccgccaaccatccctaccgaacaacgcacgatggtcgtttgatcccgatccacaaggcgcgaattcgccgaaatgttgcggccattccggcaggacgcaacgaccggcagcggcatgtggtccccggtaccaaccatcatatcgaaatcgtcgccaccgttgaggaaaaggggaacgacaaggcctgggaaggcgtcttggtcaacctcttcgaggccgtacaacgtgccaacgcaggggaaccggtcattcgtcgcaaccatgggccgggaaaagagttccgcttttcgttggcaggcggagagtacgtcgagatggagcacgaaccaggcaagcgacaaatctatcgcgtcataggcatttcccgtgacgaggtggaatttcgcttgcacaccgatgcacgtccaactaagctcctaaggacagcgagggctcgtgtacgataccggcccagcaagctcttgcaagtgaaagcacggaaggtggtcatcgaccccttgggcaacgtccttccggcccatgattaaccgcatccttgatttctccgagtcgcccgcacgcctccgcgtgcgctatgaacaacttttggtcgaacgtccggaccaccccgacgtaaccatccccttgaccgacctcgccgtggtcgtcgtcgcccatccccaggtcacctatacccaagccgtcctctccggactggccgaggccggcggaaccttcgtcgcctgcaatgccaagaaccttcccgtgggcatcttcttgccgctggtgaaccactccacccagggcgaacggtttgcggcccaagcccaggcctccgagcccacgcgaaaacgcctctggcagcagatcgtccgcgccaagatccgtgcccaggccgacaccctcgaccagttgtacggcaccgatcatggactcaaagccctcattccgttggtccgctccggcgatcccactaacgtcgaagcccgggcagctcgccgctattggccccagttgttcgccaacatgaattttcgccgccatcgcgaagacgaagatcaaaatcttctgctcaactacggctatgccgtactgcgcgcgatcgtcgctcgggccatttgcgcggccggcctccatccttcactggggcttcatcaccacaatcgctacaacccctattgcctggccgacgacctgatggagccttttcgcccaacggtcgaccgctcggtggccgaatacgtcagcacgcacgacgccatctacggagtcgagtcggcagccaaacagcacatcctctccgatttgaccgcacgctacgtgattgccggagaacagcgcacgttgttcgacacggccgctcgcatggcgacgtcgctggccgatgtcttcctgggaaacgcacgaaaattagaactgcccgatgggtgatcccatgccacgcggtgagtacgttttgtcggagtatcgaggaatgtggctctttgcaatgtttgatctgcccgtcaacacacgcaaagctcggaaacggtacgccgagttccgcaaaaccctactcaaggagggattctccatgctccaatactcggtctatgcacgctactgcgccagtgaggaggccgcgcagacgcagcgtaatcgggttcgtgccgccctccctcccgaagggtatgtccgccttctcgctgtcactgaccggcaatttggcaaaatggagagttacattggaaaaaccgatgtcgaaaccgaaaaacctccgactcaattacagcttttctgataccaacctcgccttaacaccttgccgcacagcgacttgggagctcaagtgtatccgagcgacgattccccacaagccacagcgccgcgtcgcggccggatgtcgcacgcgatagtgtatccgagcgacgattccccacaagccacagcgcgattcgaaaagt

SEQ ID NO: 3916 - DNA, 13184 bp, synthetic construct
  variation 11832..11858: note = note, n is a, c, g, or t
  misc_feature 1..13184: note = Synthetic
  source 1..13184: mol_type = other DNA
  variation 12641..12721: note = note, n is a, c, g, or t
  variation 6448..6500: note = note, n is a, c, g, or t
  variation 10103..10114: note = note, n is a, c, g, or t
  variation 1819..1827: note = note, n is a, c, g, or t
  variation 1682..1735: note = note, n is a, c, g, or t
ttcgagcgtcccgtgaaccgggaccaccgctcccccggcgtccaaaggacggacttccacaacgaggccatccacttccacgtcgccgtcccagttggccacccacgcgtcaatcgccagcgactcgacaggaatcatatcccgccggccgggtcccttggtcgggacggccgcggattgcggtgccgaaccggccgcttctgtggcgtgtgcatcgggccagcgcccagaatgctcgcggagaatgctcggcgcgggttctcctggccgaaccacaacgcgacggaacccttccttggaaagggtctccccgccaacttgcgcctggacgactcgttcccaccggatcggacggaggatcgtgatcgtgtcgtgactccaacgcagccaaagctgggtttcgtccgtccgagggtcgacctcggcggtgagactccgtccgctggccaactcgacggtgaccggtccttggtgctcgtccgcagccgctcttcccgttccgggcgccgttgccagcccaagcggcacggacaatccgcacaacacgctgatccaaaggccgattctcatgggcacgtctgctgtcactggcttgtggtgaaggcgtatcaagccagggggcaaaacgcgtgccctgcaaagccccgccgaacggcctccgcgcagcaaccgcttgccacataatcacttagtcacttccactggtcttggcaactggatcgcgtctcgtcttccacgttgccccaagacatcgatgttgccctgcgtcaacgcgaccggcggaatgtcgcgcgttcggccatctctcgggcatggtaactggaacggacgaaggggccgctggcgacatgcttgaagcccagggcgcgagcggtgcggccgagtgcctcgaactcatcggggtgcaggtatcgctccacgggcagcaggtccggggagggttgcaggtattggcccagcgtgagcatttcgcagccggcatcgagcaggtcggccatcgcgtccagcagttcctggtcggtctcgcccaggccgagcatcaggccggtcttggtcttcgtcgcccggctccgacttcggacccggcgcaacatttccagcgtccagcgatagctcgccttgcgcccgcgcaccttccgatacagccgcggcaccgtctccgtgttgtggttgtagatctcgggagccgcctctaccagacggtcgaccgccgcccgattgccgccgaagtcggagggcagcacctcgaccgtggcccccgtggcttcccggaccgccaacacggtgcgcgagaagtgctcagccccgccgtcgggcaagtcgtcccgggtgacggaagtgatgaccacgtgccgcagtcccaagcgccgggccgcttccgccacacgttccggctcgctggggtcgaccggccgcggcctgcccttggccacatggcagaaaccgcaccgccttgtgcagacgtcgcccaggatcagaaacgtggccgtcttcctcgcgtaacactccatccggttcggacaccgggcgtggtcgcacaccgtctccagccccagctcctcgaccagaccggcggtgaagtgtttcgcgttccccttgggcacgtttcgcttcaaccaccggggcagatctcggggaacagaacgggccatggagagtggtcagtggacagtggttagtgnnnnnnnnnnnnnnnnnnnnnnnnnnnnnnnnnnnnnnnnnnnnnnnnnnnnnngtgcttcttgctgccgcgctcggcgcgggtctcacgaccccgccgaagacccgaccgaaggtctcaagtccctgctccacgccnnnnnnnnngagggcgtttcccccgatggcatacggccgccgcagcccgtcatcgccgggatggaccgccttgacgtaacaacggatgccccgtgtgcaagtggtaccggtcgcagccgaaggcgtcggccagtcggccgacaagctccgcccggacgcttgtcattttaaccggcttttgacgttcggccaccaggcaactcattcgagccgttggctgggtgtcggcttccacgagccgaaacaatcccatcgagggggccacgttgataaaggccccgtggtaggtgacccaatcgcgaaccgcgatcccgaaggcggccaactggccggttcgcccccagacaccgtgtcggcccggccgggtgtgggcctggacgccgagtgcctccaaggtgttgaggatgccggcctgaaggcggtcgacgtattgccccaccgacaagttgtgccaccttaaggggacgatcgggtacaccgcaagctgccccggggcgtggaccaggcatcccccgcctcgcttcacccaacggacctcgagctggccgcttcgaatgagtcgacagtccaattggacctccgacggcgagccgccgcggcctatggtgatgatagccgggtgctcgcagagcaacaggcagatctgtccatcgactcgggcggcgatccggccgatcagccgctgttgcagggccaggcatcgactcaactcgatccgccccaagaggtgggcttccatcgagggagaagacctttcgctctgaaatcgggttcccgacatcggcgcccttgagtctggccagccggaatagtacaagaaccgtatggaagcaagcgcgcccgccggcgcaaaacgcattgccggccgcacgttcgattatctcaaacaaggcacgttcaaccaaggagacccagccacggcgaagaggcaaaaacaccggtcgaagaaagagacgcccggcctcgaaccggacaacgagcggctgatcgcgcagaatcgcagagcgcggcacaactacatcgtgctcgatacgctggaatgcggaattgtgctggtcggcagcgaggtgaagagtctgcgcgccggcagggtctctttggccgaagcgtacgcccgcctccgtgacgacgaggtctggctggtcggctgcgacatccaggaatacgtcgaggcgaatcagtttaaccacaacccgcggcggccgcgcaagctcttgctgcatcgccgcgaaatccaccgttttgcccagcaggcctaccagcgcggctgtactctcgtacctctgaagatgtatttcaaacagggtcgggccaaagtgctcttgggagtctgccgggggcgacagaagcacgacaagcgcgaggcgatgaaaaaggcagaggcaaggcgcaacatccagcaggcgatgcggcggcggtaatccccctttcgggtcatccgggttgctctcttctcgtgcggcgactgggccggtatacttggatggttcaaaacaggtcgccccggccccggcggtcggttttcaccgaccttccttcttccccggaacccgacaggggcttcccaagcggctgtcagagatccatgcccaagtacatcgcccgacacggcgctatgcgaatcctaggggtattcgactcccccgaaagtgatgtataccagcggggtgtgaatgtgatcctgcggaccgaccggggattggaagccggagaggtcctttgcgaggccggcagcgaggccgtggagaaactccgagacccgagcaagggccaaatcctccgcgcgatgacccccgaggactcccacgagctccgccggatgcacgatcaggaaaagaacgaattccaggtctgcctggagtgcatcgcgaagctgggcctccagatgcaattggtcgacgtggagcacattttcggcggagagcggatcgtggtctattacctggccgatggccgcgtcgacttccgggagctggtcaggatgctggccggggagtttcagactcgcatcgagatgcggcagatcggcgtccgcgacgaggccaagctgaaggccgactacggcgactgcggcaatccggtctgctgcaacagccatctggtgtcgatgccgccggtgtcgatgaaaatggccaagctgcagaaggccacgctcgatccgaccaagatctccggccgttgcgggcggctgaagtgttgcctgcggtacgagttcgagacgtacgaacagatgctcaccgagatgcccccgatcggcgcgcgcgtgctgacgcccgacggccgagcccgggtgatcgggcatgaaatgctggccgcacaggtcctggtggaaaccgaggagcggatccgcaagctggtcgacttggcccaagtttcccccgcgccggacgacaaacaagcggatcgatgatcaatcaacaatcatcaatggacggacaaccatgtacgatctgtcgcgagagctcgccgagcttctcgaagaggacgaccgataccacgtcggagcctacgagttcgtgtttagctcgcttgcctatgcgcagaccgttctgcgcatgggcagcgaaaggccgagcgaaccgtcccggccggccggcgaggaaccggacgaacccgaacggcacgtcaccgggcaggagctgtgtgaggcgatccgccggtacgccctgcagcagtacggcttcttggcgaagatagtgttgaacaattgggggattcgcaccaccggcgacatcggcgaaatcgtcttcaacctgatccgtttcggccggatgcgaaagacgaaggaagaccgtcgcgaggacttcgacgaggtgtacgatttcgagaccgcctttgagcaagagttcaaaatcagcccgcccgagtaaccgttcgccgggcccccagcaacccgcaggaaagacctcacgatgagccgccgcaagaagtcatctgccggtcgccgaggcggtgcggccgggtccgagcagaatggtcttcgctcgaccgatcgggcggcagcggagccgaatcctccccggccgaacaaggtgttccttgggacgaccggcctcctgctggcggcgtggatcgcctttctgatcgtgctggccctgacgacctggggggccgattgatccgtccgtctcggggactataatctaaatctcttgagcgaccggggcgtggcgatgtcgggctggtcggggcgtacgatgacggtcacccttagagaattcgtcgacaacctcactcagagcggcctcttctcggccgaagaactctcggcgttccaggagagtctgccgcccgagcggcggcccaaagacgtccaatcgctcgcccgcgaactggtccaagccaagaggctcaccaggtaccaggcggcagccatctatcaggggaagacggaaggtctggtcctcggggagtacgtgatcctcgacaagcttggcgccggcggcatgggccaggtgttcaaggcgaagcaccggcgcatgaagcgtctggtggcggtcaagatattacctgctcgggcgatggaatcgcccgaagccgttcggcggttctatcgcgaagtggaagccgccgcccagctctcgcaccccaacatcgtcaccgcccatgatgctggcgagcacgaaggcacgcactacctggcgatggagtacgtggcgggcgaagacctgggcaagctcgtcaagcagcacggaccgctggcggtccactgggcggtcgactacgtgatgcaggcggccaaaggactggagtacgcacactccaaaggcgtcatccaccgcgacgtcaagccgggcaacttgctcttagacaccgaaggctgcgtcaagatcctcgacatgggcctggcacggctgaacaaaccgctgctgggagaccccgatgccgccgagctgtcggagttgactgaggccgaccgcatgatgggcaccatcgactacatgagccccgaacaggcggaggaaacccacaaggccgaccatcgctccgacatctacagcctgggctgcaccctgtaccggctcctgaccgacaggcccccctactcgggcagcacgcccatgaaaagactcctggcgcaccgccgggcccccattccctcgctccgcgaagcccgggccgacgttccgccggagttggacgtcgtcttccagaggatggtggccaagaaaccggaggatcgctaccagtcgatgagccaggtcatctccgcgctggaaccctgtgcctcgaccgaccggccctcggacgacgtggccctcacctcgttcctgaaacacctctcgcacggcgactcggcggtcaagcccaaggcaccaccgctcaccgacgagactcttcgctcgaaggacaaggaggaaaccggcgagagcttcaccgataagctggtccgcagtgtcggccgaaggaagctggccgtgttgggcatcggcggcggcgtcatcggtcttctcgcagtgctgagcctcacggtgctcttggtcggcaggggcggggaccgagatagcccaccgctgccgccggccgtcgttccggtcgaccggcccgccgcaagagagcctctcgaaaccggccaggcgaacgcacaagcggcaagtcgcgaagaagaggtagaatcgatcccggagannnnnnnnnnnnnnnnnnnnnnnnnnnnnnnnnnnnnnnnnnnnnnnnnnnnngcgtgggccgagacagaggcaaaagccacggcgatggtgcaagagcagcgcttcggtgaagccgtggaagtctacaacggcctgagcgagagattcgacgccctgccgcttcaactcaaggtgagtgatgccgtgaaggggttgatcgagcaggccgacgccgcttaccaggagatcgaggccagcgcccggcaggcgcggagtgagaagagattcgccgaagcccgtgccgccctccgcccggtgattgaaaaccatggcgtcgccagaaatgccaaggcggcccggcggctccttgccgagatcgacgccgccgagaaacaggagcaacggtcggcggcagcgtctcgggaggaggcgaaaagaaaagaggcgctggagagacagcgccaaatggaggcgcgctatgccgaggcgctaaaacccgcagaggagatggtggccgcttgggattttggccgtgccgccgacgctttgggaacactccggttcgacgagcaagagttggccgctcgcctggctgcgcgccgcgatcaggtcgggcgcctggtacccttgaagcaaaggatcctcgacaaggtcaacgccgccagtccgccgctgaagaagggagatctgaagatccgcggcttcaacggcgagatcgtcagggccgacgagaacgggctcgtggccaatctgatgaccggcaaaacggagccgctcacctggcaaagcctgggggcgccggccgtcgacgaactcatccaactcgtgatcgacgacggtaacgccgacgactggctcgccgcggggctgctggccctcgtcggcggcaacatgacgtcggcggagcagtgtttccagaaggcgaggtcgctaggagccaacgtcgattcctatcaggcgattttgggcaccaccgcgctggcccgcgtgacggagctgctcgaggaaaaagagttcgaccaggcagacgccctgctcactcgcgtcgagaccaactacgccgacagtccctggctggcggccaatcgagaggccatcgacgccgcccgaaccgcgatccgtgccggcatgcccgagagtgacgccgaaaagctcttccaggaagcggtggagctgttcggcaaggaagaccttttcgggctcgagactctggtgaagaagctcaagtcgcagtacgcaggcaccgcgccggtgaccgacacccggcgaaagccgtcgtttgccgaaatggagcaggcggtcgccggcttgggggagcggttgaccgtccgcaccgacggccagggcgacttcatcagcatccaacaagccatttcggccgcaccgcccaaggcgctgatcgaaatccaggacagcggcccgtacaacgaacggatcgtcgtcccacaagagaaaaaagggctcaccatccggggcgccaaagattgctggccggtgatcacttcgctggggccgatccgggacttcgacgtgctcgtggcggtcgaggcgcccgaaacgaccctccagcggctggtaatggtgcacggcacgccggccggtcagaatccgcactgcctcaccgttcgcgaaggttcgtgccgaatccgatcggccattgttttcgccaaagcggtccccgagggtttccgaacccaattcggcaatgaggaatgcgaggtcgaagactgcctgattgccgccaacgggagcttgtcgggtcgggtccttttccggaactgtctgttgctgggcggcgaggtgaatgccgacaggccgtgcgagctacggcactcgacgatcctccagaaactgcgactgagcaacccgcccagcgtggttctcgactcgatcgtgggcagcatcgaagtcaatcggcccggcaaccggatcgacaactgcaacctgctcgggtcggttctgcccgaaggcagcacgaactgcttaagcgcgaacccccggttccgcgacccgctgaatctcgatttcagcctcatgcccaacagcccctgcgccaagaaggcctccgacggcggcgacgtcggctgtcgctacacgcccgagatggtcgagctttgcaggtgcgcgctcgagctccgcaagcagggcgtgatcagcttttgaggatcgcgtgaggttctctctccaggaggatccggtgagcgacgacgaaacacgttcttccgccgatccgccgcttgagcccatcttgctcccggaaagccccttcgcttcgccagggggaccactcgccccgccgcgccgccggccgcgggtttggacggtcttcgccgtttttgtcctctcgcaggtcctcggcctgctggcggccgccctgttcctcgccgcgctgacgatctccactcgcgcggcaggggtccatcctccggaacacgcagatgcggacatgagcatcgtggtcggaggtgccgccggcttcttgggcatgctgctgtcgacgatgatcgttttcctcgtgctcgcgatcgcagcagcggtcctctcccctgttccctggcggaagcgattgcgcctgcgggccgcccgggtttcgcccctagccgtggtcgtgagcctttgtgggatcctggccatcagcctggcgctggaggctctcgatgccctgggagcactcccccaatcgcccgtgctcgaaatgttggccgacctcgtcgcgaccctgtctggtccgacgctgtgggccgcggtgttcgtgatcggggtcgcccccggcatcgccgaagaagttttgtttcgcggctacatccagacgcgactgagcaagcgatggggaccgggctgggccatcctggtgacgtcgctcctgttcggcttgaaccattgggacctcgtgcaagggacgttcgccgtggcgatcggcatttacctgggttacctcacggagcggaccggcaccatctggccggccatgctctgccacgcgacgaataacgtcatcgccacgttgacggcggccggagatgtcgacgtggtcgcgatgctgggaaccgtcacgacgctggtcgtggcaatcgtcgtcgtcagcttttccgcttggtacttgcgcacgtttctcggcgcaaccgagaacgccgacagcggagaaggggcagccgaaaaataacctgtcgcctgcggaaaatgaaaaacgccccacacgggggcgttacgaggtcgctgacaaagcagcgttgccttgcgcgatcgaaagtccttactgtgacaagcagggcaatcgtcgctcggatacactaaaggatagtctacccaatcccgttccgatgtcaaggagttctcgccatggcctcagagacaccctgcaactcaacggacattgcctaccgcgtgggcgtcgacctgggcagcggatccatcgggtgggctgcggtgcgtgaggggggcagcgggccccccggactgctcgccgtcggcgtgcggcatttcgaggcaggcgtgttgggcgacatcgaacagggcaaggatgagtcgcgcgcgactgcccgccgggaagcgcgtggaccgcgtcgcctcacctggcggcgccagcaccggctccgcacggtcttccgactgctccaggccatggaactcttgccaccgagcaacgacgactcccacgacgagcgccaccgcgtnnnnnnnnnnnngacaggaccctgcgggcaagcctagccagctccggcgatcgcgccccccatcatctgctcccctacctccttcgcgcccgaggactggatcaggagctttcccgccacgaattggggcgtgccatttatcaactcgcacagcgccgaggcttcctgtccaatctgaaggcggcaaagaaggacgaggacgtcggcgttgtgaaaaaagggatcagcgacctggaagaccggatgaaggaggccggctcgcggaccctgggcgaatacttcgcctcgctggacccggaacagtaccgcatccgctcccggtggaccgcccgccaaatgtaccaggacgagttcgaaatgatcctggccgcccaatcgccattccatcccgtgctgagcgacgagaacaaacaacggctattccaggccatcttcgaccagcggcccctcaaatcgcaaaagggcttgatcggcgcctgcgacctggaacactacaagcgcagggcccccgcagcttgtctggaattccaggagtttcgtatcctccagcgcgtcaacgacctcgaagtgatcgagcccgacggggagtgccggcggctcagcgcggaggagcgggccaagctgctcgcggagctcgccgaaaagggcgaggtcaccttccgcaggattcgcaccctgctgaaaatgagaccctcacgcgagtacggccgcaactatgcgttcaatctggaagaaggcggcgagaagcggctcgtgggtaaccgcaccgtcgccaagctggcgggcattcttcgggaccgctggcgcgaactcccgtgggaaaaccagcgatcgctggtcaacgaaatcctctccttccagtcggaagaaccgctggtaagccgcctggtcaacggctggggattcgacgttgcctcggcgcgcgccctcgccgagacatctttcgagccaggctatggggcattgtcgcggaaggccatttcccggctcctgccccttatgcgtgaaggcatcgcctacgctaccgcccgaaagcaagtctacggcgagacccgcgaggagcgagagcccctcgatctgctgccgccaaagcaccagtctgccgtcttgcgaaacttgcgcaatccggctgttgagcgggcgcttagcgagttgcgcaaggtcgtcaatgccctggtgcgcaagtacggcaagcccgtagagatccacgtcgagttgggccgcgacctgaagcacgcccgtcagcgccgcaaacagatggccgatcagaaccggcagaacgagggcatcaggaacgcggcgcgtgggaaaatcctccaagacatgaaaaacgatcgctattgcacgcccgcgaacatcctcaaaatccgcctggcagacgagtgcaactgggagtgcccctacaccggccggacgatctccatggacgccctagcaggcgaccaaccgcaattcgacattgagcacatcatccccttcagccgctcctttgacaattcctttctcaacaagaccctctgctaccacgaagaaaaccgaaagcacaagcgcggccgaacgccctacgaagcgtatgcccggaccgaccaatgggaagaaatcctcgcccgcgttcgccgcttcctgggcgacgcccgcgtcaggcggcgcaagctcgaactgttccagacggaaacgctccccgatccgggtgagttcgcccagcgccaactgaacgacatgcgctacannnnnnnnnnnnnnnnnnnnnnnnnnnggctcctctacggcagccagatcgacgccgaaggaaaacgccgcatccaagtcagtcccggccgggtcaccgcttacctgcgcgacgagtggaacctgaactcaatccttggccgacccgaccagaaagagcggaacgaccaccgccaccacgccatcgacgcgctggtgatcgccctgaccggcgccggtgaagtgcaccgcctgagccgcgccgcggaagaagcggaagccctgggccaaaccaggctcttcccgcacggcgcctttgatccaccttgggcaggcttcctcgcccaggcccgccaggccgttgaagcgattaacgtctcctcccgcgtctcccgaaaattgaccggcaagctccataaagacgggatcctgagcaagcccatcccttgcctcgacaagcacgggcgcccggcccaagtccatcatgtgcgcaagccgctcgactcgctctccacgcatgaagtggccgatatcgtcgatgaccgcattcgagccctcgtgcaggagaagctcgatcgcgccggcggcgaccccaagaaggcctttgccgaccgcaacaatcacccctattcgagagccaaggacgggcggatcattcccatccacaaggtccgcatccgcaagcacgacacgcccatcctcgtcggccaaggcagcaaacaacgatacgtcaatcccggggccaatcaccacatggagatcgtcgccctgctggacaaagaaggcaacgagaaacgctgggaggggcacgtggtcagcatgttcgaggcgnnnnnnnnnnnnnnnnnnnnnnnnnnnnnnnnnnnnnnnnnnnnnnnnnnnnnnnnnnnnnnnnnnnnnnnnnnnnnnnnngtcatggaacacgagccgggacaaccccaggtctatcgggtggtcggtatctctgccaaagtcctagaatttcgcttgcattgtgatgctcgcccaactaccgttctaaaaagactggccaaggcccgggtgacacgcagccccggcgccctgttggagctccgagcacggaaggttgccgtcgatcctttgggcaacgtccttccggccaatgattaaccgcattgtcgacttctccgaggggcctgcccggctccgcgtacgctacagccaactgtgcgtccagcgcggggacgaggcggaggtctccctccccatgtccgatctggccgtgatggtcgtctcccatccccaggtcacctacacccaggcagtgctctccaccctccttgaggcgggcggggccttcgtggcttgcaattgccaacatcttcccgtgggaatgctcctgcccctggcggcc

SEQ ID NO: 3917 - DNA, 12959 bp, synthetic construct
  variation 11607..11633: note = note, n is a, c, g, or t
  variation 1594..1602: note = note, n is a, c, g, or t
  variation 12416..12496: note = note, n is a, c, g, or t
  variation 6223..6275: note = note, n is a, c, g, or t
  variation 1457..1510: note = note, n is a, c, g, or t
  source 1..12959: mol_type = other DNA
  misc_feature 1..12959: note = Synthetic
  variation 9878..9889: note = note, n is a, c, g, or t
cccagaatgctcgcggagaatgctcggcgcgggttctcctggccgaaccacaacgcgacggaacccttccttggaaagggtctccccgccaacttgcgcctggacgactcgttcccaccggatcggacggaggatcgtgatcgtgtcgtgactccaacgcagccaaagctgggtttcgtccgtccgagggtcgacctcggcggtgagactccgtccgctggccaactcgacggtgaccggtccttggtgctcgtccgcagccgctcttcccgttccgggcgccgttgccagcccaagcggcacggacaatccgcacaacacgctgatccaaaggccgattctcatgggcacgtctgctgtcactggcttgtggtgaaggcgtatcaagccagggggcaaaacgcgtgccctgcaaagccccgccgaacggcctccgcgcagcaaccgcttgccacataatcacttagtcacttccactggtcttggcaactggatcgcgtctcgtcttccacgttgccccaagacatcgatgttgccctgcgtcaacgcgaccggcggaatgtcgcgcgttcggccatctctcgggcatggtaactggaacggacgaaggggccgctggcgacatgcttgaagcccagggcgcgagcggtgcggccgagtgcctcgaactcatcggggtgcaggtatcgctccacgggcagcaggtccggggagggttgcaggtattggcccagcgtgagcatttcgcagccggcatcgagcaggtcggccatcgcgtccagcagttcctggtcggtctcgcccaggccgagcatcaggccggtcttggtcttcgtcgcccggctccgacttcggacccggcgcaacatttccagcgtccagcgatagctcgccttgcgcccgcgcaccttccgatacagccgcggcaccgtctccgtgttgtggttgtagatctcgggagccgcctctaccagacggtcgaccgccgcccgattgccgccgaagtcggagggcagcacctcgaccgtggcccccgtggcttcccggaccgccaacacggtgcgcgagaagtgctcagccccgccgtcgggcaagtcgtcccgggtgacggaagtgatgaccacgtgccgcagtcccaagcgccgggccgcttccgccacacgttccggctcgctggggtcgaccggccgcggcctgcccttggccacatggcagaaaccgcaccgccttgtgcagacgtcgcccaggatcagaaacgtggccgtcttcctcgcgtaacactccatccggttcggacaccgggcgtggtcgcacaccgtctccagccccagctcctcgaccagaccggcggtgaagtgtttcgcgttccccttgggcacgtttcgcttcaaccaccggggcagatctcggggaacagaacgggccatggagagtggtcagtggacagtggttagtgnnnnnnnnnnnnnnnnnnnnnnnnnnnnnnnnnnnnnnnnnnnnnnnnnnnnnngtgcttcttgctgccgcgctcggcgcgggtctcacgaccccgccgaagacccgaccgaaggtctcaagtccctgctccacgccnnnnnnnnngagggcgtttcccccgatggcatacggccgccgcagcccgtcatcgccgggatggaccgccttgacgtaacaacggatgccccgtgtgcaagtggtaccggtcgcagccgaaggcgtcggccagtcggccgacaagctccgcccggacgcttgtcattttaaccggcttttgacgttcggccaccaggcaactcattcgagccgttggctgggtgtcggcttccacgagccgaaacaatcccatcgagggggccacgttgataaaggccccgtggtaggtgacccaatcgcgaaccgcgatcccgaaggcggccaactggccggttcgcccccagacaccgtgtcggcccggccgggtgtgggcctggacgccgagtgcctccaaggtgttgaggatgccggcctgaaggcggtcgacgtattgccccaccgacaagttgtgccaccttaaggggacgatcgggtacaccgcaagctgccccggggcgtggaccaggcatcccccgcctcgcttcacccaacggacctcgagctggccgcttcgaatgagtcgacagtccaattggacctccgacggcgagccgccgcggcctatggtgatgatagccgggtgctcgcagagcaacaggcagatctgtccatcgactcgggcggcgatccggccgatcagccgctgttgcagggccaggcatcgactcaactcgatccgccccaagaggtgggcttccatcgagggagaagacctttcgctctgaaatcgggttcccgacatcggcgcccttgagtctggccagccggaatagtacaagaaccgtatggaagcaagcgcgcccgccggcgcaaaacgcattgccggccgcacgttcgattatctcaaacaaggcacgttcaaccaaggagacccagccacggcgaagaggcaaaaacaccggtcgaagaaagagacgcccggcctcgaaccggacaacgagcggctgatcgcgcagaatcgcagagcgcggcacaactacatcgtgctcgatacgctggaatgcggaattgtgctggtcggcagcgaggtgaagagtctgcgcgccggcagggtctctttggccgaagcgtacgcccgcctccgtgacgacgaggtctggctggtcggctgcgacatccaggaatacgtcgaggcgaatcagtttaaccacaacccgcggcggccgcgcaagctcttgctgcatcgccgcgaaatccaccgttttgcccagcaggcctaccagcgcggctgtactctcgtacctctgaagatgtatttcaaacagggtcgggccaaagtgctcttgggagtctgccgggggcgacagaagcacgacaagcgcgaggcgatgaaaaaggcagaggcaaggcgcaacatccagcaggcgatgcggcggcggtaatccccctttcgggtcatccgggttgctctcttctcgtgcggcgactgggccggtatacttggatggttcaaaacaggtcgccccggccccggcggtcggttttcaccgaccttccttcttccccggaacccgacaggggcttcccaagcggctgtcagagatccatgcccaagtacatcgcccgacacggcgctatgcgaatcctaggggtattcgactcccccgaaagtgatgtataccagcggggtgtgaatgtgatcctgcggaccgaccggggattggaagccggagaggtcctttgcgaggccggcagcgaggccgtggagaaactccgagacccgagcaagggccaaatcctccgcgcgatgacccccgaggactcccacgagctccgccggatgcacgatcaggaaaagaacgaattccaggtctgcctggagtgcatcgcgaagctgggcctccagatgcaattggtcgacgtggagcacattttcggcggagagcggatcgtggtctattacctggccgatggccgcgtcgacttccgggagctggtcaggatgctggccggggagtttcagactcgcatcgagatgcggcagatcggcgtccgcgacgaggccaagctgaaggccgactacggcgactgcggcaatccggtctgctgcaacagccatctggtgtcgatgccgccggtgtcgatgaaaatggccaagctgcagaaggccacgctcgatccgaccaagatctccggccgttgcgggcggctgaagtgttgcctgcggtacgagttcgagacgtacgaacagatgctcaccgagatgcccccgatcggcgcgcgcgtgctgacgcccgacggccgagcccgggtgatcgggcatgaaatgctggccgcacaggtcctggtggaaaccgaggagcggatccgcaagctggtcgacttggcccaagtttcccccgcgccggacgacaaacaagcggatcgatgatcaatcaacaatcatcaatggacggacaaccatgtacgatctgtcgcgagagctcgccgagcttctcgaagaggacgaccgataccacgtcggagcctacgagttcgtgtttagctcgcttgcctatgcgcagaccgttctgcgcatgggcagcgaaaggccgagcgaaccgtcccggccggccggcgaggaaccggacgaacccgaacggcacgtcaccgggcaggagctgtgtgaggcgatccgccggtacgccctgcagcagtacggcttcttggcgaagatagtgttgaacaattgggggattcgcaccaccggcgacatcggcgaaatcgtcttcaacctgatccgtttcggccggatgcgaaagacgaaggaagaccgtcgcgaggacttcgacgaggtgtacgatttcgagaccgcctttgagcaagagttcaaaatcagcccgcccgagtaaccgttcgccgggcccccagcaacccgcaggaaagacctcacgatgagccgccgcaagaagtcatctgccggtcgccgaggcggtgcggccgggtccgagcagaatggtcttcgctcgaccgatcgggcggcagcggagccgaatcctccccggccgaacaaggtgttccttgggacgaccggcctcctgctggcggcgtggatcgcctttctgatcgtgctggccctgacgacctggggggccgattgatccgtccgtctcggggactataatctaaatctcttgagcgaccggggcgtggcgatgtcgggctggtcggggcgtacgatgacggtcacccttagagaattcgtcgacaacctcactcagagcggcctcttctcggccgaagaactctcggcgttccaggagagtctgccgcccgagcggcggcccaaagacgtccaatcgctcgcccgcgaactggtccaagccaagaggctcaccaggtaccaggcggcagccatctatcaggggaagacggaaggtctggtcctcggggagtacgtgatcctcgacaagcttggcgccggcggcatgggccaggtgttcaaggcgaagcaccggcgcatgaagcgtctggtggcggtcaagatattacctgctcgggcgatggaatcgcccgaagccgttcggcggttctatcgcgaagtggaagccgccgcccagctctcgcaccccaacatcgtcaccgcccatgatgctggcgagcacgaaggcacgcactacctggcgatggagtacgtggcgggcgaagacctgggcaagctcgtcaagcagcacggaccgctggcggtccactgggcggtcgactacgtgatgcaggcggccaaaggactggagtacgcacactccaaaggcgtcatccaccgcgacgtcaagccgggcaacttgctcttagacaccgaaggctgcgtcaagatcctcgacatgggcctggcacggctgaacaaaccgctgctgggagaccccgatgccgccgagctgtcggagttgactgaggccgaccgcatgatgggcaccatcgactacatgagccccgaacaggcggaggaaacccacaaggccgaccatcgctccgacatctacagcctgggctgcaccctgtaccggctcctgaccgacaggcccccctactcgggcagcacgcccatgaaaagactcctggcgcaccgccgggcccccattccctcgctccgcgaagcccgggccgacgttccgccggagttggacgtcgtcttccagaggatggtggccaagaaaccggaggatcgctaccagtcgatgagccaggtcatctccgcgctggaaccctgtgcctcgaccgaccggccctcggacgacgtggccctcacctcgttcctgaaacacctctcgcacggcgactcggcggtcaagcccaaggcaccaccgctcaccgacgagactcttcgctcgaaggacaaggaggaaaccggcgagagcttcaccgataagctggtccgcagtgtcggccgaaggaagctggccgtgttgggcatcggcggcggcgtcatcggtcttctcgcagtgctgagcctcacggtgctcttggtcggcaggggcggggaccgagatagcccaccgctgccgccggccgtcgttccggtcgaccggcccgccgcaagagagcctctcgaaaccggccaggcgaacgcacaagcggcaagtcgcgaagaagaggtagaatcgatcccggagannnnnnnnnnnnnnnnnnnnnnnnnnnnnnnnnnnnnnnnnnnnnnnnnnnnngcgtgggccgagacagaggcaaaagccacggcgatggtgcaagagcagcgcttcggtgaagccgtggaagtctacaacggcctgagcgagagattcgacgccctgccgcttcaactcaaggtgagtgatgccgtgaaggggttgatcgagcaggccgacgccgcttaccaggagatcgaggccagcgcccggcaggcgcggagtgagaagagattcgccgaagcccgtgccgccctccgcccggtgattgaaaaccatggcgtcgccagaaatgccaaggcggcccggcggctccttgccgagatcgacgccgccgagaaacaggagcaacggtcggcggcagcgtctcgggaggaggcgaaaagaaaagaggcgctggagagacagcgccaaatggaggcgcgctatgccgaggcgctaaaacccgcagaggagatggtggccgcttgggattttggccgtgccgccgacgctttgggaacactccggttcgacgagcaagagttggccgctcgcctggctgcgcgccgcgatcaggtcgggcgcctggtacccttgaagcaaaggatcctcgacaaggtcaacgccgccagtccgccgctgaagaagggagatctgaagatccgcggcttcaacggcgagatcgtcagggccgacgagaacgggctcgtggccaatctgatgaccggcaaaacggagccgctcacctggcaaagcctgggggcgccggccgtcgacgaactcatccaactcgtgatcgacgacggtaacgccgacgactggctcgccgcggggctgctggccctcgtcggcggcaacatgacgtcggcggagcagtgtttccagaaggcgaggtcgctaggagccaacgtcgattcctatcaggcgattttgggcaccaccgcgctggcccgcgtgacggagctgctcgaggaaaaagagttcgaccaggcagacgccctgctcactcgcgtcgagaccaactacgccgacagtccctggctggcggccaatcgagaggccatcgacgccgcccgaaccgcgatccgtgccggcatgcccgagagtgacgccgaaaagctcttccaggaagcggtggagctgttcggcaaggaagaccttttcgggctcgagactctggtgaagaagctcaagtcgcagtacgcaggcaccgcgccggtgaccgacacccggcgaaagccgtcgtttgccgaaatggagcaggcggtcgccggcttgggggagcggttgaccgtccgcaccgacggccagggcgacttcatcagcatccaacaagccatttcggccgcaccgcccaaggcgctgatcgaaatccaggacagcggcccgtacaacgaacggatcgtcgtcccacaagagaaaaaagggctcaccatccggggcgccaaagattgctggccggtgatcacttcgctggggccgatccgggacttcgacgtgctcgtggcggtcgaggcgcccgaaacgaccctccagcggctggtaatggtgcacggcacgccggccggtcagaatccgcactgcctcaccgttcgcgaaggttcgtgccgaatccgatcggccattgttttcgccaaagcggtccccgagggtttccgaacccaattcggcaatgaggaatgcgaggtcgaagactgcctgattgccgccaacgggagcttgtcgggtcgggtccttttccggaactgtctgttgctgggcggcgaggtgaatgccgacaggccgtgcgagctacggcactcgacgatcctccagaaactgcgactgagcaacccgcccagcgtggttctcgactcgatcgtgggcagcatcgaagtcaatcggcccggcaaccggatcgacaactgcaacctgctcgggtcggttctgcccgaaggcagcacgaactgcttaagcgcgaacccccggttccgcgacccgctgaatctcgatttcagcctcatgcccaacagcccctgcgccaagaaggcctccgacggcggcgacgtcggctgtcgctacacgcccgagatggtcgagctttgcaggtgcgcgctcgagctccgcaagcagggcgtgatcagcttttgaggatcgcgtgaggttctctctccaggaggatccggtgagcgacgacgaaacacgttcttccgccgatccgccgcttgagcccatcttgctcccggaaagccccttcgcttcgccagggggaccactcgccccgccgcgccgccggccgcgggtttggacggtcttcgccgtttttgtcctctcgcaggtcctcggcctgctggcggccgccctgttcctcgccgcgctgacgatctccactcgcgcggcaggggtccatcctccggaacacgcagatgcggacatgagcatcgtggtcggaggtgccgccggcttcttgggcatgctgctgtcgacgatgatcgttttcctcgtgctcgcgatcgcagcagcggtcctctcccctgttccctggcggaagcgattgcgcctgcgggccgcccgggtttcgcccctagccgtggtcgtgagcctttgtgggatcctggccatcagcctggcgctggaggctctcgatgccctgggagcactcccccaatcgcccgtgctcgaaatgttggccgacctcgtcgcgaccctgtctggtccgacgctgtgggccgcggtgttcgtgatcggggtcgcccccggcatcgccgaagaagttttgtttcgcggctacatccagacgcgactgagcaagcgatggggaccgggctgggccatcctggtgacgtcgctcctgttcggcttgaaccattgggacctcgtgcaagggacgttcgccgtggcgatcggcatttacctgggttacctcacggagcggaccggcaccatctggccggccatgctctgccacgcgacgaataacgtcatcgccacgttgacggcggccggagatgtcgacgtggtcgcgatgctgggaaccgtcacgacgctggtcgtggcaatcgtcgtcgtcagcttttccgcttggtacttgcgcacgtttctcggcgcaaccgagaacgccgacagcggagaaggggcagccgaaaaataacctgtcgcctgcggaaaatgaaaaacgccccacacgggggcgttacgaggtcgctgacaaagcagcgttgccttgcgcgatcgaaagtccttactgtgacaagcagggcaatcgtcgctcggatacactaaaggatagtctacccaatcccgttccgatgtcaaggagttctcgccatggcctcagagacaccctgcaactcaacggacattgcctaccgcgtgggcgtcgacctgggcagcggatccatcgggtgggctgcggtgcgtgaggggggcagcgggccccccggactgctcgccgtcggcgtgcggcatttcgaggcaggcgtgttgggcgacatcgaacagggcaaggatgagtcgcgcgcgactgcccgccgggaagcgcgtggaccgcgtcgcctcacctggcggcgccagcaccggctccgcacggtcttccgactgctccaggccatggaactcttgccaccgagcaacgacgactcccacgacgagcgccaccgcgtnnnnnnnnnnnngacaggaccctgcgggcaagcctagccagctccggcgatcgcgccccccatcatctgctcccctacctccttcgcgcccgaggactggatcaggagctttcccgccacgaattggggcgtgccatttatcaactcgcacagcgccgaggcttcctgtccaatctgaaggcggcaaagaaggacgaggacgtcggcgttgtgaaaaaagggatcagcgacctggaagaccggatgaaggaggccggctcgcggaccctgggcgaatacttcgcctcgctggacccggaacagtaccgcatccgctcccggtggaccgcccgccaaatgtaccaggacgagttcgaaatgatcctggccgcccaatcgccattccatcccgtgctgagcgacgagaacaaacaacggctattccaggccatcttcgaccagcggcccctcaaatcgcaaaagggcttgatcggcgcctgcgacctggaacactacaagcgcagggcccccgcagcttgtctggaattccaggagtttcgtatcctccagcgcgtcaacgacctcgaagtgatcgagcccgacggggagtgccggcggctcagcgcggaggagcgggccaagctgctcgcggagctcgccgaaaagggcgaggtcaccttccgcaggattcgcaccctgctgaaaatgagaccctcacgcgagtacggccgcaactatgcgttcaatctggaagaaggcggcgagaagcggctcgtgggtaaccgcaccgtcgccaagctggcgggcattcttcgggaccgctggcgcgaactcccgtgggaaaaccagcgatcgctggtcaacgaaatcctctccttccagtcggaagaaccgctggtaagccgcctggtcaacggctggggattcgacgttgcctcggcgcgcgccctcgccgagacatctttcgagccaggctatggggcattgtcgcggaaggccatttcccggctcctgccccttatgcgtgaaggcatcgcctacgctaccgcccgaaagcaagtctacggcgagacccgcgaggagcgagagcccctcgatctgctgccgccaaagcaccagtctgccgtcttgcgaaacttgcgcaatccggctgttgagcgggcgcttagcgagttgcgcaaggtcgtcaatgccctggtgcgcaagtacggcaagcccgtagagatccacgtcgagttgggccgcgacctgaagcacgcccgtcagcgccgcaaacagatggccgatcagaaccggcagaacgagggcatcaggaacgcggcgcgtgggaaaatcctccaagacatgaaaaacgatcgctattgcacgcccgcgaacatcctcaaaatccgcctggcagacgagtgcaactgggagtgcccctacaccggccggacgatctccatggacgccctagcaggcgaccaaccgcaattcgacattgagcacatcatccccttcagccgctcctttgacaattcctttctcaacaagaccctctgctaccacgaagaaaaccgaaagcacaagcgcggccgaacgccctacgaagcgtatgcccggaccgaccaatgggaagaaatcctcgcccgcgttcgccgcttcctgggcgacgcccgcgtcaggcggcgcaagctcgaactgttccagacggaaacgctccccgatccgggtgagttcgcccagcgccaactgaacgacatgcgctacannnnnnnnnnnnnnnnnnnnnnnnnnnggctcctctacggcagccagatcgacgccgaaggaaaacgccgcatccaagtcagtcccggccgggtcaccgcttacctgcgcgacgagtggaacctgaactcaatccttggccgacccgaccagaaagagcggaacgaccaccgccaccacgccatcgacgcgctggtgatcgccctgaccggcgccggtgaagtgcaccgcctgagccgcgccgcggaagaagcggaagccctgggccaaaccaggctcttcccgcacggcgcctttgatccaccttgggcaggcttcctcgcccaggcccgccaggccgttgaagcgattaacgtctcctcccgcgtctcccgaaaattgaccggcaagctccataaagacgggatcctgagcaagcccatcccttgcctcgacaagcacgggcgcccggcccaagtccatcatgtgcgcaagccgctcgactcgctctccacgcatgaagtggccgatatcgtcgatgaccgcattcgagccctcgtgcaggagaagctcgatcgcgccggcggcgaccccaagaaggcctttgccgaccgcaacaatcacccctattcgagagccaaggacgggcggatcattcccatccacaaggtccgcatccgcaagcacgacacgcccatcctcgtcggccaaggcagcaaacaacgatacgtcaatcccggggccaatcaccacatggagatcgtcgccctgctggacaaagaaggcaacgagaaacgctgggaggggcacgtggtcagcatgttcgaggcgnnnnnnnnnnnnnnnnnnnnnnnnnnnnnnnnnnnnnnnnnnnnnnnnnnnnnnnnnnnnnnnnnnnnnnnnnnnnnnnnngtcatggaacacgagccgggacaaccccaggtctatcgggtggtcggtatctctgccaaagtcctagaatttcgcttgcattgtgatgctcgcccaactaccgttctaaaaagactggccaaggcccgggtgacacgcagccccggcgccctgttggagctccgagcacggaaggttgccgtcgatcctttgggcaacgtccttccggccaatgattaaccgcattgtcgacttctccgaggggcctgcccggctccgcgtacgctacagccaactgtgcgtccagcgcggggacgaggcggaggtctccctccccatgtccgatctggccgtgatggtcgtctcccatccccaggtcacctacacccaggcagtgctctccaccctccttgaggcgggcggggccttcgtggcttgcaattgccaacatcttcccgtgggaatgctcctgcccctggcggcc

SEQ ID NO: 3918 - DNA, 12022 bp, synthetic construct
  variation 7604..7612: note = note, n is a, c, g, or t
  variation 11107..11140: note = note, n is a, c, g, or t
  variation 7341..7476: note = note, n is a, c, g, or t
  variation 11721..11803: note = note, n is a, c, g, or t
  variation 11277..11616: note = note, n is a, c, g, or t
  misc_feature 1..12022: note = Synthetic
  variation 6095..6102: note = note, n is a, c, g, or t
  variation 10963..10975: note = note, n is a, c, g, or t
  variation 11851..11988: note = note, n is a, c, g, or t
  source 1..12022: mol_type = other DNA
gtcctcggccaccttgaagacgttgcccgaggccatgaagtaatccggtttggagagatcgagctggccgatcctggcggcgttggccgcgaccgagacgtggtcgtccgcaacgcgctgggcggcccagacggctccgacggcgccctcgccggggccgacgatctccatcagccaaacctcctggggatcggcaatggtcaaggcctcgcccacgtcgcaccaaccgtacttctcgagcagctctgcggcgatccgaatggcctcccgcgcgctgttggcccgctcgagcatcagccgtgtcagcgtttcgcaatcgatcaggcccttgtcgctgaccaactcctcccgaccgtcgaacgtcgattcgccgatggccaattgccgttggttcatcaccgcataggccggcgcaaggtagcccagggtctcggcaacttggggaatgttgccggtcggctggcggccgtagcgcggcatggggccactgaagtcgtcgcggcgcttggtcagcagtcgctgggagcccggcttgtgtgttgtgggtgggatgacgaggatctcggacccgttctgatggctgtcacacgtgtgcgaggtcatcaccgatccgtcgacggaggccttcttgcccaccatgatcgaggtgcacgcgggtgctgcccggcccaggggcgcgaggaacaagccgagtgacaggaaggcgaaggcaattggaaggctgcgcatggggttctccttggggtgttgccgacgtcgggaggaaaaaggggacaggtccaatttgccggaacggtccgaagggtgcttcgcacaaattggacctgtcccctttttcctggggtgttgccgatgtcgcagaatggcccctatagcataccttacccacccgttgtgcgaaaggttggcggccaattcgttcgccgcagcggagtccttgacggtcggccggcttcgcgataggctcccgctatgagacatcagagcccttcctatagcgtcacgatgcggcttcgctatccagacgtatcggggcaactggggcggatcacctcggccatcggcgaagtggacgggttgatcggcgccgtcgacatcgtggaaatcgcacgcgacgtgatcacacgcgacatcacggtcaacgcccgagacggggcccacgcccatcagatcgtcgaaagggtgcgtttgctagaaggggtcacggttgcgagggtctccgaccgcacgttcttgttgcacctgggcgggaagatcgagatcaagtcgaaggtccccatcaggacgcgtgacgatctctcgatggtctacacgccaggcgtggcgcgggtatgccaggccattcatagcgatccggaagcagcatttgccttgacgatccgccgaaacaccgtggcggtcgtcaccgacggctcggcagtcctggggttgggcaatctgggacccgccgccgcgctgccggtgatggaaggcaaggcgatgctgttcaaggagtttgccggcgttgacgccttccccatctgtctcgatacgcaggacagcgagaagatcgtcgagacgtgcgtccaactcgcgccaaccttcggcggcatcaatctggaggacatctcgtcgccccgctgcatcgaaatcgaacaacagctcaccgaacggctcgacgtgcccgtcttccacgacgatcagcacggtacggccatcgtcgtccttgcggccctgcagaacgcgctgcgagtcgtcggcaagaggctcgacgatctgcgtgtcgtcatcaatggggcgggcgccgcgggcatcgcgatcgcgaggctgctcggggccgtcggcgtggaaccgatcgtgctgtgcgaccgtctgggcgccatctaccgggggcgggatgcccatatgaatttcgccaaacggcagattgccgaccagacgaatcccgagtccatcaccgggtcgctctccaaagcgattgtcggagccgatgtcttcgtgggagtctcggtcggcgatgtgctgaaagttgacgatcttcggcggatggccaagaacccggtcgtctttgccttggcgaatcccgatcccgaaatcgaccccgatctggccgtctcggaggcggccgtggtggcttcgggccggtcggactatgccaaccagatcaacaacgtgctctgttttccgggcctattccgcgggctcttggacgttcgggcgaagcgcgtgacggatgccgcgaagatcgccgcggcccgggcgattgcaggggtgatcgccgacgataagattcgcccggactatatcgttcccagcgtcttcgaccgccgcgtgtccaaggcggtcgcgaaggcggtatccgcggcactcatggaaggcgaaaccgccgaccggcgccagaatcgttccgactgatgcggtcttgggtcgaactcaagccaggaccgcgctacggtctggctattgctccgccacgtccgacgggccgcgtaggggtggcaggggcagctcgcctgcccctgagacggcaagggtgggcaagccgcccatggcactcaaggggtcgtcgattaccgcggttgccgcggtcgttgggcggcctgtacggccgccgccaacatcccgtcgtcgccgggagtcaggaattcggtggccgcttcgtcggccggccgggccgccaaatgcaccgatacgtccggctgaacgccgacgtggcagtagggtcggccggcgggagagtagaatttggccgtggtcagccgcactccggtgttgccgatactgagcggaaagatcccttggaccgatcccttgccgtagctgcgctgcccgacgatggtcccccgcccgtggtcccggatcgctccggcaaagatctccgccgcgctggcgctgtcctcgtcgatcaagacgaccaggggcacgcgccacgtcccggctgagtgcgccacgtaggtgaaatcctcctggacacctcggccacgggtcgagacgatgatgccgtgctggacgaatttgtcgaccacctccactgcggcgaccagcagcccgcccggatttccccgcaggtcgatgatgaggcttttcatcccttggcggtggagtttccaaagggcgtcgtcgaggtcgcggcaggttgtcttctgaaagcaggccaagcggagataggcgatcccgtggacgcgatcgacgatcttcacgtcgtccacgctggggacctccacgcggcggcggcggacactcacgtgccgcggctgccggtctgcgccagccacagtcaactcgacgacgctgcccgcttcgccctgtagcagattagcggcctggtcggtggacaggtccttggtcgagtggccgtcgacggcgagaacgtgatcgccggcgaggatgccctcttgctcggccggactcccacggatcgctcgcacgatcagcagaccgtcttccacggccttcaactcgatgcccaggccgacgaagttgccctcgatctgcgcgtaaacttcggccaactggtcgggcgtgaggtaagccgagtactggtccagtgcgtgggttgccccgcacaggtactccagcacgacggcggtgggaggaacccctagcctttgctgagccagaccggccgcggtggacacggcgtcgcgggcgtcactgtgcgagccgatcacgcgcgaccccagcaatcgtcgcaactcatggcgaaaggcgtctaccgtcgaccgagcctcctggggcagattccgttgcagaaactccggctcggcgagtgccacctcgaagttgttcgtcccgtgctcgacgagttccttccagctaggagctccgacgtagtgggcctggatcttcagcaacacctgcacgtagaggtcgagcgcctcgccaaaccccagcttcgacaacagactctggtagcttcgatccgcgtagcggcgtcccacaccgtagtgcaggcgcgtatgactgaaccgccgctggaggctgtcttcctccggatacaggcgtagcgcgtcttcatagtgcgtcagcgcctcgctccagcgccgctcgacttccagcagtcgaccccgacgcagcaggtcggccaccgactccgcgcccgagctgatcgagatcgtcgtcgactgttgggtagaggctcgctgggaaggggctcgctgggcagtcgcgcgggcgggaatgaagcccatccacgtcacaagccaaatgcagaatccaagagagagtgctctttgtcgcatggtgtcgtccgtgatgtcaggtgtggcggagggcagagactacagcagcagaatcgtcaggcggggtacggtgaagcacaagttgcgctactgcgacgcgctcggtaacgtgggaggacgccgagaaggcgacgtggaccgtcgcgcttccggcaagcataggtcacgttcttcggtcggtcaaatagtcgccatgctttttccatcgcgcatttctcacaagccgcacagcccgccccttgccgcttaggttgcagcgactgcgcgcggcaacaaggcaaaaatgtcttgcgccagatgcgccgcccgggtgtagaggtgggacctggacggatgatgccgacgatgtgctgggcaggtgtgctgggcaggtgtcctgatcaaatgaccccaacaaccgccaggctgtgcctcagagcacggattgacgcggcaagaatcagacgggccccggtgcgaagaggcgccaggcaaccacagccaaccccagcgggatcacccaccatgcgaaccagtgcaaccgacctcgctgcaaccagcggatcagccaccgaagcgagagcaggccgaccaggaagcttaccacggcccctgcggccaaggctcccaggggagtgtgaccggttggtgcgacaatcaggtctctgagctccagtaggcccgctccgcctatggccggaatggccaacagaaaggagaacgtggccgcctcgtcgcgtcgcagaccgcagcccaaggcggccacgatggtcgccccgctgcgggaaacgcccgggagaatggcaaatgcctggaaaacgccgatgacgagtgcttgaccgtagccgagttgccgacaggtcgtctggcccgactcacgccgggcggtccaaatcagcatggccccggtcaccggaaacatcaacccggccagcaaaggactctctaaggcaccttccaagacgccgccgaattcggtccccttgacaacaaacccgaaaatcgctgccggcacactgccgacgatcagcagcccaatcacccggcgatcttcgctcatcagaagccctatccgccgccagtagaagacgaggatagccaccagcgttcccaggtgcagcaccacgttgaccgtcagcttctcgtcgataggctggccaacctggtcacatacggcggctccgaccacgatatgcccggaagaactgatgggcagaaactccgcgataccctgcacagtcgctagaataaggatttcaagccagatcatcgacggaagtagcggttagagacggacggtcaaaggtatgcaagtatagcgtgttcgggtggggcaggcgtccgccatccactgaaacgggctgaaacgatccgattccaacccactttaaggtttcaggccaatctgccatactatcgggtttgccaagcaacgggatcggcccggtagcggcgattgccttgtccccctagattcccacggagcgactcatgttcaagaacctcaacccgtccgcccttggcgtgtcaggtcaccaaagcgaactcatcgagttggccctcaccaatcggtttgcagggatggacctgaacgtggtcgacttcgccactcgggcgaaactccgcggaatgccctacgcccgacgtctgatcgacagtgccggcatccgcctgggcacgttcgagctgcccttcgattgggacaccgaggacggcgagttcgaaaagaacgtggcgaagctatcggaatatgcccgggcagccgccgaggtgggatgcacccgctgcgtggcgaccctgacgccggccgccgacaagaggccctaccacgagaatttcgagtttcaccggcgccggttctcggagatctgcgccgcgcttcagccggcgggggcnnnnnnnngggttgggtttcgtgctgctgagtacctgcggcgggatcacgcgtatcagttcattcacgatttcgacgcactgacgctgttgctgaacatggtcgatgcgccgaatatcggtctgctgctggacacgtgggagctggtcgcctgcggcagctcgatcgacgcgattcgcaacctcccgctgaaccagatcatcgccgtgcagatcgccgatatgccggccgacgtgccgctgtcggaattgggcgagaaatcgcggctgatgcccggcgccgaaaacagccagatcgacaccgttggggcgctggtcactctggccgatctcggctacgagggtccggttacgcccaagccctcgcgaggtgttttcgagagccgtaagcgcgacgcgatcgtcaaacaggtgggggaagcaatcgaccgagtctggcgagccgcccgccatgcttccgagggcaatgccgccgcccaggcggccggccaggaatctgcctgaaaccttgttccactgggaaaacggactgaagctgaccgaggccgacctggcggtcgactttcgacgtcgccagccgcgggctttcatatcgcacgcccacgctgaccatattgcccggcacgagtacgcgttgtgcacgcccgagacctccgcgctgtaccagttccgcctggggccgcgcaggacactcgatatgccctatcgggagccaatccagtggggtggcttgcgcttgaccacctatccggccggccattgtcttggatcggcgatgttgctggctgaggacgcacaccagtcgttgctctacacgggcgatttcaagctcgcgccttccgccaccgcggagcaggccgagctgccgaaggccgatatcctggtcatcgaaagcacctacggcacgccgcaataccggctgcccccgcgccggcagacgcttgatcgactcttcacgttggttcggcagacgcttgaggacggggccacgcccctgatcgtggcctacgtgctcggcaaggcccaggaagtcacccgactgctgaccgccgagggaatccccgtgctgcagcacccgaaggtcttcgaggtaagccaggtctacgaagcctgcggcgtcagcctggggcggtatgcgcgtctccagggacaggtcacaccgggctgggcattggtcgttccgccgggcacgccgccgctggagcccgcgacgcgcgaggtccggatcggtgtgaccggctgggcgatnnnnnnnnnnnnnnnnnnnnnnnnnnnnnnnnnnnnnnnnnnnnnnnnnnnnnnnnnnnnnnnnnnnnnnnnnnnnnnnnnnnnnnnnnnnnnnnnnnnnnnnnnnnnnnnnnnnnnnnnnnnnnnnnnnnnnnnnttcgtcgaccgcctccgcgaggccggccacgacgcccacctcctaggccgcccgacccaacggcggttgttctgatcagacttctggggggagttgtgatccttctcaaaacgggttagcataccggnnnnnnnnncaatgtcaaggagcaggttctgatatgtcaacgaactcaacaaccacggaaactgacggcaagtaccggttgggggtcgatatgggggccgcatcgatcggctggaccgccgtattggaaggaaacgggaccccgagcgcgctcctggctgcgggggtgcgctgctttgaggcgggagtcctcggcgacatcgaacagggcaaagacgaatcacgcgcaaccgcccggcgagacgcccgcggcccacgtcgcctggcctggcggcgccaacatcgtctgcgcagagtattccgcctgcttcaagagtttagcttcctgccccccagcgacgacgactcacatgacgagcgccatcgagggcttgccagaatcgacaaggacctacgcgcccggctgaagacttccgatcggccggcggatgagcatctcctcccgtaccttcttcgagcacgggcgctcgacgagaagcttgcccgagaggagctaggccgcgcgctgtaccacctggcgcagcgccgcggtttccagtcaaacctgaaggccgctaagaaggacgaagacgttggtgtggtgaagcaaggcatcagcgagctcgagaagctgatcgaagacgcgggttcccgaacgttgggcgagtacttcgcctctctggatccagaagagcaccgcatccgtggccggtggacggcccggggcatgtacgtcgacgaattccagaagatctgggccgcgcaagcagcgcatcatgccgatctatccgacgagcagcgcgaaagactgttccatgccatcttcgaccagcgcccgctgaagtcgcagaagaacctgatcggcatgtgtgacctcgagccgagaaagcgcagggcacctgccgcctgtctggagttccagcactttcgcattctccaacgggtgaacgacctgctggtgactgcgccggacggcgagtgccggtccttgactcccgaagaacgtgccgtgctgcttggcgagctggcggagaaagacaaggtgaccttcggccgaatccgcaccttgttgaagatgaggaagtcgcgcgaatatgatcgcagctattctttcaacttcgaagagggcggggagaagcagcttatcggcaaccgtacggcggccagactgctggcaatcctcggcgaccgctggcggcaattggctgacgacaagcagcgccaactggtcaacgaaatcctctccttcgagtcggaggagcctctgatccatcggctgaccaacggctggggcttcgagccctcctcggcccgcgccatcgccgagactggcttcgagccgggctacggagccctctcgcgtaaggcgatccgccgcctgttgccgatgctgcgtcaaggcgtcccgtacgccacggcccgcaaggaactctacggcgacgtccagctaaagcagggagccttggaccatctgcccgctgggcgccagtgcagcatgctgcggaacctccgcaatccggccgtggcccgcgcgctgggcgagttgcgcaaggtcgtcaatgccctgatccgcaagtacggcatgccgcggagtatccgtatcgagctggcgcgcgacctgaaacacgcccgcaaacgccgccaggatatggcggatcagaacaagcgaaaccggacgacccgtgaggaggcctgcagcaggatcctgactgagatgaaagacgatcgctatggcacgcctgggaacatcctcaaggtccgcctggccgaggagtgcaactgggaatgtccctacacgggccgcagcatctccatggcggccctagtcggcgatcagccgcagttcgacgtcgaacacatcatgccgctaggccgctcgctggacaattcctatctgaacaagacgctctgctaccacgaggagaaccgcaaggtcaaacgaggccgcacgccgttcgaggcctacggcggcaccgagccttgggagggcatccttgagcgtgtccgtcgattcaaggcagacccacacgtaagacggcggaagctcgatttgttccaggttgacacgctccccgatacagacgagttcaatgcccgccaactcaacgacacccgctatatgtcgcgcctggccgccgaatacctggggctgctcttcggtgggcagatcgacgcgcaggggcagcgccgcgtccaagttagccccggccgggtgaccgcctacctaaggcgggagtggcaactcaataggctcctgggtgatcccaaccgaaaggaccgggcggaccaccgccaccacgccgtcgacgccctggtgattgccctgaccggcgcgcgggaagtgcaattgctcagccgcgcggcggaacaggccgaggcactttggcagaccggcctgtttgtggccgtggatccgccctgggaaggcttcctcgacgaagcccgccgcgccgtcgacgccatccaggtctcctcgcgcgtcagccgccgcctcagcggcaagctccacaaagagactatctacagcaagccgatagagtacatcgaccagaaagggcagcgcaaacaggtccaccatctccgcaaacgcctcgaagacctctccaagcaggaagtcgagcagattgtcgacgaccgagtgcgagccctcgtccaggagaagctccagcagcccggcgccacccccgacaagacgttcaaagagccgggcaatcatccttacttccggacggccgacgggcggattatccccatccacaaggtccgcatccgcaccagcgagcacccgatcattgtgggcaagggcagcaaggagcgacacgtcaagcccggctcgaaccaccacatggaaatcgtggccctcctcgacgaacaggggcaagagacgaagtgggagggccatatcgtcagcctgttcgaggccgtcggccgccgtcgccgcggccagccgatcatccgccgcgatcacggcgagaacaagcgcttcaaattctcgctcgccgggggggagcacgtcgtcatggaacacgaaccggaaaagccccgcctctaccgcgtggcgtcgatttctgggaaaaacgtggaatttcggttacactgcgatgcgcggcctattatactattaagacagaaggagtactccgctggtcgggttcgccgtagcgcggactcactgcggatggccaaagcacggaaggttgccgtagaccccctgggcaacatctttccggcgaatgattaaccgcatacttgacttctcggagctaccggcccggctctgcgtccatgccaggcagctcgtcgtccagcgccaggagcaggccgacgtgtcggtccccctggccgacctggccgttgtcgtggtgtcgcatccccaggtcannnnnnnnnnnnnggtcctctcgggcctggccgaggcgggcggcagcttcatcgcctgcaaccgcaagaacctgcccgtgggcatgttgctgccgctggtggcccaccacgcccaggtccaacgcttcgccgcccaggcccgccnnnnnnnnnnnnnnnnnnnnnnnnnnnnnnnnnngaccagaacctgatgctcaactacggctacgccgtgctgcgggccatcgtggcccgggccatctgcggggccggtctgcacccttcgctgggcatccaccaccaccaccgctacagtgcctactgcctggccgacgnnnnnnnnnnnnnnnnnnnnnnnnnnnnnnnnnnnnnnnnnnnnnnnnnnnnnnnnnnnnnnnnnnnnnnnnnnnnnnnnnnnnnnnnnnnnnnnnnnnnnnnnnnnnnnnnnnnnnnnnnnnnnnnnnnnnnnnnnnnnnnnnnnnnnnnnnnnnnnnnnnnnnnnnnnnnnnnnnnnnnnnnnnnnnnnnnnnnnnnnnnnnnnnnnnnnnnnnnnnnnnnnnnnnnnnnnnnnnnnnnnnnnnnnnnnnnnnnnnnnnnnnnnnnnnnnnnnnnnnnnnnnnnnnnnnnnnnnnnnnnnnnnnnnnnnnnnnnnnnnnnnnnnnnnnnnnnnnnnnngcaaaccgaccgaggatgcacccacgcaactcgtccttttctagcctggctgtggtcgcaaggcgttgcagcgcaatggattgcgccaaacgcagtgtatccgannnnnnnnnnnnnnnnnnnnnnnnnnnnnnnnnnnnnnnnnnnnnnnnnnnnnnnnnnnnnnnnnnnnnnnnnnnnnnnnnnnacagcatctatacagtagaagctagctcaccagaaagtgtatccgagnnnnnnnnnnnnnnnnnnnnnnnnnnnnnnnnnnnnnnnnnnnnnnnnnnnnnnnnnnnnnnnnnnnnnnnnnnnnnnnnnnnnnnnnnnnnnnnnnnnnnnnnnnnnnnnnnnnnnnnnnnnnnnnnnnnnnnnnnnccaccccccatgtcacacgttgtaaaccacccct

SEQ ID NO: 3919 - DNA, 11820 bp, synthetic construct
  source 1..11820: mol_type = other DNA
  misc_feature 1..11820: note = Synthetic
ctgcttcgattggctgttcaactggcgtcgtctgcgggtgcgttatgaaaaacgaccggatattcacgatgcgttcctgttcatcggttgtgccatgatctgctggaaccgtgtcacggagttttgttagagctccttagtcttcttctgtcacgccgccctggcgctcgcgcggcggtagccagggactggacagttgcaccgcgccggacatggcgcaggcgaccagcacgagccacggctgcgggaaatgccacagccaacccaccaggccggccaccaccgcggtgaccagaagcgaccagacgctcattctcgcatggcgcagcggatcggcctggcgccaccactgcagggccaaaaggagcgtgccgaacacggccatgtaggccagcagcaacggcccgcccgcgtaaaagttgttcggcatccggaatcccggcgagctgggcaaatggggatcgtagggcagctcgaccatgagccagtcggcggtggcccaggccatcacgcccagcgccagcccgacgaccatcagcacgaagcgtcgcagcaccggctcgcctcgcgtgccctcccagagcttcgaggggagcatcaccgcccacgtacccgccacgctcattaacgcgagccaggcgcactgctcgggctggggtagctccgtgcgaaacgccgtgacgatcaccatcaccaaacagatcgtcagcgccaccatcgcgccgagcaacatcgacccaagcagctcggccacccgctgcggcgccggcttgagcaccagcgctgggatcgcccgctcgggtcgccgcgggcggcggtggcgccgcggccgccagggattggtcggccgatcggcggcggtcggctcggccatcagctcaggcgagaccggctcgacctcggtcggaggcggcgacgccgcgcgcggctggcctgctaaaaagaccgcacgaacgatccggtagctcgcatacactatcagcgagaccacacccaacgggatccagatgaagtaggtgaagatggcagcgaccacgcccagcacgcccagcgcgatctgcgcgggcagagtcaggccgttccagccgcgtctgagatcggccagcaggtctttgagggcccgcaacacgggctcgtcgtcggccaggacggcccgccgaacccgcgacgaaacggccagccgaacccgcgttacttcatccaccccgcttgccgactccccacgttcggaagaacccatcgaaggcaacggccccacccgcgcccccagatcgaccgtgcccggcagatcggccagcatctgaccgaccgagctgtaccgctccgccgggtctttctccagcgcccgggcgacgacgctgcggtagggctcctcgatcatcgagacgtcgggcttggccgtcaggtgcttcatgagcacctcgccaacgctctcgccctcgaacggcacccgcccggtgagcatctcgtagaggatgatccccaaggcgtaaatgtcgatctccttgccgtagcggccgttggccacctcgggcgccatgtagtggaccgtgcccacactctcggtatgtccgctgcggcggctgcacgagatgaacttcgacaggccgtagtcgccgatctgcacccggccttcgtccgaaaagatattggccggcttcagatcgcggtggacgatcccgtggtcgtgcaggtaggccacgccagcggcgatgccgtagaaccacgccagcgcctcggggagcggcaggccgttcgggtgggtgtccagtgcgttgtcgaggctctcgccggcgacgtactccatgacgacccagtggtcgccccgctcgtcctcgcgaatgtcatagacgtccagcaggttcgggtgcttgaggttcaagcactgtttgattccgcgcagctcgatgtccaagctgcggcggatcagcttcaacgcgacctccttgcccgcgtcgctggtggcgtagtacacctcgccgaacccgccgtggccgacgccccgcttgatcgtgtagcccgcaagcggccgcgacccactggcgtgggcaaaccgcgccgcgctggccgccgcaggccgggggcccccgtcttttgtgggtggaaggttcatcgttctgagtcctgcctcgccaacgcgcggacgcggaaggccaggctcctattgtatcacaccttctcccgatcgcatggagcgtaaatacctcattagaggggttccaggctcatcgcaaaccggtctccggcgattcgggagctcctcgtgatgggccctttgtcgcgatggtccttgccgtcgatctggaacgggccggaggtcctgcaatacagacgctcctcgcaacggtagagaatcagctcctcgcgccactgccggcagacgacgtggctgtggggcttcgggcccagcacaaaggagtcggccatcagcacgatcgcgtccgccgagggctgcgtgcggtgccggctgacgaaatcgagccgggcggtcgcgctcagggcatgaggacggcgaaaccgcagccgaacgctcgggcccaactggactaggttcccgtcggccagcgaggccgtcccgcgaaccagccgcccgtcgacgcggacctcgtgcaacggctcgatgacgtacccctcgccgtcgcgtcggattcgggcgtggcggctggagaggtcgccgaggatggccacgtcggccgccgcgccgggcaccggctggcccagcgtcacgctctggcccagacagacccagaacccccccaccgcgtcgatccagaggaggaaccggtcgccttgggtcggcccaaatgcgtccatccagtgcgatccccacgtgacgtttgcccaacggatcattgtgacacgcccacgcctcggaggatagtccttcgatttcgagtacagcccggagacacgctcacgacaatcgcgagcatggcgtccggatttgttgacgcgatcaaacctgccactgctgagcgcagcgaagaatctgggcgatcgctgagtctgatagatccttcgccgcacccagaatcgccgtggcctgcccttgggtgacacggccacgcaaattcttcgcttcgctcagcaatgacgcccgtcgaacacgctgcgtgcggccttgcgaggtcagcacgcaggcacgcactccccgcagagcacgctagtccttggccaactggccgccgaccggggtcgtgccgaaatacgccgtgatctcctcgacgatattctccggcgccggctcatccagcgggatttcgtcgcgataatactgttcagcgtcgaccagccgctgctcggtgtcgaggcggacctgcaagtcgtcgatcaactccttcacgcggccgagcttgctgtcgtcaaacgcatagtcgctcgtggccacggccgcggcgatcatctgacgctgcgcttcgaggtgctcgacctcgacggtcaactgccgtcgggcggccagcatcgcctcgagcttctcccgcgcggcctcgagcccacgctgccgggcctcgaagatcccgcggaggttgcccagcgtcgattcgcccgtcttgaaacgctggaaccggttggccagatccacctggacctgctccttcgaatagctgcggccggcgtaccggaacacactcttgccgcttgacaaatcgctcttgagcgaaagcagttgctctttctccttctcggctcgctggtgggccttgccgatccgctcctcgagccgcgccagctcgatctcctccttggcaatcagatgcatgtttttgcggacctcgggctcgagatcccgaagcatctggcgtgcccgctcgatctgaaactcgaccggcacggcgccgcgcaccgcttccttcacacaccgggccgacgtgcgaaagtagcttaccgcgtcggcgccgaccaacaccgcgaccagcacggtcgctccaccaccaatcagcaagactcgcttcaacatgactgctatctcccgtcgaaccaggtttgcccccctcgcaggaggggatcgtccagacgccctttatccacgcggccgcctggtccaggcccctggaagccgctctgtgcagtgattcgccgtgttgacgccgatcttggcccgactcgcgcggattcctgctgcgcagccgtatccgcagggtgggacgaagtacgtgtttagcctgaaagaccccggaaatcacggcattctctgcattggaacgtcacgaaaagcccattttcggtggccacatcatacaaaacgcccgtgtttttcgggttcgatgcaggctaaacacgtacccgacggaacgtcggccccggcgggctcctcccgaaccgcgtgcttttacgaatcacgaaccctgcccagtcgtccccgaccgcttcaagccgcttcggtcccctgaaacgcccttgcgcaccacccacgccgagccgcgaagaccccaagaaacggggggcgccggctcgcccggccggcctcttccgcccgcccacgcccgctggcacattgacgcccgctccacgggcccctagactcgacggtctatattgtgccctgagtgtgccgacagacgggaagaaagagaagaaatatgcctgcccgcaccgacgatctccctcggctggccatcgacacgatccgcacgctgtcgatggacgccgtccaggcggccaacagtggccaccccggcacgcccatggccttggctcccgtggcctatctgctctaccaggagatcctccgctacgacccggcctcgcccgactggcccgcgcgggatcgtttcgtgctctcctgcggccatgcctcgatgctgctgttttccgtgctccatctggccggcgtcgagcagcccggcggcggcccggccgtttcgcttgacgacatccagcgcttccgccagctcgacagccgctgtcccggccatcccgagtacggcgcgacctccggtgtcgagctgacgaccggtccgctgggccagggcgtcggcaccagcgtcggcatggcgatcgcctcccgctggctggccgcccgttacaaccgccccgacttcccgctgttcgatttcaacgtctatgtgctttgcagcgacggcgatctgatggaaggcctcggcggcgaggcggcctcgctggccggccacctgaagctctcgaacctctgctggatctacgacgacaaccagatcaccatcgaagggcgcaccgagctggcctacagcgacaacgtggccgcccgattctccggctacggctggaacgtcgtcgaggtcgaggacgtcaacgatctggacgccctgcgcggcgcgatcggcttctttcacgaagcgaccgacgcgcccacgctgatcatcgtcaagagccagatcgccttcggctcgcccaaaatgcagggcacggccgaagcccacggcgcgcccttgggcgaagaggaaatccgcgcgacgaagcgcgcctacggctggcccgaggacgagaagttccgcgtgcccgaggaggtccttgaccacttccgccagggcgccggtgcccgcggccgccaactgcatgccgagtgggactcacttctggcgcgatacgccaaggcccatcccgagctggccgccgaactgagcctcctcggccaaggacgcctacccgacggctgggacgccgccatccccacgttccccgccgaccccaagggcatcgccagccgcgtctcctcgggcaaggtcctaaacgcggtcgccaagaacgtcccctggatgctcggcgggtcggccgacctggccccgtcaaacaagtcgcgtctggagttcgagggggccggcgacttttcggccacgaaccccgccggtcgcaacttccacttcggcgtccgcgagcacgcgatggcggcggccgtcaacggcatggctctctgcgggctgcggccctacgcggcgacgttcttcgtcttcgccgactacctccgcccgtccgcccggctcgccgcgctgatgggcctgcccgtgctctacatctttacccacgattcgatcggcgtcggcgaggacgggccaacccatcagccggtcgaacagctcgcctcgctccgcgcgatcccgggcctggtcgtcctccgcccggccgacgccaacgaagtcgccgaagcctatcgcgtcgcgatgcaaacgtccgaccgacctgtggccatcatcctcacgcggcaaaacctgcccacgctcgatcgcacccaatacgcccccgccgccggcgccgcccggggcgcctacgtcctgagcgatccgcccgagggcaagccgcaggtcattctcctgggcagcggcagcgaagtgtcgctgtgtctggcggcccagaccgcgcttggggccgagggcattcccgcccgcgtcgtcagcatgacaagctgggaactcttcgacgcccagccgccggagtatcgcaacgccgtgctcccgccggaagtaaccgcccgggtcggcgtcgaggccggcgtcgagctggggtggcacaagtaccttggccccgtcggccgcttcgtcggcatgagcggcttcggcacgtccggcccctaccaggccctcttcacccacttcggcatcaccccggccgccatcaccgccgccgccaaagccgccctggccgccgggtaaagaacggctgcgtgttccaaaaagtcgctgccgcaggaccaggaagctgcttgcggcttcgcacgttcctcgcgcaccccgcgcccccgcactcgtcgctgcacccccacgtcagtggggcattgcaccatgagccggccggtagtatgactggatgtgcgtccagaccgtcgcgccggcaacaccgcccgcgccgcgcccacgctcgccgtgagcacgtgccttagtcaagacgccccgcgaggcgcaaaaaaaaggcgtctcagcagggagacgccgaggacgctccaaggagcggagcctcgcgcgacaaaagtccttactatgacttgcaagggcaatcgtcgctcggatacacgccccaattcttgcgacactacgggaagcttgtcaatccccccagaaagaatgtcttcacgcccacgtttctcggaggtgcacaatgtcaggcagtcaggcccaacggccgtatcttctcgggctggatctcggtgttcaatcggtcggttggaccgtcctggacctcgacgggcagaatgagcccgcggtgctccgtgcggcgggcgtgcggtgcttcgacagcggcgtcggcaatgaaacccagatcgaacagggcaaagacgagtccaccaatgctgcccgtcgaatggctcgacagcagcgccgccagctcttccgccgtgcccagcgcctccgacgcgtcttccgtgtgcttcaatcggccggccttctgcccgaggggccggctgccacgccggaccagcgccacgcgatgctcctggatctcgacaagaacctgttcgccgagcacgtggcgcccggcgaccggctggccggccacacgctgccctaccggctccgtgccatggcgctggaccatccgcttgccgcccacgccctgggccgtgccctctaccatctggcccagcggcgcggattcctcagcaacaaaaaagcggccaaggagtccgacgaggacgaaggcaaagtcaaggagggcattgcccaactgtatcaggcgatcgacgcctcgggcgtccgcacgcttggcgagtatttcgcccgcctggatcccgaggaacagcgcatccgcgcccgctggacggcccgcaagatgtacctcgacgaattcgaggcgatctggaacgctcaatcgccgcaccacgccgcgctcacgcccgagttgaaatcacgcctccacaaggccatgttcttccagcgaccgctcaaatcgcaaaagggccttattgcccgatgcgacctcgaaccgaccgagcgccgcgctcccaaagcgagccttgccgcccagcgattccgctacctccagaagctcaacgacctggagatcatcgacccgcagggagaatgcctgccgctttccccggagcagcgggccaagctgaccgagaccttcgagtctcaggccgaagtctccttctcgacgatgcgtaagttgctcaagctcaaagcgccccggggcgacacgcccggctacacgtttaatctcgaggccggcggcgagaagagactcctgggcaaccgcaccgccgcgaagctaagcggcatcctcgacggccgctggtcggccatggacgacgcccagcgcgaggccctcgtccacgaaatctccatcttccagaacgaagacgctctggcccggcgactggtcaaggcctgggacatggacgagcaaaccgccgcccaggtagctgccgtccgcctcgagccgggctacttcgagctgtccttgaaggcgatccgcaagctcctgccccggctcgaagccggccagcgcctcaacgaagcacgaaaggaactctacggtgaacggctcatcgaaagcgacgcctgcgacctcctgccccccgtgctcgacgcggtcaagacgctccgcaatcccgtcgtctgccgcgcattgagcgagctgcgcaaggtggtcaacgccctgatccgccgctacggcaagccggccatggtccgcgtcgagctggcccgcgacatgaagcgcggacgaaaagcccgcgaagacgcctacaaacaaatgcgagccaaccagaaacgccgcgacgacgcgaagaaaaagatcttcgacgaaatgaaaatcgaccagccccgccccggcgacattctcaaggtggtcctcgccgaggagtgcaactgggaatgcccctacacgggcaagcggatctccatgaaagccctcctcgggcccaatccccagttcgacatcgagcacatcattcccttcagccgatccctggacaactcgttcctcaataagacgctctgctaccacgaagaaaaccgcagcgtcaagaggaacaaaacgccctacgaggcctatgcccacggcgaccccgaccgctggaacgccatccttcaacgcgtcaaagcgttccagaacgaccccagacaccgcaagctccaacagttccgcaaagaagagctcgacgaagacttcgtcagccgacagctcaacgacacgcgctacatgtcccgtctggccgccgactacctcggcctgctcttcggtggccgcgtcgacccggagggcaaacagcgcgtccaagtctccgccggcggcgtgaccggctatctccgcgacgtctggcagctcgaccaaatcctccaggacccgacgctgcccgacgcgatccccgccgacgagccgggcaagaaccgctacgaccatcgccaccacgccgtcgatgccatcgtcgtcggcttggccggcccagccatggtcaagcggctcagccaggccgcggcggccgccgaagaccgcggccaccgcctcttcgtccccgtcgaagagccctggcccaacttccgcgaccaggtccgccaggccgtcgctgaaatccgcgtctcctatcgcgtcgaccggcgcatcagcggcgcgctgcatcaggacacgatctacagcaaaccgcgaacgatcctcgacgacgacggcaaacccatccagcgccacctcgtccgaaagccgctggccagcatgtccacgcaggaaatcaacgccatcgtcgatccggtcgtccgccaccttgtccaggaccggctcgatgagctcggcggcaatccccagaaagcgttcacggaccccaacaaccacccctatctcaaagcccgtgacggccgcgtcatccccatccacaaggcccgatttgccaaaacgatcacccccatcgccgtcggtcccgactccgccaagcgctacgtcgcccccggcaacaaccaccacgtcgaaatcattgcccttctggacaacgccggcaacgaaaccaaatgggaaggacgcctggtgagcctctacgaagccacccagcggctcgcccgaggcgaacccgtcgtcgggcgcgatcacggcgaaaaccgaaaattcaaattttcgctggcggggggggaattcgtcgaaatggaacaccaaccgggggccccccggctctatcgggtcgtcggaatctccgccaacgtcctcgaattccgtttgcataccgacgcgcggccaagtacagttctacgtaagatgtccagagcgcgggtgacgcgaagtcccggtgctctgaaggaggcaaaggcacggaaggtcgccctcgacccgctggggaatgtccttccggcctatgactaaccgcatcctggacttctccgaagcccccgcgcggctccgcgtccgcctccgccaactggtcgtctccagccaggaccggcccgaggtctccgtccccctggccgagctggccgtcgtcgtcgccgcccatccccaggtcagctacacccaggccgtcctcgccggcctggccgagtcgggcggggccttcgtcgcgtgcaatcgccagaacctcccggtgggcatgttcctgcccctggccgcccaccatagccaggcccaacgcttcgctgcccaggcccgcgcacccctccccctccgcaagcggctctggcgccagatcgttcgggccaagatccgcgcccaggccgacgccctggaatcgctccacggcaccgaccacggcctccgccagctcgtcccgctcgtgcgctccggcgatccggccaacgtcgcggcccgcgccgcccggcgctactggtcccgcctgttcgtcgacgtccgcttccgacgcaaccccgacgacgaggaccagaacctgttgctcaactacggctacgccgtgctccgggcaatcgtcgcccgggccgtctgcgccgccggcctgcacccctcgcagggcatccaccaccacaaccgcggcaacgccttctgcctggccgacgacctgatggagcccttccggcccacggtcgatcgctccgtggtcgagtacgtcgcgtcgcacgacgccgtcacccacgtcgaacccgccgccaaacgccacatcatcgcggacctcacggcccgctaccagatcaacggccagcagcggaccctcttcgacgtggccgcgcgactggccgcctccctggccgacgtgttcctgggcaatgcccggcggttagagatgcccgactggtgagcacgagggaactgtcccgttttgcggtcgcaggagcgtccatccgagtcagggttcaagccgaagacacgcgacggtcccccttggggatcagcaggaccatgcccaggcaagaatacgtgctttcggggtaccgcggaatgtggctattcgccctgttcgacctgccggtggacacgaagaaagcgcggcggcgctacgcgcagttccgccgcatgttgctcgaagaggggttctcgcagctacaatactcggtctacgcccggtactgcgcaagccaggagcacgccgacgccctggccggccgcattcgccgggccgtcccgcccgacggccacgtccggctgctggcggtcaccgatcgccagttcggcaagatggaggtctactatgggaaaacccgccgccccaccgaatccgcccccgagcagctcctccttttctgacctcccgctgcggcctaaatcgcttcagcccaaggacttccgccccatggagtgtatccgagcgacgattccccgcaagccacagcttgccggtgcaagcgacgatcgagccgaccagtgtatccgagcgacgattccccgcaagccacagcagcaagcgatgctgcgagtgctccgatgtagtgtatccgagcgacgattccccgcaagccacagcagcacgcctcctcg

SEQ ID NO: 3920 - DNA, 9292 bp, synthetic construct
  source 1..9292: mol_type = other DNA
  misc_feature 1..9292: note = Synthetic
cggcggaccggaaaatgggtaagcttcctccccgaacgacccaaacaaattttccacctacaatcgagatgcacacaaaggattgccaaaaagaataatctaccggccggccacgcaaatcagccgatttaccgcaagccgaaaatcatttctgtcggctactccgaaactgggtgaactatagtactccagacggttgcctcgtccgtcaattcggagtataataagctattgcctgggtggggataggttcccgtgaaaaccgaggcgaaggccaactcaggagctgtggccgaaggccggccggcacgatgccgcctaccatccactccgttcacagcaacaatgtgaccaatccgatagcgtgcaaacaaccgtcaagttgccaactccaagacctacgagtccgattcacccaggaccaagacgcctatgcttagcgattcgggcatttccccagcagattttccaccgttcagcggggcgcgagccaaatctgagcttttctccgcctccggtctaatggcattgcgccagatggccagcgacttgtggctgccggtggcggatgaggcgataccggagggatggtcgaagagtcccgtcgaccccaacgatctcttgtcgattttttcgccgttgcggttgcgtaagggctatgttttgcgggcatacgtgttccgcatggggggcaatggaaatggggtagtctgggcgatgcccggggatgcaccgttcccggcgcccgaagactgtccggtcttggaaaaccattttggcagaacgcccaagccgcgtggcgcgttggatgatccgatggaagccatcgaaggggacggctccgcgtggtcgtacatggcagcatcgctgttacaccgggaactgcgcgagttcggcgccgcctggcacggcatctattggggaacgcacatcatcctggatgacgacccatggaaggatggcgtacctgtcggaaatcgttcgctgttcgagagccccaccggtgattccgagcagtggaaatggatcgtgtcaccgcccacgcagtggcgcccccaggtgattattggtagctattacgtgacggtcaccttccatacttatagcggcctagggaaccaagccatctaccgccataccgacacttaccgggctgggaactatcggcccaaggtcgagcaagaaatgattgccgaaggaccgtctggattcctattctagccggttcaaaaccatcaaggctcttccaattggcaacggaaacaaacatttgccgtgtgtatagggcaagcggcgatggtttgctgaacgccatcagcgggcgccgaaaggtcgtgggctttcacataacgcggccgtacatcctcagcgcgtggcctgcccgcgcttcatgccgtgacttcagcatgccgccacaattcggcgagtttgttagccaatccgcaaggcctacccaacgcaagctgcggccgtaaccaaagggagggatgtgctgcggccacgtcccttgtcctttccttgatgctagccaaatcaccaatggcaaatgcggtcactacggagcgcggccctacagaacacccaaaaacatgcgcgcaaaaggcacgcaagttatgccataagcgactattgacgtttttcgccgctcccaacctctgcaaaagctaagagcgtgtttgagaagggggtgtttgcgtcgggcggcttggcatgggcgtaggcgtttgagcatcaggtggatcatggcgatgtagatcatcgtttcgctcgtgtcggttaggaactcgtaatccttgctcaagcgacggtaccggttgaaccaaccgaaggtccgttccacaacccaccgacgcgggagaacctggaagccgcacgcctccgccgggcgactgacgatctccagcacccaaccgaacgatgacttcacccactggaccaactggcccgcgtagccgccgtccgcccacactttcttcagacgcggcaacaggccccgcacccgatcgaaaaccaaccgcgcgccgtcgcgacggctggatatctgccggatgcaccaccacggccaggatcaaccccagcacatccaccagcagatgccgcttgcgccccttaaccttcttgcccgcgtcgtaccctcgcgcccccctttttccgtcgtcttcaccgactggctgtcgatgatcgccgcgctgggttgcgggtttctgccgctctgcacccgcacccgccttcgcagggcgtcgtgaatcttctgccaagtcccatccttcttgaatcgggcaaagtaatagttgaccgtttcccagggcggatactccttgggcagcatccgccacgcacagccggcgcgcacgatgtagaagatgccgttgatcaccgcccgcatgtccacccggcgcggccgaccccccggcttggcaggaggactcaaccgggcgatcgtctgccactgggcatcggtcatatccgtgggataaaccagttgcatgtgagacatcctttgctccagagaagacatccgtttcccagactaagtgagcgtggtcatataaccctgttttcctcggttctcaagggcttttcaaacacgctctgaacgaggagcggaagccatgctgcaaccgcgggccgactacctcagcgacaccgaaccgatgacggccttctgggcaaaatggcaaagatcggcaaccggccagcgccaatacgccgcgtcaagctaaaccacaaaccgtgtcccgcgcaacacaatcgacgatgccgcaggtcaccagaacggcatcttgcaaatagtgagatttgggggaaaatactgtttcggagcagtgcggcataagccgtgtgtgtatagggcataacggcctggcaaaggagaaaaaaacatgttgcagcccttgcaagtaccgtacattctcggtctcgacatcggcgtgcaatcgataggctgggcgctcgttcggttggatgaggaaggcaatccttgtggcattctccggctcggagtccgcagcttcgagagcagttccggcagcgagcaggaaatcgaaaaaggaaccgacgaaccggccagccggcagcggcgagaaaaacggcttatgcgccgacagttgttccgccgtcagcaacggcttcgccgcactgcccgcgtgcttcaacaggctggcttgctgccgccgtttccgcttcaaccggccagtcgcgacgccgcaataacccagctcgacgcccaactgcgcagccaattcatcgattcaggcaatcacgtcgatgcccaactgctcccctatcgcattcgtgctgctgcactggaccagccattgcccgcctacgcacttggccgggcgttttaccatctagctcagcgtcgcggttttttgagcaacaaaaaggccggcggtaaaaaggacgaagaagaaaaaggcaaggtaaaagccggcattgccgaactggccaaacagattgaggcggccggcgcgcgaaccctcggcgagttcttcgcacggctcgatccacaccagcagcgcatccgctctcgctggaccagccgaaaaatgtatcagcaggaattcgatgccatctgggcagcgcaagagcctcaccatccgcaaatcctgactgccgagcttaaagccaagctctatcgggcaattttcttccagcgtccgctgaaatctcagaaaggcttgatcggccgttgctcgctggaaaaaggccgacgccgcgccccgcttgcctgtctggaggcccagcgccttcgctactggcaaaaactcaacgacatgcgcctgaaagacgccagacgcattcttaacgccattcccgaggccgaggggctcatcgactggctgccccaggaagggcaaggcagactgagcttgtacgccaaacaattgcttgcccagcatttggaaaccagcgaagagcttaccttcaaccagattcgccacatcctcggactgaaaaagaagaaaaactccgatctggatttcaccttcaatctcgaagaaggcgacgagaagaaactgctcggaaaccgcaccgccgccaggctgctgaaagccctcggccagcgctggcaggatatgccagaagaccagcgccagcgactagtcgacgaaatcctttccttcgaaaaagaggaaccccttgctcgccggctcgaaaaagcttggggcttcacccccgccgaagcagcaaacgtcgccgccctcgacttcgagcaaggctaccacagcttctcgcgccaggcgatccgcaaaatactgccccacctccagcaaggccagtcgctggctagcatcatcaagcagctttacaaagacactcaaccgcaagcgaccgcatgggaccgtctgccgcccctgcgcgatgtatttccccacgtcaacaacccggtggtacgtcgggcgcttaccgaagtccgtaaggtggtcaacgctatcttgcgcgtgtacgggaagccccagcaggtacacatcgaactggcacgcgacctgaagaaaagtcgctatgaacgccagcaactgttcaagggtatgcgccagcaacagaagcagcgcgaagaagccaaaagttggcttcagtgccaaatgggtatcaccaaccccacagcccacgatatcctcaaataccgcttgtggatcgagtgcaaccaacaatgtccttacaccggcaaaccaatctccaaggaagctctgttcggccgcgaacctcagttcgacgtggaacacatcattccttttagccggtgcctcgacaactccttcaccaacaagaccctttgcgaaatcgccgaaaaccgcaacgtcaagaagaaccgcactccttacgaagcatacggccacgatccgcagcgctggcacgaaatcctccagcgcgtcagccgcttccagggcgatgcggccaaagccaagctgcgccgcttccagttgacggaaatccctgccgatttcgccaaccgccacctcaacgacacccgctacagctcccgactggccgccgaatacctggccctgctctacggcggccgctccgacgcccagggcaatctccgcgtacgggccatcaccggtgcggttaccgcccagttgcgcgaccaatggggcctcaatgccgttctggctgaactaggccgacaactcggcgttcgtgacctcgacgacaatgtcgaaaaggcccgcttcgaccaccgccatcatgccgtcgatgcactggttatcgctctgactaccccaggcatggtcaaacgttttagcgacgagtcgcaacgggccagacagtacggccgccagctccggtgctttttcgatccaccctggggtacgcgcaccgagttcgtcgccgacgtgcgcaatgccgtgctggccataaacgtatcccgacgcctcgaccgccgcctgaaaggcccgctccacgaagagaccatatacggcaagcccaaacaatacgtggacgaaaaaggcaagaccatccaggtcgcccacgtacgcaaaccgctggaaagcctgtcgcccaaaaacgttgacgacatagtggacccggttattcgagaacttgtaaaaaagaaacttcaagacctgaacacaaccgaccccaaaaaggccttccagaaaaaagagaatcatccctacatgatagctcgcgacgggcgcatcatccccatccacaaagttcgcatccgcgtgaccaccgagaccattatgactgttggccacggcccaacgcttcgccacgtcaagcccggcaccaatcatcacatggaaatagtcgcaaccctcgacgcagcaggcaacgaaatccgttgggagggaattaccgtcagcctcttcgaagccctccaccgcctccgaaacaaacagccagtcgttcaacgagaccacggcccaggtaaacgcttcaagttctccctggccggcggggaatacctggagttcgtcgaaaacggccaaaagaaactagtccgagtaacaaccgtttatcattccaacgtggaattccgtttgcataacgacgcccgtcctattaccatgttattaggggttaaaggtgctcgcgccggcctgggccgttcggtcgacgcgctccggaagctcaaagcacggaaggtgctggtcgatccgctaggcaacatccttccggctaatgactgagcgaatcgtcgatctatcagaatccccagcgcgcctcagcgtgcgctaccagcaactgcgcatccagcgcccggaccaactcgttaccgtccccctgctcgagcttgctgtactggtagtagcccaccgacaagtaacctatacccactccgtgctcgccgaactggcagccgccggcggagccctggtcgtctgcgacgccaaatgcctgccagtagggatgatgctcccgctggccggacatagcgtccagacccaacgcttcgctgcccaagcccgcgccaccctacccctccgcaaacgcctctggcaacaactaatccgctccaaagtccgctcccaagccgcaaccctccgacaactgaccggcgacgacgcgggcttgctcgaactggctgcctgcgtccgctccggcgacgccaccaatatcgaagcccaagcctcgcgccgttactggcctcgactgttccgcgatccccagttccgccgcgaccccgaacgcaaagaccagaacctgttgctcaactacggctacgctatccttcgcgcgattgtgggccgggcaatttgcgcctccggcttgcaccccagcctcggcatccaccaccacaacaagtacaacccgtactgcctggccgacgacctgatggaaccctttcgccccctagtcgacctggccgccgctcgcttcctgcaaaccaatgggccaatcaatgaactgaagaccgccgccaaactggaaatccttacccagcttaccggccgactgaatatcgacggctgccagcgtaccctgttcgatgcagcatctcggctaactgcttcgttggcagaagtatatctggctcgcaccacaaagttgacgctgccctcctggagctaatcgcagtatgcgccaccagagagcaacttccagatcagcttcaaggtatcaaggcatgtggatgttcgtgatgttcgacttaccggtaaccaccgccgagcaccgcaaacagtacgcccagtttcgcaagtcgctgctaaagatgggcttcaatatgctccagctttccgtctacgcccgatacttcgtcagcgaagaagcggcaaccgtctaccgcttgcgcatacgctccgccctgccgccagaaggccaagtacgcctcttgacggttaccgattgccagttcggccggatggaaaactatgtgggaaaaatggcctcaccgaccgaaaaacccccgaaacaactgctccttttttgaccgtattttcgacgcaacctgcgtgctggcaagcgtttacgccagaaaagtatatccgagcgacgattccccgcaagctacagcacactggaagaagccatcgacgatttagcaagtatatccgagcgacgattccccgcaagctacagcttggcaacctcggtcggcttctctccagcgagtatatccgagcgacgattccccgcaagctacagcgagatcgagattttagatgtgtgcctgtctagtatatccgagcgacgattccccgcaagctacagctcaggcagcgacacggcagtctcaaatttagtatatccgagcgacgattccccgcaagctacagcgcaaatctgcctcgacctgcaagggccagtagtatatccgagcgacgattccccgcaagctacagcccgtagggatgcggatagggcggagggcgcgagtatatccgagcgacgattccccgcaagctacagcaaaagttttatgtatgtgacgagcaatgctagtatatccgagcgacgattccccgcaagctacagctcaaagcacctgccctcaccaggcgttcgaagtatatccgagcgacgattccccgcaagctacagccgggtttgaaagcactgccgctggcagaaagtatatccgagcgacgattccccgcaagctacagcgcggcacggttgatgaaaagacacagactaagtatatccgagcgacgattccccgcaagctacagctcaagtggcgggacttgccgccagagtttaagtatatccgagcgacgattccccgcaagctacagcgtctgatcggctctgacgaggcacacgcggagtatatccgagcgacgattccccgcaagctacagcgatcgctgcctgcgtatgcgatcaggtcaagtatatccgagcgacgattccccgcaagctacagcgtaccagcgtcaagccttatctggtgtgaagtatatccgagcgacgattccccgcaagctacagcaaatctggatgtgtgtctgaatgagataatagtatatccgagcgacgattccccgcaagctacagcgtcgatttggccgcttcgcggtaggcttccagtatatccgagcgacgattccccgcaagctacagcccgcgttccagtcggcctgttttttcggccagtatatccgagcgacgattccccgcaagctacagcgactggcttgaaacgggcgaggcaggtcaagtatatccgagcgacgattccccgcaagctacagcagtgacctgctgtttgagcgcgatacgctggcgccagcgctacgcactccgcagtgggctacgtcttcctgaatcccattgcggctgtaggaaagtggatcgcagccgtaggtgccgcgtttcagcgctgctcgctactggagcactaaccagctccctattgatagcctgtccagaggctcgcactgctggactagccagcacctataggaagcaagaagtcacctaaagggaagcaagaagtcaaggcgcattcccccacgggacgctttccctgccttgcttcttgaggggcgtccgggttttcagacgctacaagtacctcccggcaggctcgcctgggatgaaactgatcgagttggctgcgggcggctggttgggtgactgctctggcatagatcttatcttgatgtaacaggcgatgaaacctcgcctaagcacctatcgggaaactctcgacaacgaggttcatgaagatcttcgggcgtagcaaattgctgcggcgggttcattcagtggctggaactgcgaaggacttctccgcgttcatactggcttcaggaactccgccgcacgcccttggaggccatgttcgcacctcgactcacttcccgcttcgaccattacacac

SEQ ID NO: 3921 - DNA, 7136 bp, synthetic construct
  misc_feature 1..7136: note = Synthetic
  source 1..7136: mol_type = other DNA
gcatcaaagtctccgacgaaacgatggcacaactgaatatcatgaaacacaagtttcacggtgactggaattacacaatcgctccgtcccgttgaaatggatactttattttgtcacagttccttactgtgacaagtcgaggaatcgtcgctcggatacacgcttgccagtttaccgcggggcgggcggttgtcaacggttatttctggattgcgcgggaagagacgcgagggagtcaccagtatcccaggggagatttgccatgagtgcaccgttttcgaagggcgagacggagaaccgctatcgtttggggctcgatttggggagcggttcggtcggctgggccgcggtgctcgatgcggacggagattcgcccaagatcctggggatgggcgtccggcggttcgaggcgggggtgacagggtctaccgatgagatcgaggccggcaaggacaaatcccgtgccacggctcgccgcgacgcccgcggaccgcggcggcagacctggcggcgccaataccggctccgcaaggtgtttcgcgtgcttcagcggcttgggctgctgccggagagcgacgacgattcccacgacactcgcaaccgagtgatcgccgatctggattgccagttgcgaacggaatacctcgcagaggccgaccacgtggcccaccaggttctgccttaccggcttcgtgcggcggcgctcgatgagaagctctctcgtttcgccctcggacgcgccctctatcacctcgcccagcggcgcggcttcctttccaaccgcaaggccagcaagaaggacgaggacacgggcgtggtgaaagcgggaatccgtgagttgtccgaagagatggagcggaagggctgccggactttgggcgagtacttcgcctcgctcgaccccgagcagcagaagatccgcgggcgctggacggcccggcaaatgtacgtcgatgagttcgagcagatctgggccgcgcagagcaagcactacggagacctcaacgctgagaaccatgagcttctttgcgacgcaatcttccgtcaacggaagctcaagtcgcagaagggtctgatcggtgcatgcgaattggagccgagcaaacggcgtgcgccggctgccagtatggagtaccaggagtttcgcttgctgcaacgggtcaacgatctggtgatgatcgatcctggaaatcgcaagtactcgctgattgggaaggacgatttggaactgctgccagaggcggcggcaaaacgcaaagccctgatcgccgcactgcaggaggcggagtcgcttacgtttgccaagatcagtaagatactcggcctgaaggccgagaagcgagacggtgagtcgatcaaatggacgttcaatctccaggaaggcggcgaaaaggggatcaaggggaatacgacggccgccaagctccggggcgtgctgggagatcgctggacggggttgagcgaagaagacaagtatcgcctggtggatgagattctctcattcgagaccgaagaggtcctcgttcgccgtctcatgcgcggctggcagttgccggagaaagaggccaaggaagtcgccgacatccatttcgagcagggctacggctcgctctcgcgcaaagcgatccgagcgctattgccagctttgcagcgtgggattccctatgcaacggctcgcgacgaagcgtatccggaggccaaaacggtggaaatcgtgctggaatcgctcccggcgaagcacaagtgcaaccgtttgcgcgacgttcgcaatccggccgtggaacgagccctcagtgagctgaggttggtcgtcaactcgctgattcgcaagtacggcaaacccgagtcgatccgcgtggaattgactcgcgaactgaagcacagccgggagcggcgaaagaagatgacagaacggaaccgaaagaatgaagggtttcgctcggatgcccgagcgaagatcctcaaggagatgggccacgagcgatactgcacggcctacaacatcctcaaggtgcgtctggcggaagaatgcaactgggaatgcccctatacgggtcggagcatcgggatggccaacctggtaggcgacaacccccagttcgaagtcgaacacatcgtccccttcagccgctccttcgacaactcctttgccaataagacgctctgctatcacgaggaaaaccgaacgaagagtaaccgaacacctttcgaagcgtacggccattccgagcgctgggacgagatcttgaggcgggtcgggcgatttcgaggcgagcggtctctggtcgcacgcaaactcgacttgttcaaacgggaaaagctcgacgacactgaagaattcaccaatcggcaattgaccgacactgcctacatgtcgcgtctggcagccgaatacatgggccttctctacggcggacgaatcgatgcagaaggaacggcgcgcgtgcgggtctcgccgggtcgcgtgacgtcgtatctgcggcgagaatgggacctgaacaagatactcggcgtctcggacgagaaggaacgtggcgaccaccggcaccacgctatcgacgccttggtgatcgccctgaccggggccagcgaaattcagacgctcagccgggccgccgaaaaggccgaggcacagaaccagcatcggctattcatggcggtcgatcagccgtgggacggcttcttgagcgacgtcttcacgggcgtggaggggatcaacgtatcgtcgcgggtgtcgcgaaagctgaacggccagttgcacgacgccacgattctctcgccgccgaaaccggctgtcggcaaggacggcaagccgacacaggtgcatcacgtccgcaagaagctggaatcgctcaccaagaacatggtcgacgacatcgtcgacgatcgcgttcgggaactggtcaaggagaagctcgacgcgttcggcggagatccgggcaaggcgtttcaggacgccggtaaccatccgtacttccggtcgaaggacggtcgcgtgatcccgatccacaaggtgcggattcggaaatcggacaagccggtggagattggcaccggctccaaacgcagatacgtgaaccccggggctaatcatcaccttgaagtgatggcagttttggaccaaaatgggaatgaaaagcggtgggtgtatcgcatcgtgtcacgcttcgaagccgtcgggcggaagaatcgaggagaggcgatcatctcttgtgtgagcgataagaaggagagattcaagttttcgctttcggggggtgaatatgtaataatgcgttttgagggtgatgacgagcgactctatcgcgttacgggaattacgcagtccgaagtggaatttgtcttgcattgtgacgctcggccaattacggtgcgaaagaaggagggagaacgtatacgatgcaagcccggaaggctgatgaatagtggagccaggaaggtcaccgttgaccccttaggcaatatccttccagccaatgactgaccgaattgtcgatatctcgcgggcggccgcgagattgtcggtgcggcacaagcaactcatcattgaccagtcgccccagggcgaagtgacgatgcccctggccgatctggccgtggttgtcgtgtcgcacccccaggtcacctatacccaggccgtcctggcctgcctggccgaatcgggcggcgccttcgtcgcctgcaatcgccagtacctgcccgtggggctcttcctgccgctggtcgcccatttcgcccaggccgagcggttctctgctcaggcacgggctgcacagcccctctgtaaacggctgtggaagcagatcgtccgcgagaagatccgttcccaggcccaaacgcttcagatcctctacggctccgatttcgggctcctgacgctcgtctcacaagtgcgctcgggcgacacgagcaacgtcgaagcccgggcagcttgccgctactggccccaactgttcctcgacgtcgaattccgccgcaatcccgacaaccaggatcagaatctgttgctcaactacggctacgcagtgctgcgtgcgatcgtcgcccgggcgatctgcggcgccggcctgcatccctcgctgggaatccatcaccacaaccgatacaacgcctactgcctggccgacgatctgatggagccgtttcgcccgatcgtcgatctggccgtggtcgaatacatgcgcgagcacgacgagccgtacggagtcgaatcggccgccaagcagcatcttatcgcccgcctgacgggacgatacatggtcggcggcgcacaacgcacgttgttcgacaccgtgacacgcctggccgcgtcgctggccgacgcgttcttgagcggagcgggagaattgacgctcccgaggtgggaggttggagcgcgggaagtcccaggggagtcggagaacgagggcgaagaagactgaggggagacgtcaggagaatgccacgacgagaatatgcactttcaggataccgcggcatgtggctgtttgcgatgttcgacctgcccgtcgccacgaaggcggagcgaaaacgctatgcgaaattccgcaagattcttgtggaagacgggttctcgatgttacagttttcagtgtatgcgcgctactgcgtggacgaggaatcggcggtggcgcaccggcgacacgtccgaggggccatacccccggaggggcacgtcaggctgctatcgattacggatcgtcagttcgggaagatggagaatttcgttgggaaaaagcctactccaaccgaaaaagcgccccaacagctttcgcttttctgagcgaagctgcgttgcaagtccttttctggtggtggtttgcggaggagaaagtgtatccgagcgacgattccccgcaagccacagctcggcttcaataaggagaaggcacgcggtaagtgtatccgagcgacgattccccgcaagccacagcgtacaccaccagcggccagccttggcgagtagtgtatccgagcgacgattccccgcaagccacagccataggaagccattacgtcaaaacccgctaagtgtatccgagcgacgattccccgcaagccacagcggctgtcggcaatggcaattacgacggagaagtgtatccgagcgacgattccccgcaagccacagcggaccgaccgccggcaacaccggtggtgccagtgtatccgagcgacgattccccgcaagccacagcgaccgggtggcgatgccggtgtcgccgagacgccgcccaaatagaacagacactgtgcgacaccggcatcgccacccaaagcgcgggacgtgcgaagaggaccgtgagagaagtgctgcaaaaaagcacgggcgatcaccccgtccggaggggtttctgcaacacccccctatcgacggatgccgagttatggggattaccctagccgcaaccagttgccgcttcgccggttgcgacgacgcctcaagaccggcctgttgtgcaacacccctcgcacggcgcgaaatgcagcgtgctcgttttgagagtctgggcaaaccggccgggtggtgatgtggcggcttggacagtagtgccttccgccccatctcggtctcggagagaccgagcgacggtgctttctgccctgggctgatatggggctgccccttcggggcggaagattgttcggccctttcagggcgggagattctgggggattccttccccagggcgacggcaaggctcgcagggctcgcgttgcctctgccctgggctgatatggggctgccccttcggggcggaaggctgatatgaggctgcgccttcgcgcggaagaagcgggtcgatgatcggggctgcaccgggcgcgaagggggccgcactcacttccccggaatccaatccggttccttattggagttgccgtcgctggtgacctccacccagcgattgacggctcgcaggtcggcgacgcagatgttccagccgggggcctgggttcccacgccctcgggcgccgggccgaggcgtttcccggcggggccgcgagcgaagacgacgtagtttccttccggcggccagtcgatgtggtagaccttgatcggtttctcgctgacgacaatgtcgcgtccgcctgtcactttcggctccggaccggtcagatcgaggtcggccacgcggagggcccagtcgctgggcgtccaggcaatctgcttcccgtcgggactcgcctcgggccggcagccggggatgccgagatcgacgactcgctgaccgtggacctcgatggccacgatggcgtgccggtagcccatggcggcgtgaatcgtggcgagaatccagttcccatcgggcgtccagcagacgccgaacagatggctgagttccttgttcgcatgggcccgatgctcgcccgaggccaagtcgaaaaagaacagcccccgcgacgccaccgacgaggagttgtaggtctccatttcgcctttcagataggcgatcacggtgccgccggggttccagaacggctgccgcgcgttgcgggcgaccagggtccggccggttccgtcggcgttcatgaagtagacgttgcgactcttggcttcgccttttccttcgtcggcgacgaagcagatcttcgcgccgtcgggcgaggcgtgcggatagagctcgtcgacctggccggtttgcgtcaggttcaccgggtcggacccgtcggcattgatccgaaacagttcccaattgccgtctcgatacgtttcgtagacgatcttgtaagggcagcccgccagttccgctttgaggtcgccggccgggcagaagctggctccgctcggcgagatgagcgcggcggcgaggattgcggtcacggaccgcacggggacgaacttggtgattgccacggtggactcctgagggttgctcgtttaacgcccagccgaaggcgccggcttctgtagttgtagtgcggccggcgccttcggctgggcgttaaacgactacactcgaacgggttcaggttctcagactgcaccgaagtggcgatgtttagactaaggcggccttcggccgcagtcaaatccgaaacacgaaatccgaaatcctgaacaaatccaaagcctgaaatccaaatgcatcaaaccagacggagagactcgtgccgacacgcaccgccgtgcc

SEQ ID NO: 3922 - DNA, 6798 bp, synthetic construct
  misc_feature 1..6798: note = Synthetic
  source 1..6798: mol_type = other DNA
ttaggccgcacgggcgaaaaggtttcggttctcggctttcccggcctggccctcatccactacacgcagaaagaagtggacgacggcatcaaggccgcattcgacgccggggtgaactactacgatgtcgcccccgcctacggccaaggcgtgtgcgaaacgaagatgggcatcgccctgcggcagattccccgcgacaagatcttcctggcctgcaaaaccaaaaaacgcgacgcccaaggctgccgccaagaattggaaacgtcgctgaaactgctcaagaccgaccacttcgatctctaccaactgcaccatctcgttcggcccgaagaagacagccgccgcgcgttgggccccggcggcgcgatcgaaacgattctcaaagccaaggaagagggcaaaatccgctacatcggcttctcggcgcacacgaccaaggcggcactgacggccatcgaactgttcaacttcgacaccgtgatgttccccatcaacttcgtcgaatggtacacccgcgacatgggcaaggccgtatgcgaggccgcccgcaagaagggcgccgccctgctggcgatcaaagcgatgagcaagggcggctggcccgccggcgccgagcgcacgcgcaaatggtggtatcgctcggtggaagaggccgacgaagtcgatctggcctggcgctggacgttgagcctgcccggcgtcgtggccggcttcccgccgtcattcctcgacttggtcgaaaaaggcatcgccgcctgcaagaacttccgacccattacgcccgaagaaaccgcccgcgtggaacagatggccaaagagtgctcgtcgatcttccaacgcgaagaatcgtcgatcgcccatcgcaagcacgggcacgacgcctgggcggcctactgcccctgcgccggcgacactgaggccgacgtgtgagcatctggccggacgtgtaagcattgaagccgatgtgtgagtcttccggccgatgcgtgagcattgaagccgatgtcggagcatccgggccgccgtgtgaccgccgcgttcgcgggccgatcagccgatcaagcgccctccgcacgcttgcgcccgccggccgtgcatgccctgccctgccgcgcttggccattcgggttcttgtaccgcacactcggcgtccgagcgcctttgatctacgcgggcgtttcttccgtcgaagcgttgcccaaccgccttccaacggcccgttgaaaaagaccgaacgaaccccgggcgtgcatttcgcatttcaggaaagacgctgcggggagtatgcaagaccgacttcttcaacaggccgccagccacacgccttcttgcgccgcgaacgcctgatccgagcgcgtttgagccattcggcgtcctgtgccgcgcacacgatgcccgatcctgttcgactcaagcagcccttttccgccgtcgaagcgttgcccaacggccttccaacggatacgatagaagtggccttctatcatgttcgtgctgtcgatgcaatattttggtgagccgatattgatgcccgttgggcgcccgatctaaaggactcggccgcgtgtatagccgaccctcggtcggatcacacaacccgagttccgggctgcccaccttttatcgaacgggctctcaaaagcgcatcgccacggcattgcggtggaaggcctttttcgtttcttgcgcgcctcttcgctccgcccgctgagcagcacgccgtcagaacgcgagtctcacctgcccccggcccggtcgccaaatcagccgttcaataagactgctctcggcgcaaaaaagaaggccccacggaggggccctcggttgctcgataatcgagcattgcctgcgcgggcaaaagcccacttgctgtgacttgcgggcaatcgccgctcggatacactagtgaaatatagtaccacctattccctcgttgtcaatagcctttcgtgggggattccgatggaatcgaaacgactgaagcaaccgttcgttttgggcatcgatttgggcgtacagtctttgggctgggcaatgctttcgctcgacgacgacgacaacccgaccggcgtcgttcgcctcggcgtccgttgcttcgatagcggtgtcggttccgaagaagaagtcgcccagggaaaggagcaatcccagaacgtcgagcgtcgcggtgcccgtctgctccggcgtcaaacgtggcgccgggcaagacgcatcgccaaggtgttccatgcacttcagcgattcggcttgttgcccgcggaacccgcccccactcccgagcagcgcgacgccttgatcaaacaactcgacgccgatcttcgcgccgagttcctgcccgccggcgatcgcgccgcctttcatctgctgccctatcgacttcgcgccctcgggcttgatcaaccgcttcctcccttcgccttcggccgcgctttgctccatatcgcacaacggcgcggattcctgagcaaccgcaaagctgaggggaaagagaacgaaaaagagcgcagtgtcgtcaaagagtctatcagctttctccaaaacgaactggtccgcactggcgctcgcaccatcggcgaatacttcgccggcatcgatcccgaagagcagcggatccgcgggcgctataccgctcgccaaatgtatctcgacgaattcgaaaaactctgggccgttcaagccccgcaccatcagctcgacgaatcggccaaaaaggccattcaccaggccgtctttttccaacggccgctcaaatcgcaatccggcctgatcggcctgtgcgaactcgaacccggccagcgccgcgccccggccgcgtcgctcgaagcgcagcgattccgctacttgcaaaaggtcaacgatctgcaaatcatcacccccgatgggttcatcctggctcccagcgaggaacagcgccgaagcttgatcgactacctcgaacaccacgctgaaatcaccttcgacaaactgcggacgctctgggggcttaaactgccgcgaaagtcgaagaaaaaatcgcccgccgcttccggctccgacggcgactccgatctcgcttccgacgccgcacaatccgatgaacggcccggctacaacttcaatctcgaacgcggaggcgaaaaaaagctcaagggcaacgtcacccgcgcgcgcatcgaggccgccctcggctgcgatctcgacgaactccccgcccacgtccgcgaaccgctcgtggccgatgtgctcgaatacgaaaacgccgacgccctccagcgccgtctcgtccagcgctacggcctcgccgaagagcaggcggccgccctggcggaaacccattttgaggacgggtacgcctcgctctcgcttgcagcgctgcgcaagttcctgccgctaatggaacaaggaatgccgttcgccaccgcccgaaaagagctttataaagattcgcggcaattccagccccacgatatccttccgccgttgttcatggtcaaggctcagttgcgcaatccggccgtatcgcgcgggctcaacgagttgcgcaaagtggtcaacgccgtcattcgccgctacggcaagcccaagtacatccgcatcgaactggcccgcgatctgaagcagccgcgcaaagtccgcgaagagcgaagcaagagcatgcggaagaacgaggcgctgcggcagcaaatcatcgacgacattcgccgcttcggcatcgccaacccgtccgaaaccgacatcctcaaagttcgcttggccgatgagtgcaactggcagtgcccctacacgggcaaggccatctccatggaaacgttgctcgggccgcatccccaattcgacatcgagcacattcagccctactcgcgatcgctcgacaactcattcaccaacaaaacgctgtgcgacgttcacgaaaaccgcatagccaagcggaacctcactcccttcgaggcctattccggcgacgagcagcgctggcacgaaatcatcgcccgcgtgcgccgcttccgcggtccggccagcccggccaagctccgtaagtttctcgccaaagcaatcgattccgacttcgtcgaacgccaactcgtcgatacccgctacatgtcgcgtgccgcggccgaatatgtcggcctgctctatggcggggccgttgattcccagggaacgcgccgcgtgcaggtttcgcccggcggcgtgacggccgatctccgtcgcctctgggggctaaatcgcgttctgccgcgcgatcccggcgacgacgaacgtccgggcaagaaaagccggtcggatcatcgtcatcacgccctcgatgccgcggtcatcgccctcacctcgccggcgatggttcagcagctcagccgctgcgcgcaagatgccctgctgatcggctcccgccgcttcgtcgccctcgaactgcccttcccctcgttgatcgacgacctcaaaaaggcgatcgacgaaatcgtcgtttcctaccgcgtcaagcgcaaggtccgcggccgcctgcacgaccaaacgtactacagccctccaaaaccggcctgcgacgaaaacggccgaaccgtcgaataccgccacgtccgtaaaccgttggcctcgatttcagccgaccgcatcgaaaagatcgtcgatccggtcgtccgcaaaaccgtccaagaacacctggcccgccacggcggcgacttgaaaaaagccttcggcaacccgaacaatctcccctacctcaccgccggcgacggacggatcatccccatccgcaaggtccgcatccgtgaaaacatctctgttctccccatcggcaagccgccgcaactgcggttcgccgccccgggcaccaatcatcacatggaaatcgtcgaggttaccgacgcccgcggccgagtccgctgggaaggcaagctggtcaatatgttcgaggcctaccagcgccgccgccaacaccttccggtcgtctgccgcgaccacggccccaacgccaactttctcttctcgctcgcctgcggcgaatacgtcgaaatggaacacgtccccggccaaaggaaggtctatcgggttacgacgatctccggagagcgtttagaatttcgcttgcattgcgacgcccgcccaattacggtcttaaagaagctaccgaaagcaagaatcaatcgtagcgcgagcacgctcttggaagccaaggcacgaaaggtgtttgtcgatccgttgggcaacgtctatcccgccggtgactgaacgcatcctcgatctttccgaatgcccggccaagctccgggtccgctacagccaactggtcatcgaacgcgaacacacggaggccgtctcgctccccttggccgaggtggcggtggtgctcgtttcgcacccgcaggcctctcttacccaggcggtgcttgccggcctggccgccgccggcggggcgctggtcgcctgcgacggcgcgtcgatgcccgtgggaatgatgctccccttggcgggccaccacgttcaggcggcccgtttcgccgcccaagcccgctccccgctccccgtacgcaagcggctgtggaaacagatcgtccgcgcgaaagttcgcgcccagggcgccgtgcttgccgaactcgtcggcgccgaccacggattggccgccctatccgcccgcgtcggctcgggcgatccggccaacgtcgaggcccgcgccgcccgccgctattggaaagccctcttcggcgagggtttccgccgcctccgtcagcgccccgacgagaatctgctgctcaactacggctatgccgtgcttcgcgccatcgtcggccgggcgatctgcgccgccgggttgcatccctcgttgggcgtgcatcatcaccatcgcggcaacgccttctgcctggccgacgacctaatggaaccctttcgcccgatcgtcgatcgcgccgtggtgcaatcgcttcggcaggggattatctcgccgatcgcggaggacgacgggcgcccccgcttcgagctgacacccgaggtgaaacgggcacaggtcgccccgttgatcgggcgcgtcatcctcgatgggcagcaaacaacgctgttcgcggccgcctcggcggctgccgcgtcgcttgccgcggtgttcctcggcgagagcgaccgtctggtgctgcccgatttgacccggccgccgatcgttccctcgctcgcgcccgatgagtaaccgatgccccgtcgtgaactgactgtcgcaggataccgcggtatgtggctggtcgtgatgttcgatctgccggtgaaaacgccgaaagaccgaaaggcctatgcgcagtttcgcaaggaactgctcaagcgcggtttctcgatgttgcagttctcggtgtacgcccactactgcgacagcgaagagtcgtcggccgtgtttcgcgcgcagattcgctccgtgcttcccgaaaaaggccatgttcggctcttgctgatcaccgatcggcagttcggaaagatggaaagctttatcggagtaaaaagtcgtgttccggaaaaacctcccaagcaattgttgctgttttagctgcgggcgaagagatcgcaaagcgtttcaccggcgcaagttgcgtccggtggagtgtatccgagcggcgattccccacaagccacagcgtaatcagaggatcggttccgaaccgcgtgagtgtatccgagcggcgattccccacaagccacagccccgttcgctgatctctcactgctcaatgaagtgtatccgagcggcgattccccacaagccacagcacaccggttgggtcttcgtctggcagccttagtgtatccgagcggcgattccccacaagccacagcctctcg

SEQ ID NO: 3923 - DNA, 5112 bp, synthetic construct
  source 1..5112: mol_type = other DNA
  variation 983..984: note = note, n is a, c, g, or t
  misc_feature 1..5112: note = Synthetic
cttaaggggtcacgttggccgcggcgggcctggcgccacatccgcgtcgcctgcctcgttcgaatagcccttgccggcggcggggcgcgcggcgatatcgatctgctcgggaagatcgagcgtcgcgtgctcgacgagttggaggagtgccccaaccgggttcgttaccgagtgtctagtttccagggcggcgccctgaatctcctcggcccgccggcggctgttgcactccccgcgtgagacgccaaaaagccttttgtgctcacctacaatgggctatactctctattggcgcacaaaaaagcgccccgcacgggggcgcaataggtcgctggccaagccggcgttgcctgacgcgtacaaaaccttactgtgacaagtgaggaattgccgctcggatacactcccactagtctaccaagaaaaatgggggtgtcaagagcgtattgatcgggaaagcgtaatcacgcacacctaggcgcaaaaatggagggtcccgtgaagagcatgccggtttgtcgagtggagacggagaatcgctaccgcctgggacttgatctggggagcgcttcggtcgggtgggctgttgttttcgatcctgacggggaatcaccgaagttgttggcgatgggagtccggcgtttcgaagcgggcgtatcgggagacatcgagtcgggcagggacgagtctcgcgcgacggcgcggcgcgacgcccgggggccgcggcggcagacgtggaggcggcaatatcggctgcgcaaagtctttcgcctgcttcagcggttccgcctgttgccgcagagcgaagacgactcccacgatgttcggaaccgcgtgatcgcggaattggaccgcgaattgcgggggcagtatctctccggcgccactcacgccgcccaccaggtgcttccgtatcgtcttcgtgcgttggctctggatgagccgctttcgcccttcgtgctcggccgcgccctctaccatcnntgtataagagacagctaccatctggcccagcgtcgcggatttctctcgaatcgcaaagcggccaagaacgacgaagatgagggcgtggtcaaggcagggattagcgcattgagcgcggagatcgaacgaaccggtagtcggacgattggcgagtattttgccgggcttgatccgcaggagcagaagattcgtggccggtggaccgcgcggcaaatgttctctgacgaattcgagaaaatctggacggcccagagcgcgtatcacgagtgcttgaccggggaaaatcatgatcttctgtttgacgcgatcttccagcagcgaaagctcaaatcccagaagggcctgattggtgcgtgcgaattggaaccgtcgaagcgccgagcgccggcggccagcatggagttccaggcatttcgccttctacagagggccaacgatctggtgatgatcgaccccaataaccatctgcatccgctgatcgaagccgagccggcgaaacgcgaggcgctgattgcccacctcgaagagcacgacgcctgcacatttgggcaagcacgaaagcttctcggcctgaaggccgagcggcgcgacggcaaaccggtcaaatggacattcaattttgagcaagggggagagaagggtttaaaaggcaattcaaccgccgcgcggctgtcgcgcgtgctcggggatcgctggcgcggcttggccgacgaagacaagtgccgcttggtggacgagattctgtcgtttgagtcggaggaggtgctcgtccgccgcctggtgcgcggatggggcttcccggcgccggtcgcgcgtgaagtggcggacctgcacttcgaacaaggatacgggtctctgtcgaggaaggcgatccgggcactgttgccgtacctgcgacgcggcattccgtacgcaaccgcgcggaaagaggtttacggagaaggcactgccgccggagaaccggtcgatttcctgccggccaaccacaactgcaagctcctgcgcgatgtccggaacccggccgttaccagggcgctgagcgagttacggctcgtggtcaacgcgctggttcggaagtatggcaagcccgagtcggttcgtgtggaacttgcgcgtgagttgaagcagggtcgggatcgtcgaaagagaatcgccgatcagaatcgccgaaatgaggtcttgcgtctggatgccaaggccaggattctcgcagagatcgagcacgatgagcggctctgcactcgcgagaacatactcaaggtgcgtcttgccgaggagtgcaactggaggtgcccctattctggacgtacgattgccatggcggggcttgtcggggagcatccgcaattcgagatcgagcacatcatccccttcagccgttctttcgacaattccttcgcgaacaagacgctttgttatcacgaagagaaccgccgaaagggcaaccgcactcccttcgaagcctacggcaacacggatcgctggcaggaggtcctcgaccgggttggcgagtttcagggcgagcgcagactggttgcccgcaagctcgaactcttccagaaggagaagttggacgacgcggacgagttcattagccggcagcttaccgacacggcctacatgtcgcgattggcggccgactacctggggttgctctacggagggcgaattgacttgcagggaaggatgcggattcaggtttcgccggggcgcgtcacgtctcatctccgccgctgctggaacctgaactcgatcttgggattgccggacagcaaggatcgcagcgaccatcggcaccacgcaatcgacgcactggtggtggcactgacgggcgcacgcgaagtgcaattgctcagtcgggcagccgaggaggctgaagatttgaaccagcgcggactgttcgtgtcaagcgaccaaccttgggacggctttttgaacgatgtattctcggccgttgaggcgatcaacgtcagttcgcggatctcgcggaagttgaacggacagttgcacgacgcgacgatcctctcgccgcccaaatcgcgtgtggacaagaagggcaagctgattgaggtttaccacgtgcgtaagaagctggaatcgcttaccaagcatatggtcgaagacatcgtcgatgatcgcgtgcgcgaattagtgcaggagaagctcggcctggtcggcgcggaaccggctaaggcgtttcaggataagaacaaccatccgtattttcgtactggggatggacgcattattcccattcacaaggtgcggattcgcaaatcggacagcccggttgcgatcggagcaggatcgaaacgcagatatgtcaacccgggagccaatcaccatttggccgtagtcgcgattcttgacgaagatggaaacgagaagtgctgggagtaccgcgttgcttcgcgtctcgaatccattgagcgaaaaacgcacggaggggaggtcatcccgcggccaaacggcaggcaggagcgtttcaagttctctctatctgggggggaatatgtgacgatgaaattcgatagtgaagtcgagcggctgtatcgcgtgacggtaatcacacaggctgaggttgaatttgtcttgcattccgacgctcgtccaattacagtacgaaagaaagaggggggccgcgttcgatgcgcgccgggaaggctaaaggaatgtggtgccaggaaggtcactgttgaccccttaggcaatatccttccagctaatgattgaccgaattgtggatatctcgcgattgccggcgcggctatcagtgcgtcagcggcaattggtgattgatcaggcgcccttcggtgaagtgacgatgccgctggccgacctggcggtggttgtggtttctcacccccaggtaacctacactcaggccgttttggcctgcctggttgagtcaggtggcgcgtttgtggcctgcaaccggcaatatctgcccgtggggttgctcctgcctctggcagctcattttgtacaggcggagcggttcgcggcccaagcgcgagctcctcggcctctccgcaagcgtctttggcggcaggttgtgcggggaaagatccgttcgcaggcgcggacgcttcaaaccctttacggatcggacttcggcctactggcccttgttcctcaggttcgctcaggcgacccaagcaacgtggaggcgcgggcggcgcggcgttattggccgcagttgtttcgcgacgtggcgttccgccgcaaccccgacaatgaagatcagaatctactgctgaactacggttacgcggtgttgcgcgcgatcgttgcgcgggcaatctgtgctgccggcttgcacccttcgctgggcattcatcaccacaaccgctacaacgctttctgcctggccgacgacctgatggaaccctttcgcccagtggtcgatctggccgtggtcgagtacctcagcgagcacgacgagcccgttggcgtggaatccgcggccaagaaccatctgattgaacggcttaccggccgctaccagatcgacggcgcgcagcgcagcgtgttcgatacaacggcgcgcttggcaggttcgctggccgacgcgttcctggcaggttcgggcgacctgtcgcttccgcagtggagcggtttgcggccagcggagcagcgggttgaggaagagggggccgagaaagaataggcaagggactcgcgaagttgtcacagtggaatcaaccagtcaatgccacggcaagaattcgctctctcaggatatcgcgggatgtggctttttgcgatgtttgacttgccggttcgcacgaaatcggagcgcaagcgttacgcgaagtttcgcaaggtgctggtgcaagacggtttctctatgctccaattctccgtctacgcgaggtattgcgccagcgaagagtcggcggtggcgcaccgaaaacgggttcgcgcggcgctgccgcccgaagggcatgttcggctgttgggggtcacggaccgtcagttcggaaaaatggagaattacgttggaaaaaagccagttctgtgcgaaaaagcccccgcacagctttcacttttttgagcaaaactgtgtcgtaagtcgttttccagtggtggtttgcgagggaacgagtgtatccgagcggcgattcc

SEQ ID NO: 3924 - DNA, 13565 bp, synthetic construct
  misc_feature 1..13565: note = Synthetic
  source 1..13565: mol_type = other DNA
gacgtcgagtcgttggtcgaggagtggatcgccctcgcgccgaggacgttcgacttcgatttgggcgcaagcgacgccgccttcgcgctttggatggaggaggacgtttgggaataggtcgacttcggcgtgtatgtttatcgagtgaggaaagcccgcgccgtcccgccgtagatgggtcaagtcgtcaggcttcagactgcagatcaggtgtaatatatatactataatcggttcgacgcgcggagctttgccggaaacgctcggtgacgcggctgttcttcttgatattcctgaatatattacgcctgatacgaaaataatcccgacggaatctgaagttgaaccgcaggacgacgcgattattcaggtgtgggacgacgacgttctgaagcggcggacgaattctgggcaagagcggaagaacctggcgtcgcgatgaacgccccttcgatcttcatgatgcttcgaggcgtggacgccgatcttgcgaattcttttttagaacgcctcgttaaaacgtttgaaaagggaaccgacctccagaagaacattgcaaagaagttagtcggtctgaatcgctataacgaacttgtcgggaacgaattgaaagtcgaaggactttacctcgacggggaagaaatcgattgggattcctatcgcggcaaggtcattttggtcggcgtatgggcgacgtgggcgcaaccgaaccgagacgaaatctcgaacgttcaagcgctctatgaaaaatatcacgacgcaggcttcgacgtcctcggatactgcgtcgactccgacgtcgacgcgctcaaaaaattcgtcgaggagcgcaaaatcccgcggaaaaccgcgtcggaagccctttccgtccaggctaaggaaaacggcggtaaggaatacgaatcgctaagttcttactacggtttcaacgggggtacgggcatgcttctcgtcggcaaagacggcaaggttatcgagaagcacgtccccggcgatcgcctgcaagagttccttgaagagcagttccctgacgttaaataacgcggtttccgtacccgtttgatagcgaaacgccgtttggaattgacttttccagacggcgttttttgtcgaaataacggcgaagcgagcggttaaaattttatcgcgcggcttgacctgcggttcggcgaggcgactcgggctacgccttcgcgataaaaacgcaaggggtaatcgttggaactcggcaagcgaccaatgagagcgactatatgtcaaccgcgcggcagcgcgaaccgggatgaaacgcacgagcgtttccgaacgttggataaaaaaagccgatttcgcttgggctacgaaatcggcggatcgcgacgttaaggggaagggcgcgattgaaaatagcgaatgaaatcgtgcgacgcgacaattagaagcgttgcatgaattcgactccgtgtccgtcggcttcgacgaaggcgcatttgagacccggtccggcgacgaaaggttcgacgatgactttatagccctccatcgccttttcgaggtcgtcgcattcataagcgacgtgcgcggtcgtttgaagaatttccgggaagggactgtcgtcgtcgaaattgagccattcgacggcgaacgggtggtcgttgaagtcgttaatgtgaacttttgcgccttcgaggtaaatcgggagttcgcgatctttcgtcggaatgccgatgtggctgaaacggagacccggtttaagcatgacgatgatccttactattcgacgcgtattcttgcgcggaaaggcgggcgccgcgcgtcgaatcgcggcgtcgccttggtgttacgacagaaagtaccgacgattacggatgcgcgccggggaacgtgaatttgagaccgtccatgctgtgatagcacgcgtattcggtaacgatcgcgccttcggagccggccatcatgaagtgcggcgcttcgagtttgccgagacgatcttggtcgccgacggtcatatatttatagttgaagcagttgatcgcgttcgcttcgagctggctcttcgggagcatagcgaggacttgcggggtcttttcaccgccttcggagaagttatagatggagccgtggcggacttgccaggattcgtgcttcgcgggtagtccttcggcggccaagtggcggtgttccgggatcatttgaccggggagaagatagatgtcgtgcccgaaataacggaattctttgtcgttgaagaagaagattccggccataccgacgttggcgaaatcgccgataccgaaatcggcgacccagaaatccttattggaacggagcgagtcggcgagagaataattcatctcggcgaacatttcgtagtaggcttcgaaggcgcgatcttgttggaagacgccgtccttgtaaaaataatcgttgtcgtattttttcatcgagtttcctctggcttgcgttggtgttgacgatgttttagcgtccgcagcgttcgcggcgccgaacgactcgagtagtccgacgctagcgacgcttccaacgaccgcttttaaaagatctcttcgttgcatgagcaattctcctaattcgcattctcggcgtaacggcgcggagtcgcgcgtcgagaaggaggtcttgaacgcgccgcgccggttgacgaacgacatttcgcactttatattgggacgtcggaacgagccgttgaacggctcggcgcgttgcgttttgaacaagtatattggtttcaaaaggcgcgcgcaagtcaattttatgatttcattcctttttttgataatttaatctcgcggcgagcgtcgcgaaccaatggagtcgattgtgccagcaagagcaaagaacggcggcgagctcgacgcgctgacccttgaagcgcgcggcgacggcgtgattctgccggttaaagcgcagccaggcgcgggtaaaaacgagcttcgcggtctacaggacggggcgctgaaagtctgcgttacccaaattccggagaaagggaaggcgaataaggcgattatcgaggcgctcgcgaaattcctcaagttgcggaaatcgcagattgagctgatctccggcgacgtcgcggcgcaaaagaaatttctcatttccgagatcgacgtcgattcgttgcgcgagaaaatcgcgagcgcgttgcgatagcttctccacggttcgcgttttttcgctataattgttacagttggattaaaacgttgaaaatgggaaaaatagaaaatttgtttggagcttgtgtcttttcattgcgataaaggctgttataatcgtcattgatcggcgtcggttcgatcacgcgtcgcgtttccgttgagatcgccgtgcgattggcggaagagatcgtagaatagcaagcgttgcgacgtcgcggagtttactaggagttttaggaatgaaaaagttgactatatcggcgtgcgcgcttctattggctggcgtcgcgccttttttaggcgcatgcaacgattcgacgccccagccgggcgttcggttcttctataagatggacaaactcgatcccgccgcgctcgattcctccgatcagacgatggagcagcctgtcgcggaagaggagaatattgaagagtatgttaagcgctacgacgcgaacgccgcgagtcgccaggctcgaccgaccgttgccgctcgacctgccgcgccgaagccggccgcgccgaaactcgatccgcccctcgcctccgccgaagatatcgccgccgccaaagcgcgcgtcgaagaactgcgaggaaagtgcgttaccgcgaaaaacggcgccattaccggcattaccgtcgactccgatcagaccacactcgaagatatgaagctcttcgggcgactcgccgatctcgagagcttcttcttcctcggctccacctttaccgacgaaatgctccaagagcttaaagacctcaaaaaggtcaagagcgctacggttcagaacgccgatattaccgtcgaaacgttgaaaatgttcgcgacctatcccgagcttcagaccctcgacattcgccgcgatctcaaaattgagaacggcgacctcgccgtgatcgccgagttcccgaaactcgaacgactcaacgcatactacaactcgttcacaaacagcggcgtcaataagatttcgaaatcccagaccctgaaggtcgtcgacctccgcggttgcgccgatatttccgactccgccgcgaagtatctcgcgagaatgccggaactcgaagaagtctatttccgattcggcgtctccgacgacggcgttaagaacctcgccgccgctccgaaactcaagttcgtcgaattccaagactgcgacattaccaacgcctgcgttgaatccctcgccgaattccccgcccttaaaggactccgcgtcttccgtagcaaaggctttacgaacgaaggtattcaagcgctcgcaagcctgaagctcgaacgactcgaactgcgcgacctgagcgcttccgacgaaggcgtcgccgcgcttcaagcgatggattccctccgcgaagtcgaactctccgaaatggcgatctcgaccgaggcgcttaacgctctcttcacttccccgaactgggcgaacgtcgagaccctcaacctcttcgccgtcccggttaccgacgacaacgtcgccgcgatcgcgaataatatgaagaacctcaagaacctccgtgttcgcgcttccggcggtaagaactccgacgccacgatcgattccattacgaagatcgactccctcgtctccctcgacattcgtgagaacaccggtatttccgccgccgctttcatgaagctcgcctccatgaagaacctgcgcaaaatctacgttaaggacaccaagttcggcgaatccggcgacgacgtcgtgaaaatgcgcgaagagttcaaaaagcaaaatcccaagtgccaaatcgttaccgaaggctagggaaacgcttgtcgtttcatccacgcttacggaagcgcgcgatcggttcggttatcgcccctgctggtcgcgcgtcggctcgcaatgtttaatagcaacgttcgattgccttataacgattgattcatggttgattcgttatgaaaacgggacgacgcagacttttgcgtcgtcccgttttttttgtaaatacggatttgtattgacgatcctgatcgattgttagacgccgttttaattcattatctaaaagatcccccggagtttcaaagcgtattcctcattccttaatagcgcgtcgacggtctcatcgtcaacataaaggattttggcgatttcttccctcgaatatccgcaactcgacaatcgctttgccgaatatttgaacgcaaattcataggttactttgtatttctgattgaaaccgctttcgtatgctttttgggattctttatcaaggtacgctttggcttcctccatgaaccccgacaagaagccctcatggtaaccatcgcggctgattatcagtaaacgcgttccagactcgcgacggatgtaatcttcgacgctcttttcatacttttgatttttctccttatttacccagtcatggatcgtttcccgttcctcatcaaggatccgggagatttcaacgtttgacagcccataccgggacatgcgttgcgccgcgatagccagccctttttcaaaacctatcgcaataccgcatcggcgtccttggcgataccaattgttttcttgacgttcgcggacttcattttgtgattcttccatagcggctttctccttgaattggactctgtgcgacaatgaacttgacagacgcaattcgatgaattctgtggcgcttacgatcgagcgccgcgatcgagcgttggttagtctaagaaatcgccttctttgaggagtcttgggacgtactcttcggtcatatagctaatacttcggctaacgagggcttcgacttcgagcttgaatccgttggtaagcatgtcgtcgatttccctctgccaatctttcttatggacgaaccaggggtattctgcgatctgtttggcgcgtttgcgatcgacgtcggagagtgagattttcacgccttccgagagtccgcaacgtgcgaaatcgcgacttcgcagcccaatgaactttgcttccggggtcgccatgcgttccgattcgtacgcgaggttgatcgacccttgcttgacgacggaatagatatagtatccccaagggtcgttatcgaggagacagtagatcgggagaccgagttcgttgtggaggcgattgagtagtcgtcgaacgccgcgaggaggctgaccgttgccgtgcgttaaaacgcagttgtgtttcttccagaatttatcttcgttgaaacgttgccagaccgtgttcttttcgacgtgtaggacgaatttcgctttgcactctttgaactgaatgacggagggttccacaatggagggaatcgcgtagccgccggagcccatccgcgagcagtcgatttcgtctccggagtcgacgatcgttatattgccgaccatatcgccgcgtttatcggcgaagaggtggagttcttcgcgcagcgcttcgagcaggacctcgcagtcttcgataatcgggtcgcattcgccttggtcgtgaaaggttggttctttcgtcgatttaatatcgtgcttgagcatgtagtagagaccgcggatgctcgtcgttttacccatttcaatgagacgtttcgctccggcggcgacgagcgtcgtctgcataaagcttttcgcttgcgacaggttgaagagttcgcgatttgtcgttttcgcccccatttgcaagacgcgtttttcctcgttgaaggagacgtttccgagtgatcgcgcgggaatagcgaagatcggttcggagtctttttcggcgcattcgacgatcgattccgcaagttgatagatacgctcgagggtgcgttcgtcctggcgcgataagatcgcgtcgccgcgctcttcggcgagcgggtcgggtcgtttcgaagactttcgtgatttagccatcggcgttgccttaggtgattgtcgattatgagggggtgaatgaagcgtcgcgcgtcgcgacaaccgttttatagggcattatacggcaagacgtggaaaaatccaacggacttttgaggtaaaagatcgaagttttgtggctgtcgcgatctttttgaaaaaattttgcgatttttgggtcgttttctcgcgaattttattgatttgcgccgctggaaagggtaatatgtggacgttcacacgatttatcgctcgcaaagtaaattgtgtcgacgaggcggtcgcgaccgatcggcgagcttttgcgcgagcgcaaacgaataattcaggagttgatcaggatatgaaacgacgcgattttctgaaatcgaccggcgtcattggcgcaggcgttcttggcggtatgagcgtaacgcgcggcgcgcacgcggcgggtagcgatcttattaaactggcgctcgtcggatgcggcggtcgcggacgcggcgcgttgcaacagcgcttggaagttggcgacaacgtgaaagtcgtcgcgatcgccgacgcctttgaaggcgccgccaagagcacggcgaacgcgtataaagagatggacgacgaccgttacgatctcaaagacggcgtctttttcggtctcgacgcttataagaaggcgatcgacgcttgcgattccgtaattatcgcgaccgcgccggggttccgcccgattcactttacgtacgcggttgaaaaaggaaagcacgtcttcatggaaaagccgtgcgccgtcgacgctcgcggatataagatggcgatcgccgccgcgaagaaagcggacgagaagaacctcaaggtcgtatgcggctatcagcgccactatcagaacccgtacatcggcatggtcgagcaggtcaaagccggtaaaatcggtcgactcatgtatagccgcgtctactggaacgacggcggcatctgggaacgtccgcgtcagaagggcgaaacggaaatgacgtaccaaatgcgcaactggtaccatttcaactggctctgcggcgacaatattatcgagcaacactgccacaatatcgacgtcgggaactgggttcacagcctcggcaatccgtttggcgaaaacgcgcacccgattcgttgcaacgcgatgggcggtcgtcaagtccgcaagttcccgcgctttaaggaatcgggtcatcgtttcgaccacttcttctgcgaattcacctttgccgacgggtcgcaaatgttcagccaatgccgacactccggcaactgctggaacaacgtgagcgagaccttctacggcacggacggtacctgcggcgccggttgggtcaacaatacgaagggcgaatctctctggcgcttcgaaggcgagaacccggatccgtacaagaacgaacacgttcaacatgcgaagtacgtccgcgaagatatcgcgcacaacgacgcgtggtacgccgcgcactcgtcgatgacgtccgtgctcggtcgttacgccgcgtactccggtaaagaaatctcctggaacgacgccgtcgaaaagggccgcgacgaattcccgtacgatctcgtcgcggaactcgaagcgaacgatccgacgaaattctgggacgctctcccgccggtccttcccgataccgagccgccggcacagcccgccgaaggcgagttcatctacgagaactccgttcccattccgggcgaatggaaatgggacgcgtaatcgcgccgtttcagcccgcctagcctcgcccgcctcgcctgtaaagcgcgagcgcgcgcaggcgcgattcgataacgacggacgtcgagcctattggttcggcgcccgttttttttttcttgccaagtagggaaatcgcgaaaagctgcggaacgcgcgagggcgaggcgaaaagacggcaaggaaggggaaggaaaaggtgaaaggcaaggtaagagaggcgagaggtggaggaagcgtcaagaaataaaaaaagggctcaatattcagtcgcctgaaatgatgagcccgagggatgtacgttttatcgctaaaacggacggcaacccctcaaaagggattgcgccctccgcaggatgaccacttactgaaacaagtaaggaatccttgttatggtacaggcgtgattgtatcacagattcgcgattgatcaagagcaaaaaagttttttctggaaatttctccgggacggttcatttctctcgccgagtttccctggagcgacgccggcgagttctccggaacgacgcctcgccaagcgcgcgccgagcgtgaaaaacgtccgttttgtacccggtagaaaggacggaatcagggcggtctgaaatcttcaaaatcgtttctaactcgacgaaatataacgagttgggaaaatacccgttcttgtttggcgcgttgcggagctgttcggaacttattgtttatcaacgaattgaacgaagacgcaacgcgcggatattgcgaaacgctcgttgtcgcacggtttaacgacagacgacgtattccggtgtgcgacgcgttcggactgccgttttgatgaaccgcgcctccctcggtcgacgcattttaacgcgccgactatgatcaactctattaacgagcgcgcataatggaacgttggacgtcgaccgttttttgcgaaaaaagaacgaggcgtcgagacggattttcccgatgatcatgggataaaaatcaagaaatatacaaaagcgacgggtcttagaccttgcaaccgtcgcttggcggttataatggaaataattagaaagcgcgcggacgcggcggcgttcgtcgcgcgacagtaagaaacctcgtcgtctttgccttaaagacggcttttagcagaaagaggagacgttttaatggcaaaagcgcaatttcgtcatgaagcatttaaaaacgggtaccgtttgggacttgaccttggttcgacgtcggtcggttgggcggtgattccggcgaacgacgaggacatttcggaggagacgctcattctcggttcgcacattttcgacgcgggggtcgatccgaaggagaagaagtcgcggaatctggagcgtcgcgcggcgcgtcagaggcggcgcatggcgtggcgtcggagtcgtcgtaagttgaatctgtatcgcgcgcttgtcgaaggcgggttctttccgcaggaggagggcgcgacggtcgaggagcgtcgggcgagtcggcacaattacctcatggcgctcgacgccgggctgatacggaaattcggcggcggtcgggatcgaattgcggcgcagacgtatctctatcgacttcgcagggcggcgctcgacgaggagctgacgttggaagaggtcgggcgcgttctcttttcgttgggtcagcgtcgcggctttttgagcaatcgcaagacggcggcgtcggaagaaggcgacgacaaagacgaagggaaggtgaaaggggacatttcgcaacttggtcaggcgatggcggagtcaggcgcgcgaacgttaggggagttcttcgccgggcttgatcctgaggagcttgggagtcggattcgcaagcgttatacgggtcgggcgatgtacctcagcgagttcgagcaggtttgggcggcgcaggcggcgttccatccggaggtcatgtcgggcgaggctggggagcgtcttaagaagcgaatttaccgcgagattttccatcagcgaccgttgaagagtcagcgtggtcgggtggcgttatgcagtttggagacgcattacgtcggtgggaaggcgaggggaccgcgcgtcgcgtcgaaggcggatccgctttttcaggaataccgttattggcagaagataatcgatatggcggtttacgatcctcgccaggacgagtacggcgaggggaagattggctggcgatcgttgacgcgcgaggagcaggacgttgtcgcggaactttgcgcgaatcaggagaaggcgacctttacggcgattcgtaaggcgttggagacggcgtttccggacgtttggaaatacaagccgaagacgtcgaaggacgccgacccgagcgagaaggcggataagaagctctattggaagttcaatttggagttcgacggcggggacaaaggacttcatggggcggtaacgcgggcgaaggtgcgcaaggcgctcggggaatttagcgcggagacgtcgacggagacggtcgacgagatcgcggcggcgattcggttctttgagaaggacgagccgctgaaaaagaaacttcgcgcgctgaagccgaacctgacggacgaggtcgtgaaggcgctcgttgcggttacgttgccttccgattacgcgtcgttgtcgcacaaggcggcggggaggcttctggaatacatgaagagcgagcgcgttcccgtcatgacggcgcgaaagatgatttacagtctgacgattcaagagaccgcgcaaagtcggcgcgccgaatatctcgaaccggtcgagaaagccttaggggacgtgcgcaacccgacggtaacgcgggcgctcacggaaacgcgcaaggttgtgaacgcgattcttcgcgcctttggcgggcgcaagccagagtacgttcgcgtcgaacttgcgcgcgacctaaagctcagtcagaagaaactcgacgaactcaaaaagcggaatgaagagcgaaagaagatccgagagaagagccgcgaagatctccgtgaaattttccggaatttgaatattacgagcgagccgacgaatcgcgatattctgaaatacgaactgtgggaagagtgcggacacatttgcccgtacaccttcaagaagatttcggagcgggcgcttttcggggatcagccggagttcgatatagagcacattattccgttcagtcgatccctcgacgattcctttgcgaataaaacgctttgcgaagcgtcggagaatcgggacgtcaagaagaatcagacgccttacgaagcgtacggccaagaccccgaaaagtgggaggcgatgaagcggcacgctcgacaatatttcgttcgcaatggcaaaacgacgcgcaaatacgagctctttacctgcgaagacgcgaaggagatcgagggcatgccgcagtcgttgctcaacgacacgcgttatatttctcgcctggcgacggaatatctggcgacgctttacggcgcggacgcgacgggagtcgaggcgaacccggacggcgagaaggggaataagcgggttcgcgcctcgaacggttccgttacggcgtggatgcgacgcgagtgggatttgaatatcgtactcgctcgcctcgcggagaatctcggcgtctttacgagtcgcgacgacagcgcggaggcgcgggaaacgaaatcgcgcgtcgatcatcggcaccacgccctcgacgccttaatggtcgccttaacgaacgacgggctgatttcgcaattgagtcgatcggcggcggagcaggacgccttcgtcgcgcctggcggtcgggacaagtcgagccgcctcttcgcacgaaatttccctgagcctgtcccggatttcggcggctacgacggtatcgtctaccgcgttctctcgaaggtgatcgtttcgaatcgcgtcgatcgcaaagttagcggttccctgcacgacgagtcgatctactcgcctaagacggcggcgggagataatggtaagcgcgcctttagaaagcctgtcgcgagcatgagcgaaggcgaagttcaagcgattattgatccggtcgttcgcgaagccgttttgcagaagatcgaagacgtcggcggtataaaaaagatcgccctcctcgcagataatccgcctcgacttcctggaaagaacggagcgcccggccccgcgataaagaaagcgcgcttctggaaaagtgtgaaaacgattcgaattggcggcaattcgagacgggaagtttcgactgaacgattcgttgcccctggttcaaatcaccatatagaagtctatgccgttttggatcctgtttccggagaagaaattaaatggaatggtgaattagtaacgcttatcgaagcatatcgtcgagtcagagataacgagcctgttgtccggcacgattttggacctaacacccgctttaaattttcacttagcaaaggcgaggctttcaaaatcaacggttcaaacgatatttatatcgttcgcagtatatcgcaggagaagacgggcgcccctcgtcttgattcgacgaaaaatactgacacccgaagtcctggcgaggtcaaaaatactgaaaacaatcagcttcgtcttcgaccgtttacaactggattactcaagatgggatttgtgaagatccgcatagacgtactcggagaagtttctcctgcaaacgactaacgcccttagcgagaacgcgcggcgaagctttacacacaatgttttgcccgcgcgttctcttagaaacatatgatttcatgccgcgtcaagagaacgccatatcgggatacgtaacgatgtattcggtcgtcatgttcgacttgcctgtgaaggagaaagaggaaaggaagatagcgtgtcaatttcgcaaattcctcctcgacgtcgggtatcacatgcaccagaagtcggtt

SEQ ID NO: 3925 - DNA, 24431 bp, synthetic construct
  misc_feature 1..24431: note = Synthetic
  source 1..24431: mol_type = other DNA
tcgaggattacaaagcttccaatggcaaagagccggcgctgctggtccttaaaaaccacgggatctttattgccgctgacagcgccgacgaaattcaggcgcactatgctcgcgtaatggacgcgctcaatgcggcctacgctgacgccggaattttccaaaccctggaaatttccgatgcggttgtctccacggagaccgaagaaaaaattaaagagctgtttggtgcagacggagcgttcatcgcctcgtccggtcggtttgcggtcgctccggggccgatcactccggatcatctggtctacgcaaaagcctttccgttcactgccgagctgaccgccgagaacgtggcggcctatcaggcagaacgcggttacctgccgaaagttgtcatgaccggtgactgcgtctgcggcatcggcacttcgcagaaaaacgccgacctggcgctggaactggcgcaggatggtgctctcgttctgaagctggccgaggccttcggcggcattgaatatatgacggatgccgcccgcgaatttatcgaaaactgggaagtggaatcctaccgccagaagcaggccggttagtcgatgatgagtgataaaaaattcgaaaagaactctgttatcgatacgtaaagatcgatatgtttgtcgctcaatttcactaacagaggaaaatcatgaaatacgaatacttgcatccaagagacgaactggcggtaacgctggaacgtatttacaattataaaatgacgacgacgtcgggcggaaacctgtccattatcgacgaaaacggcgatatctggattacaccggcccgggttgataaaggacagttgactccgcaggatattgtttgcgtccgtaaggacggcacgatcgacggtctccatccgccgtcatcggagtttccgttccataaagccgtgtacgaagcccgtccggatatccgttcggttgtgcatgcgcatccgatgtctctggtggcgttcagctgtgcgcacaaggttccggaaaccaaagcctacccgaccgcatggaacagcaacggcgttgtcgggttcgccccgtacggtgtgccgggcagtgaggacctcggcgccaaaatcgccgaagagttcaaaaaaggctatgacagcgtcattctggaaaaccatggtgtctgctgcggcggaaccagccttcaggatgcgttccagcgctttgaatcgctcgaagtctgtgccaaagctcatattaaagccggcgttatcggcactccgaaggagctgaccgaagaacagatccagatgcagtccaaaagctactacaagctggaagcgtttgaatacgacaccgatatgatgtgcattaaagaaaaggaactgcgctgcgaactggccaagtttgtgaagcgcggttaccgtcagcgtctgctcagcggtactaccggaagcttttcggcccgcatcgacaaagactcgttcctgatcactccgtacccgctcgaccgctatacgattgagccggaagatctggtgatgattcgcaagaacaaaaaacagatcggcaaaaagccgagccgtgcgctgcacgcacatcgtgcgatttatgaagcaaatcccgaggtgaactgcattatcaacgcctcaccggtcaacgctttggcgttcagtatctgtggagaaaagattgatacctacaccattccggaaagctatgtgtttgtcggtgatgtcagcctgctgccgtttgaagccagcttcaacgactttgacacgctcaccaaaacgcttacgctcaaaacaccggctgcggtgctgtccaacaacggcgtaatggtggttggcaaagatcctctttcagcctttgataagcttgaagtgcttgagtgctcggccgaagcgatcattgacagccagccgatcgggggacatgtttccatgtctcaggagattatcgacgagctgtgcgaagcctttaatctttaattgccgcacagtgtttctgaggagccccgtcatttggcggggcttttcgttttacgaacctggcggaagcgcgaccttttgatgttctggggacaggcactgttcgtgccccttggtggttaatcgtgcttcgtgatctttggtgtcggtccatggtttcttttgtcatcagtcgcacaaaaaagctctcgcgtttccgcgagagctttttgttcaggttcagattgtttggccgctttatttgattttatacagcgcggtttcatcaatcctggggcgggcgaggccttcttctcgggcgactttttcgaccgcatcagcgacggcatcggcgacgccttcgtcgaagacggacggaatgatgtattcctcgcacagcttgtcggccggaatcaggtcggcgatggcgtgagccgcggccactttcatgccttcgctgatactctttgcgcggcagcgcagggcgcccttgaagatgccggggaagcagagcacgttgttgatctggttcgggtagtccgagcggccggttgccataatgcgggcctgaggcagcgcttcttcgggcatgatttccggaatcgggttggccattgcgaaaatgatgggatctttcgccatgtttttaacgtcttcggcggtgatgcatcccggtgcggaaacgccgaggaagagatcggcaccgtgcatggcttcgctgaggctgccggtgaagccttccgggttggtgtgttcggcaaaccattccttggcaaagttcattttttcggtgcggcccttgtaaatcgctccggtgcggtcaaagccgatcaggtttttaacgccggcttcgagcatgattttggagcaggcgaccccggcagagccaacgccgttgacgattactttgagctcttccatttttttgccggtaattttcagcgcgttgaacagcgcggccagcgaaacgacggcggttccatgctggtcatcgtggaagaccggaatatcgagttcggctttcaggcgctcttcaatttcgaagcagcgcggtgctgaaatatcctccaggttgatgccgccgaaggtcggagccagcagtttgaccgttttgatgatttcttccggatctttggtggcgaggcagatcgggaaggcgtcaacgccgccgaagcctttgaagagcatggcttttccttccatcaccggcatggcggcttccgggccgatgtcgccgagaccgagaaccgcggttccgtcggaaacaacggccaccatgttttttttgatggtcagcgcgtcggcgcgagtgacgtcttcgtgaattgccgagcagacgcgggcgacgccgggcgtgtaggcgattgacatcgctcccggcgcgtgcagatccagacggttaaacgtctcgatctttccaccgatgtgcgagcggaaggtgatttcgtctgcggaaatcaccgtggtgttttccgtgttttccagggtttggaaaatctgctgctggtgttcgctgtcgcggcagttgaccgtaaagccgtaggggctttcgatgccttgggatgcaacgcagacgccctcggcggtagcgatgatattttcaaggtcctgccgggagagagacgactctacacgcaggtcgatgctgaaactgggtgatggattgattttcatgggcgacatcctactgaacttgtttgttcgggcaagttcagatgtctccaaactttggaaccggctgcgtcagggcttgcttcttttttccaaaccttggaaactctccggtcttatgatcgattttattcaggtaaccaaacggtttggcacgcaggaagtgctggtggatgtgtcgttccgtatcaatgcgggtgagcacgtcgggattgtcggtcccaacggggccgggaaaagtaccgttttcgggctgatcagcggggaaacttctacggacagcggcgatgtaacgctgccgaagaatgtacggctgggtcatctgcatcagcagctgcattcctatgcacaaaccgactcactgatcgattatgcaaccgattctattcctgagctgaagaccattcatgcggaaattcatgaattggaacacaggctggaaaaagaaagtggaagcggacagatgctggagcggctcggcgagctgcagcacgaatatgagcatctcggtggttatgcaatgcgagcccgcgccgaggctgctctcagcgggctgggttttaaggaggccgagtttaataatccgttccagtcgttcagcgggggatggcagatgcgcgcggaactggtgcggacgttgatcgcccagcccgatgttctgatgctcgacgagccgtccaactacctcgacctgccggcggttgaatggctccagcgctttttgcggggcttcagcggcacgatgctgctgatttcgcatgaccgctatctgctcgagtcgctgacggaccggacgctggaaatccagggcggctccgcggtaaagtatgcgggtggctattcctattatgtgaaagagcgcgaacagcgccacttgcagcaggcggctgagtatcggaactatgtggagaaaaaggagcagctcgaaagtttcatcaaccgtttccgggcaaaatccacgaaagcggctcaggtgcagagccgggtgaagatgctggaaaaaatggacgcggtccggatgccgccgaagccgccgcaggcggcgaatttgcgcattgcgccgccgccgcgctgcggcgctcagatcatgcagctcgaaaacctcggcttttcctatgacggagaacgctggatttttcgcgatgtgaatctggacatccagaacgggcagaagattgcgattgtcgggtataacggcatgggaaaaaccacgctgctgcgcgtgattgccggaacgctacaggcgggcgaaggacggctgagagaaggacataaagtggtactcggctaccagtcgcaggactttgcagaaacgatgcctccggacaaaacagtgctgggtgttgtgcgtgacgccggcaacaatgtttccgaacgcgatgtgcgcggactgctcggttcgttcgggttcagcggtgattcggtggacaaacaggtcgcggtactgagcgggggcgaaaaaatccggctggcatttgcgcggatctttatcaatccgccgaactttctgctgctggacgagccgacgacccatttggatattcagggtcgcgagggactggagaaagccattcgggaatatcccggcacggtttgcctcgtcagccacgatgtatcctttgtgcgcggcgcggcggaccatattgttgaagttcgggacggctgtgtgtccagttttcccggcggctacgattattatctggagaagacagcggggcaggagacgatcgaaggtcggaagacgaaggtccaaagtcctgataacgtgcagccttcagctgccaatcccaaggcggcgcgcgccgagcgggcaaaaatgcgcgaggctcagaaggggctgcgcaggatggaggcggagatggagacgcttcaggccgcgcagcaggagctgcatcagcagatggcctccggcaatccggaacttgattatgccgtgctcaatatccagttgtccgaactgacccaaaaactgaccgctcttgaagcgcggtggctggaagaagccgaccggcttgaaggatgattcggctgtctgtaaggacaggcatctccggtattccggagagcctgtgtttatcagcttttagaacgataccgtgcagcagctgagcgcatcaatttttgcagcgacctgcttcatggtctcggcactggccggttcattggttttgaggatcgcaatggaacgctcgccggttttgtcgtgcgggttgcggacgtcatcaatgttgaggccggcttctgccatggcgccggcgatctggctgagaacgccgggtcggtcggagtaagtgaacagtgccagatgacctttcggctcgaaatagagcccgtcgaaatgtccgattcgggagatcatcaggtggccttctgcaaccgttccgcgcacgctgatgcggcgcaggttgtcgccgtccacgctggccatcagatcaacagtaatggcgcttccgtagcctttggcttcatcggtttcgcgggtggcgtaatcgattcccatctcttcgaggtagctgatggcggctttttcatccatggagcggtcgaactcttcgctgagcgcgcagaccaccggcacggagagccagtttccgaatttgcggagttcgccgtagaagctggtttcaattttgttgagtttggtttcttcgccgatcatcgcgcgggtgagcttggtgatggtgaaggcgaggtcggcgtaggcttcgtcgaggccttccggaatgtcgcggttaacgatgtaggaggtgacgcctttgctgtcgaagtcgatcagctgttcggccgagcggcgggcggcgttgtagttggcttcggcagtggaggctccgaggtgcggaagcataatgtcggcaatatcggttaccgttttatcgccttcggcatccttgggatagacgtcgttcaggaagcgcaggcctttttccgctttaatcgcgcgcagatcgtcttcgttgatgacgccggagcgggcgcagttaacgagtgtggctccgtctttcattacgctgaacaaatctttgttgatgagtccgcgagtatgttcgttttcagggatgtgcagggaaacgtagtcgctctgttcaaaaagctctgccagggggacaagtttcacgttcagacgatctgcggcttcttcagaaagaacaggatcgaaagccagcacggtgacgtcaaacccgcgcagtcgcttggcgaccagacgaccgatggcgccgagccccacgattccgatggttttaccggtgacctctttgcccatgaattttttcttttcccatttcccagcgcgggtggaggcatcgccgggaacaatgtggcgggcgtcggccagcatcagggcaatgacttcctcggccacagcattggcgttggcgccgggggtattcatcacatcaacgcctttggagcgtgcatgtttgatgtcaatcgtgttgtaaccggctccggcgcggatgaccactttcagagaggacagggcatcgatgatttcagccgtgaccttttcgctgcggacaaacaaggcatatgtatccgggttttgggcggccagcacgtcgagtccggcgctgtcgtcctgaacaacggtgtagtttccgtttgcttcgagcagttctttagccaccgggttgagcttggtcgggatcagtacttttttcataagagtctccataaatttatgaacaacgtagtccgccccggagggcgaatcaagcccaatcgctacttttgtatcgattgggccggggcggggtatctttgcgggaaacctcttccaaaaacgctacagacgggcgacttgcaaatcaagttcagacggttttatctttcgtgtcttgaccgttgacggggcgctcttctaatgtgctcccatgaaattattcaaacttttcctgatgccgctggcggtcgtgctttttgccggatgctccggctatcgggtgggcagcacccttccggaagatgttcagacggtcagtctacatgtggttaacaatacagatgaaccgtcgattgaagtggcggtcatgagagccctgcgggctgaaattcagatggacggacgcctgcagattcgctctgaaaatgaagccgataccgttttgaccgttacgctgaatcgttttcacctgactccgttggcattcgatcggcgacgcggctctcttgcccgcgaataccgtatggtgttgagcgcttcgtcggttctttcccggcaggccgatggagaggtcatcgtcgaaagcccggaactgctgggcgaatcggaatttgattacagcgctgatctgaccagtgccaaattcgctgcgctgccctcagctgccgacgatctggcccgcaaagcggtcagtctgattacaacggcatggtgatgcagtgccagaaattcacgtcaacgaaacaccgtttgcagtggatcaaaacacaacgctgttccgcctgcgcgatgcggtcaaaccggatgcggatattttgattctgaatggagcagtggcttccggtgacattcctttatctgaaggcgactgtgtttccctgatccggcgcggtgaagtgccgtccgaagacgaactcgaagcactgatggctgcgcggcacacgccgggcgttcaccaaaaggtcaaaaccgccacggtcgggattgccggactcggagggctgggttccgcgatcgcgacggcgctggcccgtgttggcatcggcaaattaattgtggccgacttcgatgttgtggagccgagcaatctcaaccgccagcactattttgtcgatcagatcggggtgcctaaaaccgaagccaccgtttccaaccttcggaaaatcaacccgtatgttgatgttgaggcgcattgcgtaaagcttatgccggagactgtttttccactgtttggagacgtcgatgtgatgatcgaggcctttgacggcgcggagcagaaagcgatgcttctgcaggcgtttacggccgctcgtccggacgttccgtttatcggtgcatccggcatggcggggtatgcgtccggcgagatgatcggtatcaaaaagctcgggccgaaactttatattgtcggcgatctggaaaccggagcgcgtcccggatgcggactgatggcgccgcgtgttggaattgccgcccatatgcaggcgaacctggccctgcgcctgatcgttgatggcatccggtgatgctatttcagcttttcattccacgcggcgatgcagtctttgatggatagtacatattgttcgttgcagaactggcactgcacggtcagcggttcattttttctgacgatttccattcgctcgggaatgggaagggtgcgtatcactgcgcccattttttctttattgcaggggcaggtgaaccggggttcgctgcattcctccatatagaaaccgccaaaggcgggttcgtccgccaccagaacggcggcggctttttcagggacggacacgttggcaagcaaatcccggaatgcgggatcttccatgcgggagcggatgcgatcgaaacgctccagatcgcagtcaggaagagcctgaaccatccagccctgacagatgctgaccggattttccgggtccgcattaaacccgatcattgcggacatgccggtttcgacctgatcactgatgcagtgataataggccagatctttaacggcatcctgcagcgacaccggtgcggtgccggagttgaggatttttccatccagagaaacaaccgtctggaggtcgccgagatccccatagagagctgtcatgtcttcaatttcgccgatctgtgccggcgaaataaaggcgcgcacggtgccgtcggccccggcatccgtcacgatggttttcagagctcctttgtatttccagcagacattcaggcgattgtcttccgggaggatcgctgcgctgagcagcgcgccggtcagggcccggcccagaatatgcgcggccaccggatcgcaattgtgccggattacgatgtcgttgacggtttgggttgtcagcgcacagctgaacgcaacatccagccccttgaagtgtcctttgtacagtcgatcgttcatagcggtatatggactcaaaaagcaaggtgcagggcaagcggaaaagaaaacccttcctgttaggaagatattgtcggttagttttttattttattaatagtaaagatttttgtttaacggactactttgtgtgtttatgctaaaagcttagttttgcgggtaataaaaaaccccgccgaagcggggtaaaggtctaggaccttcggcatatagccttattgtgaaaagacagttcttcattactttctctcacgaaggtgatgtttagattttagagacatagaagtcaatagaaagttgggagtcaaaaatgagtaagcgcattctgggcttggatttgggaacgaacagcattggttgggcggttgttgatgattttggtaatgggctgttcgaattggtgaaaaagggcgtccatgtttttccggaggcggtgaacgatgtcgcgcagggtggtgctcgaaaatcaaaggcggcagggcgacgtgaaaagcgaagtgcgcgtaagataaatgaccgacggcgcatcaggaagataaacacactgcgggttctggttaattacgggatgtgccccgggataaccgatgttgatttggatgtttggcagtatggtcggaaggcagaacaacagaaacggtataaggaatatcccaaagacaaggcttttctggattggcagaacaccaatgatctcagttccaaaaataagaataaggtgatgcggaacccttatctgttccggtttaatgcaattgaggggaagattaattgggataatgaaacagagcggaacaacttaggccgtgctttttatcatttggcgcaacgtcgcgggttcaagagcaacagtcttgatgcgggtgatgacgaatatgacgtgtttcatgcgactttgctgtcagagtttgagcgtgagcacgattcgtcggaagaggtttctgagattatcgaggaattggcgggtgacacaaagggcaaggtgagcaagctcaagaacaggctgctccgaattttaagaaatacctcggattttagtgctgcttatagtgagtgcatagctgtactggagaagccggagttccttgggaaggttcaaaagggaattcatgagttagatcagaagattgaaaaggcaaatgcgcgaactatcggggaatatttttatcagtgttatggggacggaacgaaaattcgaggccaatatactgatagggaaaagcactatgaagcggagttcgatgaaatttgccgggttcaggaaatagagggtgaactgaagcaaaagctttatgatgcgattttttatcagcgtccattgagatcgcagaaagggttggttgcaagttgttcgttagaatatcggttacctgcgtttagggatggcaagccgatatatcgagttgatgaaactgggaaatcggttcccattacatacagtaaaaaatgcgccccgttgtcccacccaatatttgaagagttccggatgtggagttttattaaccagataaaattcaagtctgctggtgatgcggagatggattttctttccgagaaccagaagaaagaaatagagcacctgttttttcgcaaatcaaagccctattttaaattttccgagatcgccggggttctttttggaaagaatgcaacagttgcgcgggtccgggatgaaaaggaccagcctgccgatttctatgtcaattatgcattggacacatcggtctcggggtgtcctgttttaagtcagttccgtaaggtctttggggcggattaccaaaacaggattgttgttacctataaagggaagtttaacaatgtaaaagggcgcaagaaaactgacagtgatattttgacggaagtttggggtgttctattttctcgggaagatccccaagagcggaaacgtcagttgttgaagagttggaatttttcagaggaagttgctgacgcattttcggagataaagctgacgaggggctattcttctcttagtgcgggagcgatgtgtaaaattgttcctctcctgaaagaaggcatgatttattcccatgccgttctcttcgcgaatattcctgctgttttgcgcggttctgatgtcgatgccaatgcggtaaaaaatattctttcagagaagttttgtgcgtattctgcttatcggaagcaagttgtagtggccaacgagttgatttctgattttgattcattggaggagttgaaggagtgcttcagggaggtgtctgattctcatgaaaaagtagcactgaaatttgtggccaaatttggcgcaaaagagtggtctgttttttcggatgaggaacaggctttgttttcccggaaggttgccgaattgataaagacgcaatggcgggttgaggcggacgaggggcgttgggtaaagctgatgcctctaaagagtgttttgcgtgaaatattagtcggagagtttggggtcacaaacgaacgagcatcgctgttgtatcatccttcagatgttcttaaacacaatccataccgaaaatcagaaacggtacgggcgggcaaactgattttggaaagcccgattgtttcttccataaagaatcctgtctttatgcgcacaatgcaccgccttcgtgctgtggttaatgctctgattcatgacgaaacagtttttcctgaaactgaaattcatattgaaatggcacgtgagctcaacaccgcaaacatgcgggctgttattgaggcagacaataaggcgagggaagagcgcaggaagaaatatgcccagattataaagaaccttatgaagaaggaggcgacagatgctgacctttttaaatttaaattgtgggaagagctgttgcccgatgattcagaaagggaatggttgaagtgtaatcaggagattgaacagaagacgctaaaatatgagctttgggaggatcagaaacggaaatgcccatacacagggcaaagcattggtttggctgattttctcggtaataaccctcgttttgaggtcgaacacatccttccgcgctctcgttcctatgacaattctgaagagaatctgactctctgctgtaagaaatataatcgtgaaataaagaaaagcaggattccttcggagtgcgacaatcatgaagaaattcttcctcggattgagcattggaaagagaggtgtgtagatctagagcgcgagataaagaaaaccgtttccgctgcacggaacgcggatccggaacgaaaagcaaaaataatccagaaacggcatcgcctgaaattggaacgcgatcatttcgcaaagaaatatgagcgttttacgatgaaagaggtgccgaacacgtttgcaaaccgccagcttaatgatacgcggattattactaaatatgcctgcttctatctgcagacgatttttaagaatgtgatgaccgtgaatggggcaacagtagcggagttgcgtaaacagtggggcttgcaactggcggaaaagaaatcgcgtgaaaagcatacgcatcattgcattgatgctctagtcatcgcctgtatgacgaagtatcaatacaaccaacttgcggagttctatacgcgcaaggaagatgaaaaatttgcgcgaggaagaaaggcgactctggttccgcagccttgggagagttttatacccagtgttaaacagttggagcaggaggttttggtttcgcacttttcatctaataatctgttaaagcaatccggcgtgttaccatcgcatattatgaagaaggtaaaggctggagcgacaaataatgatctgaagaaaaagcaaaccgcacgggcgcgattgcataaagatacgttctacgggcgcgttttgcatgaaggtgaagagatttccgttgtgcgcgttccattagtgagcagcaatgaagcgttgaagggttttaaaaatctacatgatttgaaagcaagagttgttgataggggtgttgcgaagcggattgggatcgtttctcgcttgttgatgaagaagtataagttgagtttttcagaggctcttaaggctaaaatctacatgaagaattcggcgattgatctaatcattaaggatagagttagaaagggatggggtcttccagaggcattgaatgagcccgtttttatcaacgggaagatgataatgccaattaagcgcgttcgttgtagggctgctactgtgaaggatcctcttgctgttaagagacaacgcgataaatccaaaaaatatgatcacccgcataaacagtatttttatgcggaaaatgccacggtttctgcagtaggtctttatgttggtgccggtggtgttgttcatgaagggtgtgaaggcctggaggcggtaaaaagtaagttggtgtttccggcaacaaaaaaggataaaaaagggcgtgtgtatgagtttgagcgtgccttgtttgttgatcaggttgtgctcttttgtaaaaaaagcgttaatgagttggctcagttgtctctcgaagaattgtcgatccgtttgtttaaaattaatgatctgtctaaaaatgagaccagaatggtgtttcggcaccatttagtttcgggaaaaaaaggcgacttagagttggaaaataagaagcatcgcggaaccaaatatccatcagaggctaactttgattcacccaaccctcttcagcgtatttcttacaacaatatgaatattgctgttgagggagttcatttcaacttgagtgttctcggcgagatcgaattcaagggagtgtaggcatgctaaagcgcacggtctgttttgaatcatcggcgcacctttcgtttaagaatgggcaactggtttatacgccgaaaccggagggcgaggtgcggacggttccggtggaggatattggttttgtggtgctggacaaccatagtattacattgtcgcttcgattgatcgaagagttgacggcgaacaatgccgcgattgttttttgcgataagctgcaccatccggcggcaatgagcgttccgtttgacggcaacacaactcatgccgaaacgcttgccgcacagctggagatgtctgaaccgctcaagaagcaattgtggaagcagacggttgaaatgaagattaagaatcaggccgccatgctggagcggacaggatccggcggagtggaggcgctgcgccggtatgccgctagtgtaaaaagcggcgatgccgacaaccgggaaggtgcggccgcccggatttattggcagaatctgtttggcgataattttcgcagggagcggttcggtggcgcgcccaatcatttgctcaattatgtctacgcgattctgcgtgcggcggttgcccggtcactggttgggtcggggctttatcccgctattgggattcatcatcacaataaatataacgcctatgccttggcggatgacgtgatggaaccgtatcggccttatgccgatgatatcgtttacaatatttggaaagaaaccgaagagccgattgaagaactcactcgggagcacaagcagcagttactcaagctgctggcctcagatgttcatctcacgaacaccttgcggcccctgatggttggtctgtcgaccacaaccgcctcgctggcgcgttgtgtcggtgggacgcaaaagaaagtggattatccggttatgaaggcggtgcaaaatgtcggaggtgcggcttaacgcgtataaaatcatgtggctgttcgtattttttgatttgccgacgaacacgaaaaaagagcgccataacgcttccgcgtttcgtaagcggttgatgaaagacggcttcaccatgatgcaatactcggtttatacccggcactgcgggagtaaagagagtgcggatgttcacaccaagcgggttaacagtatggttcccaagaaggggcaggtcagtattctgcgaattaccgacaagcaatacggcgacatcattaatttttggggagaggcgacaacgcctctccctccgaagccaagtcagctggaatttttctagatggacttggatttctttgatatttgataactgaaaaccggaagatcgcgatccacttcatgggtagctcgttcgtttttgcccgatatccaatgggtaaatgattgaaaacgagagggatatggggcctatgttgtggattgacagttcttcgagatgatttccaactaaaacaggatggcctacaagcattcttgggttgtggattgacagttcttcgagatgatttccaacggttcgccggtttcttgggccatattcagggttgtggattgacagttcttcgagatgatttccaacaatatccactggcatgagctgccggttgacgttgtggattgacagttcttcgagatgatttccaacaggactgttcaatcaccagttcaccggccggttgtggattgacagttcttcgagatgatttccaactgaggcatatgaacggagtaccggtaaagggttgtggattgacagttcttcgagatgatttccaacgcttgcgctgtttagcgcggcctgctttcggttgtggattgacagttcttcgagatgatttccaacccatgtcaggtttgcgatctctgtaaggcggttgtggattgacagttcttcgagatgatttccaactttgtttccaagacggtttgaatccatcctgttgtggattgacagttcttcgagatgatttccaacattcccaacaccaaaaagaacaatttccgggttgtggattgacagttcttcgagatgatttccaacgcaacggtccagacgttagagtaaccattagttgtggattgacagttcttcgagatgatttccaacgcatgtgctgtgtttaggtcatcgtttccagttgtggattgacagttcttcgagatgatttccaacgcgaactcgctgataaagagcctgaacagagttgtggattgacagttcttcgagatgatttccaacggtcaccggtgattcgttcggttgcgagacgttgtggattgacagttcttcgagatgatttccaactaaaacgccgtctttataattccgcgcccggttgtggattgacagttcttcgagatgatttccaaccggtggtggatttaatcagcgcatgggcaagttgtggattgacagttcttcgagatgatttccaaccctgagacttcagcgcggaaagctgctcgtcgttgtggattgacagttcttcgagatgatttccaacttttaccgtcctcgctatcggtgtggtactgttgtggattgacagttcttcgagatgatttccaacaggacctgtttcatcaatccaaacatccaggttgtggattgacagttcttcgagatgatttccaacggtgcggtattcgtggcgtcatatgtgtagttgtggattgacagttcttcgagatgatttccgccagtgaatcagtcggttttaaaattccgaatattccgggttctcaggaggcggtgggttttgtacattgcgcggatggataatacagatcagcttgggtttgattttctttcagtgccggcggacgggctggaaatgccgcacgatccgcaggagcgcggctatcagttttttgtaaaggaccgcgaagatgcgatggctcgcctgaaaaaacggttcaatgtgatgctcaatgagccggtgcgcctgaagctgttcgggtgggatcaggaatttaccggtaaactcaaactcaacaccctgctgattcccgaatcgaaaaaagatgatgttccgcttcggcttggccgggtgaagtttgacctgcgcgatatcgaatactgcttttgtacggaataaatttcggtgcattccgtagttttgttttcctgaggcgatccgtatcgtctctgcatgagttcagaacgaaaaagcggcattctgctgcacattacatctctgcctggaaaatggggtatgggagagctgggaccggaagcgcggaagttcggcgagttcctcgcggcctgcggccagaaactttggcagatccttcccgttaatccgatcggttacggctattccgcttattcctccagctcggcttttgccggcaatccgctgctgatcagttttgatgagctgatcgaagaggggctgctgaccaagcgccatctcagccgcttcccggagtttgatccgcataagatcgattttcctgcagtgatcgacgcgcgtgtgaagatcctgaacggcgtctgtgagcggttcgatgacagtgctgattttaaggcattttgtaaaaaagaatcctattggctggatgactacgctttgtttgtgacgattcgctcggctcagaatggtgcgccgtggacggactggccggaggcgctgcgcgatcgcgatgttcacaccctggaaaaatttggaaagcagcacgtcgaagaaatccgccggcacagggtgctgcagtatctttttgccagacattggaaaaagatgcgggagtttttccaaaccctggaaattgagatcatcggcgacgttccgattttcgtcgcggccgattcggcggatgtctgggcgcatcgtgagctgtttcagctgaataaggacggttcgtctttggtggtggcgggcgttcctccggattatttttcggagaccggtcagcgctggggcaatccactctacgactgggaggttcacagaaagacaaagtatgcgtggtggacagcgcggatgcggcgtacgtttgaactggtcgacaaggtgcggatcgatcatttccgcgggtttgagtcgtactgggagattcctgcgaaagagccgacagcgattcatggcgaatgggtgcaggggccgggcgtcggatttttccaaaccctggaatccaatttgcggaaagttccaatgtttggaaaaacattccagctcgcggagcatgtgatcgcggaggatctgggaatcattaccgatgcagtggacgagctgcgcgaggcgtgcgggtttccgggcatgacggtgctccagtttcggtttagtccggacgatatgcgcaaggacggataccgtccggaaggcgatgaggatcgcgtggtttacaccggaacgcatgataatgagacgacgcgcaaatggtttaaggcactggacgagaagacaagccatgaggttcgggtttatctgcatacgcacggggatcatattcaccgggacctagcagagctggcgatgcggtcgccggcgcgctgggcaatccttccgctgcaggatgtgctggggagggggcgacgtatgaatatgccgggcacgacaaccgggaattgggattggcgtgtgtcggaggatatgataacgacaggaattgctgagtttttaaaagagatgaccgagcggaacggtcggtaaaatcaaaggaggctgtgatggctgtaacagtgacgaatacggtggagcagatcatcgtgaagacggaagagtttgtcggagggggcggctggaattacttctggatgatcctgatcgttctgggtggttttattcttggcaggctgctgaaggtattgatggagaaggcagcttcgaaactgaacctgggagtcgacgctttccgaatggcctggctgtctctgatttcccggacgattatgtttcccactgccggactgggtatttgttttgccttgaaagtatgggtgctgccggagcagctcggcgggttgcgtgatgatgtggttggtgttctgctgactgttattgtcgcctatatcatctatcagggaattgagctggttaatttctggatgaaaaaactgacggcccaaacccacacgacgctcgatgacatgatggtgccgctggttcgcaaaacgctgcgtattctgacggtggttctcgggctggtgcaggttgcccagcagctcagtgataaaccgatcacatcgattcttgccgggctgggtgtcggcggtctggccgttgctctggcggcgcaggatacgattaaaaactttttcggttcgctggtgatttttgcggatcatccgtttcagctgggcgatcgcattgtggctaacggtgaagacggaatcgttgaggaagtcggcatgcgttcaacccgcattcgtacactcgacgggcatctggtgacggttccgaacggtgaactggcaaatatgatggttcgcaacatcagtaagcggccttacatcaagcgggttgccaacatcacgctgacttatgatacgccgcctgaaaaggtggaacgggccatggagattatccgggagtttctggatgcgcataatgaaaaaatgcatccggatatgccgaatcgcgtgtttttcaataacttcaacgactgttcgctgaacattctggtgatctactggtttgctccgccggactactgggcgttcatggaattcgaccagcagttcaacctggcggtgctgaagagttttaatgaagaaagtatcgatttcgcattcccgacccggacactgtatctggccggcgatccgtcacggccgctgaatatcggcagcgaccgttccgcctgaggaaagttcagtcaggtcggtcaggatccggagggcttcatccagaatggggtcctcttcttttttgtcttcgccgttatctgtttcgaccatgctgtcctgaaggttttccagttcctgttcagcaagaatctcatctactcgcttggacagcttcagcgaaacggtcggtgtttccattcgttcgcgcaggcgctcgcgacgggccatgaaggttctgaactccgggttgtctctcatccgttcctgggagcggatctgcagttcggggagcagcggcttgaccgaattgcgccatgggcggtagtaggcgctttgcacctgcgaccacggcagcgcattgggaagaaattcttcgccgatttccagcgagtcgaagagagagggaagcacgatgtccggagtgaccccgcgcaactgtgtggagccgccggcaatgcggtagaacccggcggtggtgactttcagagagcctaaatcatcgctcaggcgggacaggggcaatacggtctgtacggttcctttcccatgggttttgctgtctccaacaatgacggcgcggccgtaatcctgcagggctgcggcgacaatttcggaggccgatgcgctggtccggtttacaaggacgatcagggggcccgcatatacggtggttgggtcgccgtccggcaggaccgctacgccgcgctgttcacgcacctgcacgaccggtcccagaggaatgaactgcccggcaatgtcgattgcttctgtgagcgatccgccgccgtcgttgcgcaggtcaagaatgacaccgtcgacatcattggttgcaaactgattaaggatgttgcggacatcaactgagctgcggcgcacgtcatctttgccgtttcgggcgccggcgaagtcggcataaaattcaggaagggtgataacgccgaggcggacgggcagcgcattggttccgatgttgtcatacacctcgctttttgcggcctgttcttccagtttcacttcgtcgcggatcagggccagtttttttgtgcgggttccggtcttgtcttcagcgggaataatggtgaggaccacttctgttcctttttcgcctcggatgagccgtacggctttgctgagcggccagtacaaaatgctgacgggctcttctttgccctgtgctacggcaataatcttgtcgcccggcttgaggcggccgtcggcttccgcggggccgccgggaataattttggtgatttcggcggctccatcttcgctgcggagcattgcgccgatgccgaccagagagaggctcatatgaatgtcgaagtcttctacaccgcgcggagaaaggtaggcactgtgcgggtcgtagctttgtgtgaatgcgctgaggtagcgttccagaacggcttcttcatcaaaattgttctgaaccatcagctggaactgtttgtagcgttcgcgaatgaattcgtcgggttcgagcatttcgtcttcggtcaaattctcttcttccagatcttttgtgtcggctttttttgcttccggttccggaatttccttcatcgcgatgcgtccaacatactcgtttttaatttttttgcgccacagttcatcccatgccgcttcgcccttcggccacggtgcatcatcgcgtttccatcggtaggattcgtcaatggagaggtcgaagccttcgtcgagaagctggtttacgtaggcgacccggttggtgacgcgatctttaaaacggtcgacgatcagactcgagaacgatatgtcgccgttgcggacctgatcgtcgagctgggtggcactttgctgaaattcttcgatgtcggaggccagaaagtaagagtggtcaaaatcaaatgaatcgataaacagcatcagggcattggtggcaatcgaatcattgaacggcatcctgttcaggtgcgtgtgcgggagccggtctgctacccgggatgcaatccgtttgatcggcagcggtattttttccacgaccggggcggaggtgttctgttccggcttgttttcctccgcgcaggagcagagaagggccggaatcagcgggagcagaaggtagtgttttaaattgtacatataggaagaaattgtagcagaggcggggggcgaaacaagtttcgggttctgcgagtttacctgatttttgagtttgtgcttttcagacagcccgttatggtttttcgctcaatttaaaccggagaaattttatgaaactgattgaccgtcctgaatggaaagagctttccgatcattggaaagttattgaaccaatgcacttgcgcgaactgtttgccgacgacgaaaaacgtgcggaaaccttttcgatgaccgcctgtgatctgctgatcgactgttccaaaaaccgcgttactgcagaaaccatggaaaaactcgctgcgctggctgaagcctgcggcctgcgcgggaaaatcgaggccatgtttacgggggaaaaaatcaaccagacggaagatcgcgccgtattgcacacggcgctccgcgctccgcgcgaggcgcaggtgtttgtcgacggcgaggatgtgattcccggcgtgcacgaagtgctcgaccgtatggaggcgttttgcagtaaagtccgttccggcgagtggaagggatacactggaaaatcgatcaaaaacattgtgaacatcgggatcggcggatcggatctcggtccggtgatggcctacgaggcgctcaagccctacacgcagcgcgacctgaaggttctgtttgtttccaacgtggacggcacccatattgccgaggccgtacgcgatcttgatgccgaagaaacgctgttcatcgtggcttccaaaacgtttacgacacaggaaaccatgaccaacgcgcagagcgcaaaagcctgggctctggaaacgctcaaggacgaggcggctatcgccaggcattttgttgcggtatccaccaatgccgatgaagtttccaaattcggaatcgatactgtcaatatgttcggattctgggactgggtcggcggtcgctactcgctgacctccgcgatcggccttccggtgatgctcgccatcggcccggaaaacttccgcgcgatgctcagcggttatcacgccatggattcccatttccgcaccgcgccgttttccgaaaatgcgccggtcatcctcggcctgctcggaatctggtacaacaacttttttgatgcggccacccatgcgattctgccgtacgatcagtatctcagccattttgcagcctacttccagcagggggatatggagtccaacggcaaatatatcacacagaacggcgagcgcgtcgagtggcagaccggaccggtcatctggggggaacccggcaccaatggtcagcacgcgttctatcagctgatccaccagggcaccaaacttatcccgtgcgacttcatcggcttctgcaaatcgcagaacccggttggagaccaccacgtgaagctgatggccaatttctttgcccagaccgaagcgctcgccttcggtaaaaccaaagaggctctggaagcagagggaaccccgtcggagctgattccgcataagaccttcgaaggaaaccgcccgaccaacagcattatggccgaaaagctgacgccggaagtgcttggccagctgattgctctgtacgaacacaaaatctttgtgcagggcatgatctgggacatcttttctttcgaccagtggggcgtgcagctcggcaagatcctggcttcggccattctgccggagctcgaaagcgacagcgaactcgggcacgacagttcgacgaataaactgatcgaatactttcgtgccaataaataacgtgatcctggtttgatcaaagggcttcgtcggatttttccggcggagcttttttgtattcgcggcttcagttgggttcgggcatgatgtcccgatgctgatttgcgaaacaacattaacggtgctcgattttgaaacgaccggttctgtgccggggtttgatacggagccgtggcagatcggcgcggtggctctgaaaaacggacggattgcgccggacagcgcgttcgaaagcctgatccgggtggatgccaaccgtccgttcaatgcctatgctccgggtgatcatcacaagcggcgcgatgaaatcgcggcagctccggaagtttccagggtttggaaaaccatggagtcgcgggtcaccggtcggcctcttgtggcgcacaatgtggctgtagaga

SEQ ID NO: 3926 - DNA, 15474 bp, synthetic construct
  misc_feature 1..15474: note = Synthetic
  source 1..15474: mol_type = other DNA
gcgcgacgacaggagcagacaccggcctggccggtttcaaacgaggctggtcttcggggacccggatggccttcttctgcggaaagatctgcaatcagtcggattatcgggaactggttcgggccacccaaagtgaggaaacggacttcttccccgcctatcgcaaaggagagttctcttgactgaaaacaccgctccgcaacgtcgtgtgaattcgtcgtccagccctgtgccgcgctgtgtcgtcacgtcctcgtcgggcggcgccatcatcaacgagtgtctgaggtacccggcgttcaagtcgctcattcattcgatggtctgcgatcaaacgtgtggtgcggtggagaaggcccgagcgcacggcgtgcccgtggagatcttcgccgagcccgatggcgagaggttctgcgaccggctgctcgactaccttcaaacacacaggatcgactatgtgttctccttctacaccaagttctactccgagagaatccgccgggcctatgcagaccggctggtgaacctccacccctccctgctgcccgcgttcaaaggcaacgatgcatgggagtacgtgcgggtctatggggcacggttcgccggcagtacggtcgagctcatccatgagcgcatggacgaaggcaaaatcatcctccagacgatttgcccctgggatgcccgccatcctgcgcggttcacgcggcatcgggtcttcgttcaacagtgcaagtccctgctgcaggtcgcgagctggctcgtggaggatcgcatccgcacgaacggctgtcgcgtgacggtgcgcgacgctcgcttcgacagtctggaattctcgccggcgttggattgtcccgatgccatcggctttacatgtccgacgccgccgggctgcgaaggcagcacatgacggcggttcccggaaggcaacggccgaatccgacatcgcgcattttctttgacgggagttttcgcttgaccggccggctgggtgcgatgtaacctgaacgccgtcgtccatcatgcggatgtgccgcactttagttggctgatcttgtcggaggtgccgatcacgatcaggcggtcgccgggcgagagggactcgttcgggccgggcgaggggattcgctcttcgccccggcggatgccgacgaccgtgaccccgcaccgctggcggaattgcaggtccgccagggtcttgcccgaccacctcgaatcgctgaagacctcgatctcgaccatcacgaaacgcttcagtccatcttccgcctgacgatcctcggcctgattgatcaggctctctgcctttttcagcgcctgggcaggccccatcagaaccatgtggtcgctcgggtagatctggaaatcaggctcggggtcgtagtgcacgcgtccggcccgactgacggccaggacagagaccccggcctccgaccgcaaggggatgtgccgcagactctggccggcaaagagcgagccggacctgacccggatctcctggaaggcgaccggccaatccacgttctggggcaggatgtccgtcgcgtccatcaacgcatcggcgccctgctcggcggcatcggtgaacggacgcagtacaacgtgcgcccccgcctgccggtagagcaccgcttcttcgtggccggcggcggtcagcgccaccttcacatcgtgtccgcgatatcgcagcaagtgcagcaaagccaggttcacgtccttcgaccgcaccgtgctgaccacccagcggacccggttcatcggcaattgctcgtagagatcggggtcggccacgtcgccgtagagcaccgagacgccgcgggcgcgccacttctccagcgcctggggatcgaagtccacgccgatgatcttcatcttgcgttcgagcaatcgctcggccagaccgctgccgtagttgcccaggccgacgaggatcgcgtctgcgaccgtcgtttcggcggcggtgtcgctgctcgcctcgcggtaggggttcttccgctcgaagaccttcaacggcccggcaaggagctggtaaagattctgcgagtagaggatcatgtacgtggaggcgaagatcgtcacgaccccgacgagggtaatcaggcccatcgtctgcggttggatgtgcccgagcgtgacgccgagggccccgacgatcagcgagaactcgctgatctgggcaaccgtcaggccggcgagaaacgccgtgcgccggcgatatcccatgtagcccatgatggcgatgacgatcagagggttcccgatgaggacgaacagagacagcaacaccgccttggggacctccgatcccactgtggaccattcgagccgggcgcccaagtcgatgaaaaagaacaacagcaggaagtcgcgaatgctggtcagcttggagctgatcgagtcgcgatactgggtgggagccagcgaaacgcccgccaggaaggcgccgacctccttgctgaatcccagccactcgctggcggctgccagcaggacggcccaggcgaccgcaaacaggatcagcatctcctgcgaatgggccacgcgggcagtcaggccgggaaggacgtatcgcatgagcaatccgaccgccagcagcagcccgatccccttgcccgccatgaccagggagatcgtcaacgcggactgctcccccgacagcgttgcgccgaaggtggtcaatgccacgagggccaggatggcggcgatgtcctgcacgatcagaaaaccgaccgcgatccggccgtgcagagcatcgatctcctttttgtccgacagcagcttgacgatgatgatcgtgctggagaacgtcagggccaccgaaacgtaggcggcgctgaccacggtcattcccagggccagggtgatcacgaacccgatgcccgccgtgaagaggatttgtcccaacccggtggccagggcgaccggtcccgtggtccgaatgaggctcaggtcgagccgcagcccaacgatgaacagcagcagggagattccgatatgcgccagcagttcgatctggtcatagctccggatgagcccggagaccgccggtcccgcgagaatcccggtcgccaggaacatgatgatcaaaggctggcggagcttctggccgattacgccgagcaccgccgcaagactcaaaatcgcagcggtctcataaaaagtattgccctgaattgtcgcgagcactcgtcacctgcctgttcgtgcacgggttgctgaggtcccacgcattctgggagcaaccccagtcagtttccaaccctgcgtcgatacatcgtacccgccggggaccttcatgttaagtccaaatgggatggcctcgccatttcatccgccgggtccgggggcggtggctcgccgtaagcgtctatggcgaggacggttgaacgcggactcgtcccctcgctgcgatggagacttggagtatggactcggtctcggattgcgccggattgaatgacacgggctttccggagaatcgatcagtgaagacagacatattgcctgccctcataggcaatgtgacggtgacggtcacgtccctgtcgttgaagttctgaacgacaaaacccgcgtcgcccggttccgagaatgggtgcagcgtgacgcaactgggacctgcgaacgacagcccggcggcgtcttggaacgcggcgcgaagcccgtcgagcggcggaccgcccagagccagcagcccgagcggtcgtggacagagcagaacctcgcccacggcgtcgaaatccgcctggctgtacgtgtgggtgttcagcagggatatgtgtccttgggacgcgggcacggtgcgcaggagcaacaacgatctgccggcagcggaaccacggatgtcgccggcctggtttgcctcgataggggcctcaagatcgaccgtcgtctcttgcgacatgcaccccgcacacgtggcacgcgtcggagaggatcggagactcgggtccacgctgagcatgcgagcaagctcgccaccctgtggcaacgcgagcaagagactcgtcgtgatgatgacgttcgcacctctattcaaagcagccttcacgtgtccgagcaggtcgggatcggcggccgcctgtgcggggaggaacatcaccggcgccgattcggggaactcgtgcacggggaccaggggaatgccgagcatgccgaggaagtccatcaggtacatgtcgccggcggggtcgctgttgggtggtttgtaggcgggaacgcccacaaccggatgcgtgcgaatgaaatcggccaggtcagccagacggtcgaattgctcgacaatcttcgtatgatccggatggccctgcataacatcgccgagattgaagaagaccagctctcgtgccccggccaggacgctcataaaggcctggtcgaggaagtcctgctcggcgcagtcgccgtgatcgaaccaggccccgccgatcttggccccggcgattcccgccaaccagcgatagttgacgaacccctcgtagggttggacaaagccgaaccgctgcgtgttgcgcccacgtgtctccgtccctacccacacgcggtcgaagaggcgaggcagggtctccgcgtcgtagccgaagaaatggaatcggtcataccattgcggaagtttgacaatcatcgtgatgtccgggtttacctgcctggcgggttcgacgaaagccgagcgggccaactgcgtcagcagcgcccggcggtactcgccccacgaacggttccccttcgcacttctcgattcggcactgacatcgccggtgcataaaaagtcgtcgatgatgaacgtatcaaaaatcggcgcggccctgcgcacgattgcctgaaggtctcgctgcgtcttggcgttctgccagttgaaccagtcgagcggaccttcctggcgcacgccgacgtcgccgcccggcaccgtggcaatgccgccgacaacgtcgatgccgttgccccgaagccagtctcgaacgaagataagatgctcgtccgagacggtgtgcccgcctcgatagacttcgatgtacagcttcgtgattcccatctgccggatcgagtcccatgcacgggcccgaaaatcctcatccccggcaagctgctcgacctggtgcgatgtggcgtaggacccgaaccgaagcacatccatccggcctcgcgccttctcgaattgcgtctgggccgactggccggctcgggccgtcgtaagcagcccaacagcaaggaaacaggtcatcaaatgtctgctcaccattttcatccccgaaggtaagccatcaagcaccgaagccgctcttcagcctacgtgcccgcgttgggtcagggctggaccacacggctgtagatgcgaacgtcatcgaccaggccggaccagaaaaggccgggctcggcgttggggccgctgccgatccgcagacccgtcgtctggccggccaggctgccctgcgtgtctgccgcgatctccacaccgtctgtgtagagcgtccgcgccgagccatcataggtcaggccgacctggcgccactcgccatcggtgacaacctcggtggaaaccaggtctcgaccgctccggccggtctgtttgagttgcgtcgccagcgcgcccgtcgaggcatccgccaggagccagcttgccccaccggcttgtgagaggatcgtctgacccggcgcgccgcccttgacccacatcaggatgctgaacacccctgccgacgggtccaggacaaagggcgtcgtgatggcgtcgtccacgccgtcgagttggactgcaccggcgacccgccctgccatcggctgccagaccgggccgccgaccagcgtgccgtcgtagtcgccaacgctgtcggatgcaaggacgccctgcgtctcgtcgagcttccagtgggcaaggaaggtgaagtcccgggaccatgcgtcggagttgatcgtctcgccggcagccatgatcttgacgttgcaggcggcgagcttcgcgaaccgctcggcatcggcgaggctgcccgtgttcgcgccccagtgatacgggatcgccagcgttggctggatgtacttcgtcgcctcggcggcctcggtcgcatccatcgtgtacgtgccgccggccgggagaaaggcgacgtcgatgtcggtcagggccttcatctccggcgtcaggtccgtgtcgcccgcgaggtagatccggttgccgccgacctccacgatgaagccgatccaattgttcgctttggggtggttgggcttcgtaaggttgtacgaggcaacgccggtgacgcggacgccggcgacgtcgagcgtctggcccggcgcgaggctccggccgctgccgaaggccttcacgacatccgcagaggcgatcaactgcgtctcggcattgcggacccgggcgatatccgaaggcgagtaatggtcgttatggctgtgcgtgacgaggatcaggtccgcgtcctgcgggttggtggtcaggcgatagggatcgacgtagatcaccatgtctctccaagcgatcctgacactggcatggccgagccaggtgatggtgatgggctgcggcacctcatcgcagccgatatcggtccggccgcccaggatccgtgcgtggccgtcgatgtcggtaccggtcacatccgtcgcgaagtcgggatcgcctgtgtctatgcacggcgaatcggcgagcaggtgatagttcccgcggacccacgtgggcgccggaccggcggagtcctcccagtagccccccaagacgaactgcgggtccatgtcgatattgcccgtgccgtcgtgaccaccctcgatgttgcagtagctcgcgatcgcagtctcgtccgagatttggggtaatgcgccatccggaccgttgtcgcgaatgatagagttggtgacgacaaagttttcgccggcaatgccccagccgcgattgcccacgatcgtgcagtgatcgatcctggcgaggctgaggaccatcccttcaccggcgcccatttcgacaccggtcccactgttgcccgcgatgatgcaattgatgagagttggatcgctgcccgcctggagcatgactccggtctcggcattgtcgagaatgcggcagttcaggatggtcggagccgcgccgctgcaatagacgccgtgcatcgcccccgtgagtgtgagcccggcgagtacggaatttgcgtcttcgccgcttacgaagacagccgccgcgtcattcccgtcgatgatcgttccggcgacggtcccgggatcattcgggttctgtgaccggacggtgacggccttgccggcgaaatccacggtctcgttgtaagtcccaagggccaacaagatcgcgtcgccgtcgttggcctcttcgatggcctggctgatggcgtcatatcggaccccggttgtcacgttctgcacagggtgatccgccgcgatctgaactgggacggccggctcgccagcaacgacctcggcctcggccctcctgccgccgacgccaagcgaccaccacactgcggcagccgacgcgaccagcagcaaccaccaacgcacgcggcgcacttcgatgagacgtccgatggctcgttcctgcggcttcgacatttccaacacctccactcgcccaacgtgcgaacatcacccgatgccacctcatcccaacggtccttctatatactaccagacgccccgggcaagcacaagccctcggggagaccacgctcaatccgaatacccaggcgatccgcctgcggaggcgctgggccgccgggcgtgggaatggccgtgagcagccaggtgtcggagccatcggggcatcggccgtaagagacatccgcgcgttgctcgtcgaaccgaacgccgtccaggatcgtgaccccgtccgcatcgacgagcgcgagctcctccccgtcggcgccgagcgagaagctcgcatggaggccctgcggtgtgacatccttgtcggcccagatgaccaggtatccctttgccgcaatcgtcgtcagggcagccgagccggtcgggatccgccatttcgttggctcggacacgtcgtccgtcagatacatcccgccgacatcgactggctcatcgccggggttgtacaactcgagccagtcgtcatattcgccttgcggatcggcaatggacttgacgttcgccgcgagcagttcgttgattaccacgcgaccggcgccggggtcaccggccgccgccagcgaggtctgcgagagaacccatgagaacgacaacagaatcgtcttcgccgccttcattgcgccctgctcccttgtccatggatgtcaatgcaaacggactgctctggagtgcgttgcctccgcaacggcacgagcaacgccactattgaaacgttcattataccgcacatcgagggcagggtcaacttcgcgcgaggtcctccgtcgtttgtcgtgacgccgcaaggcgttattttccttgagtatgagggtctgccccttcgccggactcagggcaggctcctacgggcacgctatgaactggctgcaattctgggtgctatctacgtcccgcgcggtcccctgcgtcgccataccacgcatcgatcccggcctcgacctcagcccgtgtcttggccttcatcagcgccccgagcatgtgcctgcgtttggggtgacgccgggcgtagaagacgaggaacttgcggaagtacccgaccgcgcggtgctccgggtgcccctgcgcgacgcgggcgaggtgctcgagcaggatcaggcgctgctcggccaagtcgggcggcggcgggacgggccggccctcccacacgcagcgcaaatcgcgaaagatccaaggattgccgatcgcgccgcgagcgacgacgaaaccgtcaagcccggtccgcttcatccgttcgatggcctcgcgcgcgtcgaaaacgtcgccgctgccgatgatcgtggccgacggaaaacgcttcttgaccgacgcgaggacgtcccagttcgccttgccgcgataccgctcggatacggtccgcccgtggatcacgagcgcatcgaccccctgctcgatcgcgcgggtcatgatctcccagaaattgtcctgcgagcggatcgagtaatccatcccgatgcggagcttcacgagtagcgggcaatcgacggcgtcgcgcaccgctttgacgatttcaatcgcggcgtccggatcgtcgagcagcgccccgccccgcccccgccgcgtcaccttcggcaccgggcacgcgcagttcacgtcgatcacgtcgtagcccgcggccacaagagcccgcgccgctttggccatcgccgccgcggtctcgccgaggatctgggcccccaccgggtgctcgtcggcgccgggctggaagcacgccttggccagcacctccggcctcgccacgctcttggccagcatgacatcggccagcgcaaagggacatccgaaccgccgtgcgaacatccgcatcgcgtagtcgctatagccgctcagcgacgcctgaaaaaacggcacatccagcgacagactccccagcttcaaaccgacattgctgctcatattccttccgacacacgcaatgcaatcgccccccctgcccacggcagacgacagacgcaacacactccaactccctcattctgccgccggcccgccccccagtcaaccgactcgccgcctataacccccgcccggcagggagtaaggattcctgcaaaaaatgtagcgatgtgactgtcctcgccggtggacagccgaaccggtcctggtacaatggcccccgagatcgcaaaccgccccggccgaccaaggacaatggtatgcgaatgctgtttgcggaaaatcaggagaaccaaaaagaaaaaagccgcaggacgtgggtcacacgtgctgacggcggtctgcccaaaggcaggtgcctgcgaatttctcatcttgttgtgaaaaaccccaggcgcggatcggttacaataatcgcattgttgcgatctttcacacggaagtcaaggagaatttttaatttattgtgccgctctttttgagggagaaacaaatgaagctcttgggattggacatcggaacgaattcggttggttcagcatgggtggatacggaagccaagaccatcacgataggggtgagtgttttccccgccggagtcgaagaatcggaggagaagcgcggcgctccgaagaatcaggccaggcgcggcaaacgctctttgcgccgtagcatccatcgacgtgccctgcgtaagcgacgcctgcgtgaactgctcacggacgtcggactactgccccgtgaacaggataagcttcaaacagttctcggctgggacccatgggaattgcgtcgaaaagggttgtcgcaagagttaacttgctatgaattcggcagggtcttggtccatctgaatcagcgccgaggggctttgggaattgaggtgagtgagggcgatgaaggcaaggtcaagggtgcgattgaccgggtgcgactggagctgttggaccgttacgcgagtcctggtgacaaggaacgactccttgacctgcgtcagagcaaggatgacgacgaacaaggacggtttgccaccgagttcgcgaactggctggagcaaagcgacgacgccacctttgggcggatgatggctgatctgcacgatgatcgtcgcgtctgcatcctcgatgaaaaagggaacccaaagaagaacaagaaccgagaatcccggtattaccaccgagaacccatccgcaaccgccgggatagttttcagttccacgccgaccgcgcgttgattcgcgatgaattccgaaagctgtggaagaagcaatgctctttcgatggcgacctttcacgcctgttgacggacacactcaagaagcagttcgacgatcccgagtgtgaactctatgcagagaaagcccaaagaacttggcgtcacggcggagcactcttcgggcagagggcaacctattgggacacaggtgttttggggcgctgcgcgctggagccgaccgatcgatgtgtccccatcgccgatatgcacgcccagtacttcagggtagttgagaccgtcaacaatatccggatatgtagcgactggcaggcggaacgccctctgacagaagatgagcgggatgaagtcatcagtttactgcgcggaccactgttcaaaaaatccaagggcaaggaagaaccgaaacaatctgcaagcgtgacagacatccgtgaggttctggggatcaggcctcgtgacaaatccgtctggctgaacatcgagaaagatgaggaccgtgaaatcaatacagattggtttcatcgagaggtcgtccataatgcaattggtctgaagcattgggagggattggatgacaagatccgcgagagaatcaaccgtgtcatcctgaaatacgatgcggagaaggcggtatccgcagcaggacttcgccaagaagccacacaatggtggggattgtcctcggacagggtggacgctctggtatccattttgaaggagcggcccaagctcgagaaacggctcaatctgtcgcgccgagcaatcgtgaaccttctgccttacatggagacattcgaccggataaacaatcgctggccgacacagcaagaagcaagaaaggcgtttgccgaagacgccggcgcgattgacgcgaccagcggaaaaccgccggacgatcatgcacgccgccgatacgcaaccggcgcgctgggggcaaccgcaagtgaccggtactacatgaaacaagacaagcatcaaatccagtgcgcaaatggcacgatacttccgccgctccccccggcgccgatgatgtctaaccccgtggtccgtaaggctatccatgaggtgcgccgacatatcatggcctatcttcagaagttcgggggcaaaccggatcggatcgtgattgagtttgcgcgttccgccaaacagtcggccaaggtacgcgaccagacacttgtgcgaaaccgataccgagaaaaggaacggaagaagatactcgtgggcgacgacagggaagcgggggtggtgaagaccgcctttggagacgactttgccaatctatcactcaatcagcagcgtgctgctgtggatcgcgtcatactggcacatcagcaacagtggaagtgcccctattgtggcaagagcgggttggctgctacggatgtagcacttggacaaggagtggagattgaccacatagtcccatacagccgctgtggcgataacgggctgaacaacaaagtcgtatgccatgtcgagtgcaatcggcaaaagcgcaagagaacccccaccgaatggtggggcgaggaatttgcggagcgagcccggacggccaagaagctgtttgacgatgtggaaaaaggccagatgtactacttcaccaagagagactacgcccggaaatggcacaatttcacgcgggaagtccgcgacaacgaatggcgcaactcgcagggttcggacaccgcctacgcctctacccaggtggctgcgtatctggcggatgctctttttgacgggaagggccttccggaacgtggaggggaaagaaagatattcgtcaccatcggcaagtatacttcgatgctccgtcgggactggcaactattcaagacactcaagaagtccaaagctggtggtgaggtttgcatttcaacagaggaggaagaggaacttgaacaaaaggaccgcggtgatcatcggcaacatgccattgacgcagtcgtggtcgctttgacgacacctaatatcatttccgccgtggcgcagcgtgctgccatggaggaaagcatctttgcggaacatggccactggcccggccagaggagcagacgtgagacgtgtcgccaatgccacgaataccggaatcgctctggtcgttttccgggcgaatatgagccgattgttccacccaagccatgggatgacgtcaaggaattccgagaccttgtgctatctcaagtcggtgcgccccaatcgaacgatggtttgactgttgcccatcgacccgtcaaacgtcgcatagccggcgcattccacgaagacacgctctttggcacaatcaaagacagcgaggcactcttcacgggaagaataccgtgctacagtccgcctgatacatggctcaaacccgcacacctgcgcgtgatgaaacctgaaacagagaaacaatccgtcgaacgtctgactatccggtatgtgaacgagggctgcgataagaagactgcgaggaataaagccaagggggctgtgaagcagcccagttttgtgccacaacttgttgacccatctcctgggaagaccggcttggtacgtgatccggcgttgcgccaacagatgcgccaatgcctcagagccaacaacatcgatcccgacaactatgagaaatcggatatgaagaggatggtgcaggatggattgctgcggatgtactcacaaccggaatggaagaagaactcacagtccgagagccctgagaagcctaccggcattcccatcaagagcgtggtgctattgagaacacatactgacccgatcatcgtgccgcgtaagaagtgggaccccatcaacaagaagatggtgagagaggaacactcgcgcagctttcgcgtctacgtcgggggtaataaccaccatatcgagataacggaaggcgaggacggcagttgggacggagatatcatcaccaaccataaagccgcgcagcgaaatgccgagcgcctcacgaaattaagggaggctggcgtgccatcgatcgagaagctgcgaaagatgaacaagaccgaccgtcgaagatatgcctcgacgatcagagaaatcaatcgttcctatcctgtggtaaatcgtgccgaccgcgaaggcaggcgtttcgtgatgtcgcttgctgaaggtgagacgatctgcatgaaacacccccaaacaggaaaacaggggtattttgtagtgtataaactcgataaaccccacgtgattcatttgaagcatcactgggatgccagacctgacggaggtcaaaaggacgatgacgggaaggtcatccctggctcgaaacgcgaaggattttctgtttctgctggcgacctgaaaaccaaatgctcattgggcgaaggcgagccgccctgcaaagtacggattgaccctttgggaaacccaaggaaagtcctgaaggactaaagtaggccggcgatccttccgacaatacgctattgaggagagatagcggtgatcaagcgtatcgtcgagatttcgtcggcacggacgttcttatcggtcaagtacggtcagttggtcatcaaggacaacgataacgcgctgtcgcagattccctgcgaggatatcggcatcctgctgatcgaccaccagggcacgacctatacgcactgcgtcttcaccgagttattggaccacggggcggctatcgtcctttgcggcggcaagcaccatccggcgggaatgctcctgccccttgaaagcaacagcgagcagaacgagcggttccgcacccagatcgacgccaaggaacccgtcaagaaacggctctggaagcagatcgtccaggccaagattcgacaccaggccaaggtcgtcggcaagggctgcgagacctatgaggcactcatggctctccgccagagggtccgttcgggcgatcccgagaacgtcgaggcccaggccggccggaaattctggccttcgttcctccagggcatcgagttcaggcgagcccctgacggcgctccgccgaataatctcctgaactatgggtacaccgtcgtccgtgcagccgtggcgcgggccttgtgttccgccggcctgctcccctgcctcgggattcaccaccacaatcggtacaatgcattcgccctggcggacgacgtcatagagccctttcgcgggttcgtcgagtccaaggtcaaggaggtctgcgaaacggacggcccccctgccgagctgacgcagcccttgaaggccaagctcctggaggtgctctatcagcccgtggtgatcgcaggtttcgagggtccgctcatggtgggactgcatcgaaccgcagcctccctgcaccgctgctttgcaggcgaacaggatgcattggagctgccggaactatgatcttgagcgggtatcgagccgtgtggatcttcgccatgttcgacttgccgaccgacacgaaaaaggcacggaaagactacacggatttccgcaaacacctcttgaaagacggcttcaccatgctacaatattcggtgtacgttcggcactgttcgagcgaggaaaacgccgatgtccactacaaccgcgttaacggttttctccccgatgacggcgaggttcggctcgtcaccatcaccgacaagcagttcgggcgcatggaaacacactggggaaaaatgcgcaaacccgccccgccggcgccccgacagctcgaattattttagccctcttttctcgcaagcccttgaagaacaagggcttgcgagacgacgattgtaaccgatccgcgtctg

SEQ ID NO: 3927 - DNA, 23186 bp, synthetic construct
  source 1..23186: mol_type = other DNA
  misc_feature 1..23186: note = Synthetic
tcacaggcgtcccgctcccaagacccgagctcgacacgagagctgcccactgagactcggacatctcgatttccaccagaggggatcccacggtgtgcacccagtcccggtgaagctcacgatccagggcggcacggccaatcgacagccgaacagtgtgctgatggtcgatttcggacttgaaaagggggccggatccgctcgttcgcgtcacggaggcgacgccgtatgccgggtgcgtgtggcgggttcgctcacgactggatccgccatccacgcactcaatcttgggtggctgtgagttagctgccattgcttccatcctctcgtattctcgatattaaatatcgtaatacagaaacaatgggtgctgcaacctttacttttctctcaccctacaatcgataccgccttcgttctgccagccgccgagaagaccccgggtggcgccctggggggcatttggatctacagccgcggccgtgaccgcacctggtttgtctgcgctgggacctgaacgttcatcaggcgcctggcccagtcctgcttgaagtgcgcgatgaacgggtgctcacccccatcgagggtggagcgttcggtgaaaatggattccactcgattgatgtcgagtttgctcggcggctcatcagggtcggattcggagaccaagggcccgggatcacgcaccgaatagtccaccgaaaccagaacgtgcccggcgcgcaaagtatcgccaccgatttggatcttttcgtatgaatagcacccctcgggcgtttggcagccaccctctgggctttcgacacgctggcgccccttcacgtcgtccgcgatcttgtagccggcggacaggcgctcagggatgacggttgccacgcgatcccggatctctggggtgaaggagtccatcgtataaatatcgaccggctcgctataggtatatgcgcgctctcccggggatagaatctggacggtattgccttgagatgggtttcccgggaaaagacggacacggaactgttcgcccgcggccgcctccgggagccgcatttcagcgcgcaccaaagacaccagctctcgagcgatggcgcccacttctggatcctgctcaacccagccgctcgattcgcgcctcggttcgggattggcctgatgcgaaaacgcgacctcaaatcgaggtggcgattcagcgtcctctctgacgctctccgggtcgagcctcagggttacttcgagctgctctcggctcgcatcaatcccgttcagatccaagtctgactgactcagcacgatggcgctcaacagatccgccattaacccctcgtcatcaggcttcgaccagggctcatcgggaccggattcgaagtgcatcatcgacgaatattccgagatgatggcccggacggtgccgcccgcagccagatgctgaattgattgacgtacgagatccattttctgtcctgtagccgcggccgcttctctcgagcagccctggtttcttgttcagccgcgctgcagcgacctggcctgacagatcatccgccactggcctcgaatgcggattcgacgccttctcgtcgcgcgataagacgccggcgctcccgccttagacgattattctcgtcttgcagctcggccgctttctgggtgatccgctgaatctcccggtagcgccgattgatcgattccggatcttccaggcgcgccagcaaatgggccatcagctccttctcgagcctatcgttgaccgggtgcgcccattcctcgtgcgtggccaggtagcggtgatcgagggtgtggccctgaagcactttcaggtggccgcgggcattggcatgaatgagcccccaccggggcgggaggtcatcgcgcccgatgacaccttccgggcacaggtagtagcgataccgccccatcccggatgcgccaccattgcgatgctgcttcttctggtccgcgaaaaagtcggcgcgcgatgtcttgacctcaaccagtgtggaccccggcccgccggatccggggttgtaacggtaaccccaggcatccgcgcgctcaccggaaaagacgccgccaacctccgaaagagcgatcgcacatccaggccccttgcgactggccggccggcgtagccactggagcgccagctggaccaaatcaccgtggttcatcggcgccccgagattgcgcgctgcacaggcctgtaactgcgccgatgttcggggcacgggccgatggcgcccaatgcctccatgtggtctttcgtgggatacccggcatggcaatcaaatccgtaatccggatactgctcgtgcagctcgctcatccaccggtcgcgagcgacctttgcgatgaccgatgcggcactgatcgccagaacggagccgtcacccttgatgatcgcttcggctgtccagggcccgttgggggtgtgagtgccatcgaccagaaggtgatcaggcgcacgatcgagaccctcggcggcgcgcgccatcgccagcagcgtcgcccgatggatgttgagctcatcgatctccgcggcctccacccgagcaatcgaccatacgacaccgggatgcgaacggatccggtctgcctccgactcccgacgcttggcagagagctttttcgagtccgtcaggcggcccgcctcaaaatcgtcgggcaggatcacggcggcggccatcaccggccccgcgagcggacctcggccgacctcatcgacccccgccaccacccgcgccggagacgcactcacgaccgggcccgcatcgccgttctttcttggagatcccgcggctccagcaccttgcgaatgagggcgttggtttcgggcgcgcgggcatccggcccctgcatttccgtttcgagcaccgcgctgatctcttcccagttttcgtccagccggccccagtgctcactgcgcggcgccagcacatcggtaatcgcttgtcgggcctccggcaggagggtcagcagcttcgagcagcgcaaaaaatcacctgcatcgtaagggtggttgaggcttggaccctcctttcgggcgccggtactgaagtccaacgcctcggcaacagcccgtgaagatgcgcccacgtcaccatggcggaaccagaaccccaggcgctcgtggatgtcggcacttttctccgggcggtccgcctgcgcctggcgatgcatgtgcgcctggcggatcgagatcgtgttcgggtccccaattacggcaaacatacccatcttgtgcgccaaccccgggtccatgacccagtcatcttcaccatggtgcaaaaggacctccgagaacacatgggccggtaccgattccgcctgaatcgccatcaggccatcttccgcgcgcaggatttcatagccatcgccacgctcaacggtctccatgcgctctctctcactgctcgccataggtcgcttccctcttcgtgtgttcgtgcgcctgctgcggcaccagctcgtcccagcgtgccgccagcagatcaaaatagcgctcgcgctccatgccgccgtaaaaaccgagggcccaggcgtcgttgcactcaatcaatgcggtttcaccatccgcggttcgcgcccagtccatggcgtaggcccgcggcaacccgggccctagtcgcgccagcgcatcccggacctggcgcatatcaatggccggctcactgcgatcttccagatcgtccggccctgcatacggcgcgacgccctcgatctttccgcccaggacgtacacccggtattccgcttggagcggcgtagccagcattccggcaacccaaacgggctgacccggatccagaccctcgaggtcaccaggggaggcgaccacccgggcctcgaaggacttggtttgcaacggcttcacgaacacggtcccggtcttcgaggtctcctgtgcctctgccagcgtttggatcatcagacgccggcgacagtacggctgcaaacccagcgggtagtcgagcggctcgggctccatcacgccgttcgtccgaaagaccgcacgcagcacctcaacactccccacgaccatctcgccagacggaatgaccaggtggccctcgagcacatcctgacccgaaaaggcgcgggtctcgacgtctcgttttcccgtgatgccaaccaggtggatggccgcgctttcagcgggcatgggtccgccttcatcgctcttctggatccagaccgttctcgagggcttcatggtgtcgatctcgcgctatccgtgtccggtagcgggttcctgttttctgcactatcgatgtgatcgcgccacatcgcgcgcagattggcggccgacatcaagccttcattgatcattgccacgatgcttccgaccaggagggcgttggcgaaaaagagtccgtgccccaccagaaacagcgcacgaacatgcagggtgttgtgaaggaggccgcccaccacgaagacgatggatcccgcaccaacgacccagccggccacggacatcgacagagcactcacggcaaggtaaatgctgatcgcgatgccggcccacatccaagacggcttcgaggccaccagcagcatgtacgccgaggccaccaccagcagcacactgacctccggggtgccgagcagatagaagtgcaagctccagagcgccatcgcgccggacagcccgcggaacagggtggggcgccaacgggccccaaagagaaacccgaactgggtggcgctggcggcaatgccggacagcaccaccaagagcattgtcaggtccatatcgagcctacagcttcatccgttccggccctgcctcagacacatccgctggcgggaaccccgggaccggttcaaacccgtagctcgccacgacatgggccttgcggtcctcatcgaccagaatgtgtccaaccgagatcgacatcatccgatccagccgctcgatggattcattcgggcctgtgttgcctacccaaaacgcactcacaaggcctgtggcatgcacgttcgccacatggcgatacaggcccatctccaccgcctcctggacatcggcgttcagcatggccttggtaacggcgtcaatgtgggctttcggcattccctggtcgagaatctccggctggtagagttcgtacttcatgctcgctcactgaatattaagggtcactttcgacaacgagattaccccacccctacgtcttcgtacagaggcggggcagggccttactgcgcgcgccaagtgccatctgactggcggcaggcgcggccagtgatcgcttccgcttccccgcccacctggccgtagactcggtacgtccgacagggcttgccacccgaggactggtaggttcgagtcggttgggcacgaaactcgccgccagtgttcgggttgcgccacgcgacaggacggttgtccggctgcgtttccagtgcacgctggacgttggcctggtcattctggtccatgctccggcccaccgagccccccaccgacgcacccaggagggttcccgcgatggttgccgcggtgttcccgcggccgtttccgacctgactcccgatggcgccgccggcgaacccaccgaggatctggccgatcatctcgttgttcgcgctggcaggctgggcgcctacagcgaagaaaactaccccggcgatgacgatatgaatagcacgcatgaatgactccttttgggtctgttctgatctcaattcgatctgtatcaatcgtaatacgatttctttgatccgtcaactcagacgtcaaccttatcggagtaatacgaattcattgtagtttgatttcgtgttcgctatattgggtccattattcagcccctcatggagcccccggtatgagcattaaagagatgcgcgattctgtcgtcgatcagtttcgaggcctgtatgagcggggcgagatcctcgccttcgcgaccagcttcgggaaagactccacgacgacgctgaacctgggtcttgaggcggctctggcatgccgggcccaagggggcgtggtgccccccatcttggttcttcacaccgacacgctggtggagaacccggttgtgcggacctatgccgacgccatgattgcgggtctcgagatcttcgccgagaagcacggtctcgaccttcgggttcgcgtttctacgccatccttactgtcccagtggccggtgcaggtcctctccgggcgcaggctgccgacgtttgctaaccgggcccaccgagcctgcagcatcgatctaaagcggacgccggccgagagggcgctagccgaagcgcggcgagagctcaagaaggaggggggcgactcaaccccgatcctgatcctgggtacacgcaccgacgagtccgttgggcgcgcgattcgaatgcgggagcgaggggagggcgcccacgtccaagagaccctcgatcaagagggcaaggccgtcctgaagcggacatttgctccgatcgccaactggtccacgatcgatgtctgggagtacctcgccctttgcggcgaaggccgtccgttcggcagcttcatgcacgattttgccgagaccatcgacctgtatcgcgactccgggaatgagtgcgtcatcatccaggatgcgtccggaaatgcgccgaaatcggcatgcggaagtcgattcggctgctggagctgcggggtcgctggatccacggacaaatccatgggggcaatgctgacccagccccagtacgcgtttatgcgtggattgagcgacctcagaaactggctggtggccacccaaggggattactcgatccgacgctggatctcgcgcaagccacacggggacaccggttacacctcgatcttccccgccgactacgacgccaaaacgacacgctggctactggcagtgctgatctcgctcgatctcacggaggccgaccgggctcgcgatttcaagcgtcgagtgatggcgggaggcgccgaggccgacccgggtgttcagggcatccgcgcgtccgcagccgacccggacctcatcgagaagcgggtggcgatgtacatcgagcgtatgcagaccccccagttccaggttatctccccggaggtcctcgcgacgattgactacacctggtccgtagatgcgctccaccccccgcacgaggccctgaaagtgtgggacgaggtggccaaacagggggcacgcgtgtttgccccgggatacaccccgaaacgacctccccagaagaccccggctaagctctggcatccgccgctcccgaatcctggggtcctgggcgcgcatggcgctcttgtggaggccgtaacggagggacgaggcgtcggcctgtacgaggtgaagcctgttgccggcgagacccttaaggcggacgggaccccggtcacgcgccgcctgctgaacgccgagcgagtcatgaccgccgagaccgatgaccgcttcggatgggatccggaaggcctgtcattgttcatggagcttgagtgggagtcttcccttcagctgaacgccgattggcaccgcggcctggtgggatcccgaacggaggcggcactgcgctacattcgattcggcgccgtatcgatggggcgcggccgggctcgagagcaggagggcatgatcaagcgcgggcagcaatgggaagtcgctggactgcatggcgactccagcccggaatcgatccagatgcgatgcatcacagacgccgaacacgaggcgatcaaggacgaggggaagcggcagctcgaggccaaacgcggacagcaagacgatcgggctacccgttacgcgcaacgcgcgggcctctcggtgaccgatgccacccccattcgcaagtcgcgagcacgcatgaagcgtgagatcccgcgcctgcgagcacgcctgctggcgcttgagtctgcgaacgaggagggcctggtgcacatggaaggcgagccactgcaagacctcctgcggcgctaccggcgcgactggagagagtggacccgctacgccctggagggcccgcacgcaaacgcactcgcacccctgtactggcgcctggaagcgggggcgcatgagcgctgcgcgacccttctcgatgccggaaaacccagcagccagcagtttcagtggggctttggcatggccctttcattcgacagcgccccggcacgggctcagcgccatcgaaccctcgcccgcgaagcgagagccgagcgcgagcggctcctgaccccggtgttcgaaagcgggcaactgggtctctttgccgcctagcagccccccgggccggcctcatctggcacagaccaagtagattgttttcgtattacgttcccgctatactaactaacagggcaaacaagacgaactccaccagggcaaccctctggtgtgagcaactacttacgataccaagagggactcgcaatgaccgggctcaactcctgccataaccacccgtatgatgaccgatatcgggttcaggtcgcgaacaacgggtattccccggacggtcgcctgcagcgagtcgaggttccggttcagtgggtcgtggctcaatgcgttcatggcgggcatcccgaccaggatccgaggtgcgaaggctgcatgtggcggccgccggcaggcgcgacccaagatcagttccgcgagcacgaggagaaggtgattgcgaagctgcaggcggccgagaacatttcagaggccagcggcgcatgagcagccgccacaagaagttccggccctacattcggcgccgccatgcgtcggatcgctcggatgacttccacaccgctttgcggctgtcgattttcgacgaagccgggtggggcggatgggtcctggtccagcacggcgtgcgcgggaaagtgattgcggttgaacggtctcgggatgaggtcgtcgggagcgttgtctcgagcggggaatccttccgtgaatgggcgcttcgagttcagggctttggagagatgaagttctaggcaacggctcgctctgccgtgaggcacgcgatgagaatccagcaaagaaggggcgaacgaatgcagatcaaaacgaaagacggccagatcaacattaacggacgcgtgttcaaaggaacccacatcaccatccgcgacggcgagattattgtcgacggcgtaatccaggatggagatcctctgagcgacctgaatgtgaccattcacggggatgtcgagcgcattgagaccaccgccgggaaggtgaccgcaaatcgagccggcagcatccgcacaaaaagcggcgatgtcgaatgtggtgatgtcagcggcgacgtgaagactatgagcggcgatatcgaatgtggggcggtcggcggcggtgtcgaaaccatgagcggcgatattcgtcaccgctaacattcaacacaaccaaaacgaggtaacaacccatgagcgatgactgcggaatgtttgggcccgacgccgatcggattgcggcggagcatcttgggctcccggagggatccaggatcgtcgcatgcgccaccgaaatcgacttcctcgacaccatgaccctggagccggaactgaacgaagtcctggaagaccgggggtggatcatgctggaggaagacgtgcggaatacggtcgattcccacacccacgcgatcaaggtccccgcgggctggcgcttctttggcgttgcgcccccggaagggaaaacccagtttggcctggtcccgttcagcgaagaggacgaccagcgggtatcggagtacatcgacgcccggcgcgcgagcctggctcagtaatgtttatcaagggtccgcccccgggcgtaagcccaaaatccgaggcgctagccgctttctccgtcggtgcggttgctgctggtggggtatcggggtaattaatgacggctggtccgtgtgcgagatttcgagccagaagaaggcggggtggctcactctgtgagctacccccttgggtatgctgccgtcttgcacgcaaaaaaagagccccctatagaggctcttcattttgcgctctgtaaccagcttgttgacgattacagatcaaacacagttggcgttagccaacgatgggaatgttacacacaactcaattcggcgtcaacaggggctccatccattctttgcccgcggacgcagaatcatggaagaaccaccgaaccacggagaacgcatgaacacacgacttgcacttgacctcggaagctcttcgattggctgggctcttttccggctgaacgacgacagccgcccctgcgcgatcatccgctccggggttcgcattttttccgatgggcgggacaactaccaaaactcactcggagcaaggcgtcggaagaaaaggcttgagagaaggatgcgtgctcgtcgcaataagcgcgttcgaactctcgctcgctggcttattactctcggatttcttccctcggatccggttgagagacgacttctaatgaacgagttagatccgtatgagcttcgaagccggggcgtccgtgaagaactgacacgatttgaatttggtcgcgccgtcttccacctgggcaagcgccgcgccttcaaatcgaaccggaaaacggacacggaggacgagaaagagtccaacatgaagtcggccatcacgaccctggaaggggagctgcaaaagagtggcaccactctgggcgactggatgtatcagcagcgaaaaaaggattcatccttcagtcttcgatttcgccccaattcatcttcgtctgcctcgaaactcgactacgactactacgcaagccgggcaatggttgaggatgaattcagaacactatggattgaacaaaagaaaaggtccacccatccggaagacttctctgactgggcttttgaccgtatttttgatgcaatcttttttcagcggccactgaagcccgttgttccgggcttgtgcacgctgatcccagaggagcgacgcgcgcccaaggccctgcctagttttcagcgatttcgactttaccaagagcttaatcatgtgcgcctcgtttcggcggatggcgcccgccgaccgctctctcttggtgagcgagacaaactagccctttatttggagaaccacaaaacactaaatatcctctcaatccccaggaagctgaaactaaaagacggatctcaagctattaacctatccggggaagatggatccaaaaaggaactcacagggaatcgtacagcttgcgatctcagagggaacggaaagagcaaacctgggtttggcgtcgcgtgggataatttctcagacgctcgacaagaagaaatcaccaaaaagctgcttaatgaaaccgatgccgaatcgctttccggttggcttgttagaaacaccggcgtttcacccgacctggcgcataccatctctgaaaggagtctagagagtgggtattcgcgcgtaagcgagaaagccatcagccttgttcttccgaagcttatggagtcggtcattccctactccaaagccgtagaagagtctgagatcgggagtcattcggggctttctcactatgaaaaaaccggcgttcttcttgaagagcttccgtattatggcgaatacctacagcgccgaaccgacggggggaccggagacccccgagagaccaacccagaaattcgtttcggtaagatcggaaaccccagtgtacacgtcgcgcttaatcagctccgcaaggttgtaaacgaactcgttagggagtatgggcgcccaaccgaaattaatgtcgaggttcttcgagatctcaggcatggacgcaagacaaagaagaagatccacttagccaatcttgaaaaccagaaagaaaaccaacgccgagtcgaagaagccctccctttccttggcgtcaaaaaggtcaaatccctttcggatcataagcgctcaagtgttgcgagaaaaatgcgcctatgggaagacctggcaaagaatccaggggatcgtcggtgcccatataccggaaccctcatcgagccacagatgttcttgaagaccggtgaggttgaaatcgatcacattctaccgctttctgatacgtgggataacaccctatcaaacctcacgttgtgcacaagggaagccaatcgaaaaaaaggcaaacaaacaccttatgaggcatttggtcatatcgacgagggtccgtattcttatgcttcgatcaagaaaagggtcaagtcgattcgtgatccagagaagcgtcgacgctttcttgaaaatgcgcttgatgtttggaaggaagatcattcggggccgtcgagtcgcgctctgacggatagctcttatatcgctagagtcgccgttgaatacctctctctcatctgcccgcgggagaaggttattcctgtgtccgggcgaattacatctcagattcgaaaacgattcaatttcaagaaaggaaggcacgaccatcggcaccacgccctggacgcgattgcgctgggcatcgcggatcatcgcctagtgcaacagtccgccaggacgagccgagaagcggacggccgatatatgtccctggccaaattcattcgcgagccttggcctacatacgaagagcacgcagaacgggccattcggaatattgtggttagctttcgtccagaccatggccaccaagggcaaatccataaggaatcgcactggggcctcaggggtgatgggtccgcgaaaaggaaaggggctaacaagccaaagacgccgaatgatgtgactcgaatgatgtcgatttcgaagagttccgaccctttgcgaatccacacaggctcccccgccaaaagcggaaccgcctataagttcatggaaaccaactcgaattactgccttgagattacggttaacgcgaagggaaagtggtccggcgaggtgatctcgcgcgctaagtcctatgagtttatgcgggatcacccggggggcaacatcatggatgttttacccaaaaacaaaggcattaacgggcgacctctcgtaatgaggctcacccagggtgacatggttcggattcatgttgatggaaacaaacacattatgcgcgtgaataagatgggatggaacggcagcgtattcttgtcagagcatttcgaatcgaattgcgatcaacgaaacaggggcaaagcggagccaggctttcgatacctgaccaaaagtgcgtccgggcttcaggctgcgaattgcgaatggatttcggtatctccggccggccgaacatcatctcgatggcatgcggccgcttgatttcgtagccgctgatgacttaccaattcctcgatatagaaggctctgatcggcacctcgcattggaagacgggtttgtgcgcgtgtctgcggagggccagcgagggggtaacccccccgaacaccgaaaagtagcgcttgatgacgtttgcgcaatcgcggtaaccgcttatggcgccacgtacaccaatgcgctcctctcggaattgtcgaggcgttcgattcccctcgtggtgtgcgggcgaaatcacgttccttgcgggatcttgctgggtctcgatggcaatcatcggcaggcgaagcgcttcgatctacaggcatcagcgagccacccgatgcggaagagggcatggcaacagatcgtcagatcgaaacttcaacaacaaggacgactattggatcgggaggggcgaaacggctcatcgctttaccggatggctcgtcgagtccgctccggggaccccgaaaatatagaggcggcaggtgcgcgatattactggaaggccctattcggcgccgattttaagcgtgatcgtgcactgcctggcgtcaatggccttctgaactatggctatatggtgctgcgatcgaccatggcgcgatcggtggtcgccacggggctccacccaagccttagcatccaccatcagaacgaggggaatcccatgcgccttgtagatgatctgattgaaccctttaggcctgtggttgattcggtcgttttaaggctattggaggaaggcttcaatgaggtcgaccgcacctccaaacccgaaatcctagccggagtctttaatgccacgctggagataactgaaaaacaggaacgattgcctgcttgctgttattgcgtctgccagtctcttgttaaggtgtattcgggtgacgccagaacgctctcccttccgctcggactcgtctctgcgtcgtagattgatatgtggatatttgccctctttgacctcccgtcggactcaccctccaggcggcggtcggcatcgaggtttcgcaaagaccttttggcaatcgggttccatcgattccagctttcttgctatgcccggtactgcttcagcagcagccaagcgcataccattcaatcgcgagtagagaggtttctcccgcaacatggagaggtgataattttcttatctacggatcagcaaatgtctcggactcgtattttttccggacgagcgcttgtaacccctccatatccgcccggtcgcttcttaatcctgtagcccgtaccccgttttcgcgcgcacaaaaaaggcgcaacacccttttaattcatggtgatgcgccttctctatgctacttcacttgtgtttgatctgcaaccggaactccagcgtcggctcttcgccgattttggaaatgctacttcacttgtgtttgatctgcaaccggaaccgatgcggctcggcgacgactggcggcagaatgctacttcacttgtgtttgatctgcaaccggaactaaagccggtgatcgtctcggatcgtaacatgctacttcacttgtgtttgatctgcaaccggaaccccatgagattctctctttgcagcattctatgctacttcacttgtgtttgatctgcaaacgaaaataagacgcctgttcggcgggggttgtgtttatcttagttaacgatggatccatcatcaagagaagtgtttcagtttctgtcgttttgtggaatcataaaacacactcataccctgccccgtgaaccgagtccacctatgcgcaacgattgcttcgcctgttcactttccgcaaaccgcacgcaaatggtcgaacccgacggcgccgaacactccattctcgccatcggtgaagcgcccggagcagacgaggacgagcagggtgtcggcttcatcggcgcctccggccgcacgctcacgcgcgagatcgaaagcgtcctgggtctgggtcgcgaacaatgggcgagggcgaacatcgcccggtgccgcccacccggcaatcggaagcccaaggctgcggaagtgaaagcgtgcgctgacaagctcaaggaggccgttgcgctgaagaagccccgcgtcatcctcgcggtcggggagagtgccgggcgcgcactatgtggagaacgactgaaggccggcgcctatctgccgcagatcgcgcaaatgctggcggacgctcggaagcacggcccctcggttcttccgaccttcgaaggttgccgcgtcctcccgatgccgcatacctccgggctcgcctggaatcgcacgtactcaaccgcagacggtccccggcgtattgccgaactcgggcgggatgcgattcggctggcggggtcctcgtttccgctgaggccgtagggatcctcggcgccgcctccaggcccatcaagctcgccccgtggggcggcgcccccactgacggtgcggtggctttggttatataaagggtcatctggaggaggcgagcccatgcctgaacgaacccccaatacgattcggcccgaggattttcccgagctacgactgatctgctggcaccgggacccgaagcggcccctgtccgaatccgaggcctttggtctttacgaggccaactggcgctatatcgatgtgggtcggctcacccaggaggaggcagacctcattgatcgcctcaagcgcgactacgggaagggcgtgatcaatggatgacaagcgcgaccaccatcgacgcattatctctgtcctcgaggcgatggacgccgatctcctggagcggacgcaatgcctttttggaggcggaacgtcgatcgccctcaggctgaatgactttcggatgagtgccgacatcgatttcctgtgctcgagcccggaaggctatcgagagctaaggagcatgattcccaggttctcggaaaccgggttgtccagcctcttccaaaagccagtccgccagcttcgcgaggcgcgcgccgatcgatacgggattcgaagcgtcttggatgtcgatggcgcgccaatcaagttcgagattgtcatggaggggcgcatcaatcttgacgcctcatttgaacgcttccacggcgctccagtgctctccatggccgactccttcgccgagaagatgcttgcgaactctgaccggtggggcgaccgatcgattgagagccgagacatccttgatctggctgcaatggtccacacttgggggccgattccattgcaatcccagatgaaggtgtacgcggcgtacggcagcgaccccatcgatgacctccgcaaggcagcgcagtttgtgctcgaccaggatgcctaccgtgaacgctgcttcgagtcgcttcagattgactccgaaagccaggcttgggtcacgaatgcgcttcggcacctgggggccggcaagggtctggaggcccggaatgcgtctcttcacggccaccaaaaccataggagcccccactgatgccagccaatgaattccaggccgcgtggcccgatcaattcaacctggtcgccgagatcgactggacgcgcccggcaccacacgacctcctgttttccggtggcgtcgaagaggaccagtgggcgtatctgtatgcgatcgtagcctgggtcgacaagggctggtggccttactacatcggcaagacgttcgctcaaacggtttcgaggaggaatcagcagccggaccatagggcgcgcctcgacaagcttcaggcgaaacacccatccctgacgttctcggtttcactgggcactccggacatcacatccggccggtttgatgagggtgcgattgatgccatcgaggggctgctaatcttctcgaactggcatgaggacatggcgaacgagcgcaaaatcaacagcttctcccataaacatcaagtccgccttaagaacaccggctggacggatcacctcgagaaagaaatcgcctacggcgtgttttaccgctaaccccaacccaaggagcctcatggccatccaatcaagcgtgctttcttcgcacctgggcgaatccctcgagcaccttcaccagctgctactggcaccctataaaggggccaatcctgattgcgatgccgccatcttgccgttcgaggccgcgcagtccgccagccggccccacgaatacctgcagtgcatgctcgacgtgctaagggtcacgttcgagcccgcgccaatcggcagcgtgctcctgaacgccaaccccaacctgttcacgagcattccggcactgatgggcgccttcgatttgggctacgggtcactcgtggccgacccagcgcaggcgttcggcgatttctggccccaaacgatgaaacctcacctgcgcagccatggaagcgatcccgatgccgcccaggcggtcttcgttatcgtgaccacaggccccgagcgttacggcccagcgcttctcgacgagatcgcgccggcgcttgaagatcaggcccactatggattctgcctggacccggcactggaggggcgactgcgggtttcggtgtggtgcgtatccccggcgcgcgcgcccagctaacccctcatccttcccactcctttgttttcgtgttacggtgtactaacactaattagcgatcaaaaggaaagggtcatggatcaactcgacgccattcttacgcatgccctctacaaagaatgcgcctcccgtcctccgtcctggattccgatggaccgcagcgaggagccgcttgaggggtttcactggattgccggcacccgccccagaaaaggccgccacaacgagtgggccccgtttatgctgctcgcgtttttcgactctcaggtctggcagccggagtacccgatcgagaagggctttgacccggtgagatcgaccagagtgtcgatggatagtgcgcacatccccgagtcctccacctgcggcctcccggatggctggacagtgacgcaccatatcccggtggtatctcccgacacgaccgacctcgagcttccagagtccggcgtgatggcgggcgatagcgaccgctgacatggatgctttcgatttcgaaaacgtcgacgccctgagcgactacattcagggctcggccttggctcacccggacctcgcgctggctgcacgcacaacctacacgggcgatggcatcctggtcgctcgctatgttgatgtcagcctgcatgccgtcacgcatgagatggcgcatgtgatcgacttctatcggcgcgggcagaccgagcggtatggccgctatggctttggcctcagctatcccgaattgacactgctggaccaaacgtttccgaatccgactaacacacgcggcattctctgcgagtgccgggtgtttgcgatgcaggcggtcttgctacgagagcacctgggtttcgacctcgatgtagccgatttcttcgccgattcggcgcgcctgatcgccgccagtagcctcgagctcccggatgccttgctcatcccgaggcgtcgggcgatcacgcgacatatgaacgcggaggagaggcgctttcgaaaggcccagcaccgaggtgaagaggcgaggggatcaaacccctacctgaacccctctgtctgctcttaccggcaggatcgcctggagtacgccctcaagcatatggttcgcggataccaaaacgagcgcgcagacgcagtgctggcggattatcgcgaggccatctcgatgttggccaggtatcgtgaggagcccaaaatggcggcctaatgggtgctattgtccggggctgcttacccattatttattgattacgtgttacgtttcttgtattattaactctaacgaatggcttagggcttctacaggagcacggcatgtacgactacacccgcgtcaccaccttcattcctaacttcgcagccgagaaggaccttctccatgttgcccgcctggggcttgctcagcttgagaatcaggctcggaagcatggccctctgacgaacctggatagcgcccgcagagcggtttcggctttggaggttgcgatcgtgtcggccatcaaagatgacgaaaagctcaaccaggcgtatcgggatgaggccgaaaaggatttcggccgtgatggcgagctggagttcgactatggcgcgaccattagtcatggcaccgaggaaggtggcgcctatgtgcaaggctggcgctgggtctccgacacccccgcgatccgcgctctcaaagggctcccggaagaggaatccgagtctcggtttctgaattactatcgctgcgaagactgcgacaccgactgggaggacgagtgggattcgacgtgcgatgacgactgcccgagctgcggcaaagacttctcgccctacatgtccgaagaactgtaactgcccatgatcgcctgcgcccatccggccgggcattcaaattgggaaccagaagatcacccactcacgaggtcgccatcatgacaacgcacaccgaacaatcctcctcggccaagccggtcgagtcccctgcggccgctatggcggaactgcacggcggctattggagcgagcaccctgatttcccgctcgcggactggcggcacgagatcgcgaacgatgatactcgccaatcgtattgggactgggtggtctcgaagtctgaagagggtggcaaaaaggcccgcatcctcatcaccctccagctcgactacgaactgaacggcgagctcccgccattggcgtccgaattggccgagtcgacgatcgagcgcgagatcgagaatggcgggttcacgggcgacaccgcgatgtttattaatgcctgggaccttagggttcgcgccatcagcgaagactgatgcacaacgggttcagagccgccatttgctaacgacaccgtctcccagcacgatggcgcaacccatatcttcatcgacgcaaagaccaggggtacccagacccgtgaacgcccgcgagatgctagaggtcctggtcgacgactacggcctcaatatcaaccaaattgcagcggagtcaggcctccatcagccgaccgtccaccgcgtctattcgggcgacagcgcatcccccaaagaatcgacgtttacggccattcgcgaagtattcgagcgttacgcgaaggagggggcggacagcccggttgcggtacattggtacgaggtcgtgattcgctcctcgcaaacccggacgtatcgcctccaggggcgcagcgaaagcgcggcgcgcgggcgtgccctcgagctggactcccgcttggccggggctgaaagcgccgttctttctgcctgcgcccccgcagtgttgcgacgaactgatcgcgagacgcccaccattgcgcgctcggcccagctatcgaggccggccggccccgtgagggtgtcgatgccggggcaggagcgtcccgccgacctgacgcctgatgaggctcgcgatttgctgtcgtccctgctggatcagatgggtggggagctcgagctgggcaactgaggggctgcagaacgccgcagcactacagcgcaaaggccgagtggacgccggcaatgctgtagatcgcccaatccagctcacgatcctcccaccttctcgatcccccgcacaccggagccaggcatacggccttagggcgaacagccacgagcgcctcgacccgaacctctccagtcgcctgcgagtgcagcagcacgtccacacccggtgccggcggcctaatgcgatccagcagcagcatctccccatcgcggtaccttgggtcccagtgtgtccctgccacctccagcgcccagtattcagggcccgcaggcccgcctgccgggagataccgggtcggcttgctctcaatggcttcagtgctcccgtagatcgggatgtgctcgactggctcggcccccgatgacgcgccgaggaaccattgaagcggctttccaagagcctcagcgacaagctcaagattatcgatcgttatctgaccctcctgaacccatccggtcacggccgagggcgaaacacccacttggcctgcaagccaccgctgcttgcgaccgatctcctcgagtccgaggctgattcttgctcgaataatctctcgtaacggggttatttccgtgcccatgggctcgtgtgtccttgatgtgcctgaggccctggattctacccgttcttacgcgccctgaaaccggggaccaattaatcaccttgcgattgttttcgtattacgttgttgatatgatattgaaaacgcaaacgaaggagcctgccaatatgaaatacgcgatcgaaaccgtgcgaccctaccatgttggcgtaacccattttcgagatgatcaagccctggatgatcctattcaggagtccgatatcggaaagctcattttttcggatggacccaccttcacgctggagtcggacgaagatcgcagcattcggctcgctcacgcggccaccgagcgcatggagaggttaagcgaggagattcgcgcgatcgcagaggcgatgccccatcggggcgatacgtgcgaggagagccagcgcatgtgcctcctctgggctgctcttgatcttgagcgcgtgatcaatggcctttcgatggatgacttcagtcctgcgccggattcggcagatggatggacgccgtacaagctggccggagtcctggaggcgggcggacatgagtgaccccaagaggacctctcgtcacgatcgggcgcgcgcgctcctgaaccatgtggccgaggccggcgcctcggaagagggcgatgcggccctgagatccctcctcgaatacattcgcgaaatggaagccgtggaagacgagcttacagtcgcgtacatggccgggcagggcgccgggcgcgcgggcctcgaggctgagaatgcgcggctcaagcagtttattggtgagctcccgggaaagcttcaagaagccgagctgagagcccagcttggccctggggaggatacgccgctggcgaaggtcgaattgactcacatgtgggactccggcgagtgtgcggagtggatccaggagcaagcggaggcgctcctggggggcggcgaaaaaccggaggaccggcatgattgacgccacccctgcgcgcgtcagccatctgattcgcttccaggtcatcgttcccgtcgagcgcattaccgaagagtccttgctatcgctaatcggatcggaaggcatctgccctgagactgaaggtacgattgagcgcgtaatggatgcactcccacggcacgcgcacgcggaagatagccgccttctcctgggccctttggctgcagcaggggttgatgtgctcggctttgatcgcgggaagagggtgcgcatccccaagggtgtcgcagtccgcacaaccggccctgtcgcccaaacgaccgagacccggcgtgcccagatcattactgtgcacaacgcgtttgccggacactttatgcatgaccacttgcgcgaggccgtcgtgcaatgggcgggctctggcggctactggaagcaggcggctctgaacgacattctggtgaacggcgggggccccgtctgatggcaggcatgggctcccaccaatcaacggtcgcgcaaaaggacgagtggttgacgccacccaagattcttcacgcactggggccatttgatctggacccctgcgccccggtgaatcgcccctggcccacggccaatgagcacctcaccgtgctcgacaacgggttgacccaaccgtggcgtgggcgtgtgtggctgaaccccccgtacggcgaccagaccgggcactggctggaacgcctggtacgccacggggacggcgtggccctgatctttgcgcgcaccgagacggcgatgttcttcgaacatgtctgggcgcgggccgatgcactactgtttcttcgctcccggctgcatttccatcacgtttccggagagcgatctgagcacaactcaggggcgccctcggtgctaatcgcctatggcgaaattaacgtgcgatcgttgaaaacctgcggccttaaagggcacctcgtgcccctgaacggtgagcgctcgtattccgagtcacgcgcg

SEQ ID NO: 3928 - DNA, 15141 bp, synthetic construct
  source 1..15141: mol_type = other DNA
  misc_feature 1..15141: note = Synthetic
gtaggcctcggcctcgcggatggcctgggccgcgccgcggaggttgccagcggcggtggcctgccccacggtcgcgagaaggtagccgtaggtgccgcgggcggccctttcgtactggagcatcacgcccgggccgcaggtgatgccatcgacacgctggcaaatggccagggcgttgtccagctcggccatggcctggtcgtagcgcgagccgttgttgagctgggtggcgttcatgacgtgctggtcgatgacacggaccacgaggttggcggccagcctctcggtctccgggtcggggttcatgcgctcgagcacctgctcgcagcgctggatgacctgcgggaaattgccgttgaggtagtcgatctcggcgagctggtgggccgagggagcgaagttggcgttgctctgcaaggccaggttgaactgccgctgcgccgagggcaggtcgcgggcctggaggaagcggacgcccttttcgtggtaaagttcatgcacccgcgcctgggcctggttgacctggtcggaggtctgggcatggagctgcttgaaggcctcgaacttggccaggaagccctccgggtcggcgttttcgagcccgaggcccgtgaggaaggcggcagtctgcacctgcgcgatgaaggcctggttgttggtcaggaacgactggtagccgcgcagcgagtcgggctcggtggggcggatgccgcgcagccgccgctcgcggctggccatctggtcgagccgggccaggtagtcgtccacctggcgggcgcgggcgtcgaacttcgagcggttggtggcagtgtagctgaagacaatctggctcatcttcaaggaggaagccgcgagcaggcggccctggtcgtcggtggcggccatgggctggtcgtgcagcacgaagggcgggtcgccgcggagggccttggccacgggcaggctctggatgagctggcgcctgtcgtcgagcagctcgagcgtgaagttgacgttctcgggcatcagggcgggagccatgctgaaacccttgtagaggtagtcgcccgtgaagttgaaggccgttgcctcgacgcggacctgctgcccctgcgtcccgccgaggatttccttgaggaaggagacctcgaaacggtactcgagctggctggtggggaccccttgggccgccgcgagccgctcgatgaaatagttggcgggttgcgtggttcctggctcatgttttaccacgaaactttcccggtcattttgctggaaaaccacttggcgctgcccgaaaacatcagaacctgccaagaatagccataggccgataagcaattttgcgtttttcataagctcataatatcaattgatggagcttggacattccgtcgcccgtgcccatcgggatggggcgaaacgccgcccgatgggtaaaaatgcgaattttccctcaggaatcggccctcgggcggcacggaaaaggggggaaggttttcgtggccgaaaaaccttccccccttttgggctcatcgctcgagggcccgcggccttggtcaggccacctgctgcttgctgcgcttttcttggaaccaggcgtgcgcgtcgtcgatggtgctgaaaaacttggtgggcaggcccagcttcatcgtgaagccgaggatgatgttcaagtagtacttcttgaaggcgctgccgtcgaagaccaccgcaccgaacttcagaccccgcgagacggccgtgggcatcacgtagtccgaaaaccacttgcggtcattgggcgagacgacgctctgccttcggatgtccgaaaggaagcaatccacctcgtttttgccgatgtagtcgaggcattgctcgaaagcctcgtggtactgctcgctggtgatgccgcctttccaggtcagcgataccagtttcaagtcgctctcgaagtcgatccgggcgaactctttctcgaagattgttgtaaccatgtttaacaaattgggttgttgattgagggttttcaaaagtaacgtttttttccagagttttctgattcaagaacgtagcaacttgtaatccatcaacacccccaaaacggttaaaaaagttttttggcatttgaaccattggacccaatcgccgactggcagcggaatcttctcctggccaagacctgggcgcttctcatttcaggggcagatgcaccctgacggtcgtgcccagccccggacggctctccaacacaatgcgcccgcagtgctggtgggcgatgtcctggctgatcgaaaggccaaggcccaggctggaggtcttggccttggtcgagaaaaaaggctcgaaggcgcggctggcaaggtcctcggtcatgccgtcgccgctgtcggtgatcaggaagaccgcctccagctccttttccaggaagaaactcgagaccatgacctcgccaacgcccgtaatcgcctgaaaagcgttgagcaagatgttcacgaacatctggctgatcttgctgggattgcaactaatggcgggcagcggcgagagttcaggccgcaggcgcacgcgcccgcggtactcgtggccgatgaggttgaggctggtgcgcaggttctggttgaggtcggcccagcgcatcccgtcttcctgccgcgaaaaggcctggagctgcttgacgacctggttggagcggttcacccctgccctcatgttcttgagcaggacgcccatcgaggccacgacttggtccatctgcttgtcctggcggaactgctcgatgcgctcgcgccccggctcgtcgtgcccgtgctcttggtagagctggtgcagctccaggatgtcgcccaagaaggtttccagggtctcgaggctggcgcccaggtagttgatcgggttgttgaactcgtgcgcgatgccggccatgagctgccccaccgaggccatcttggccgactgtatcagcttggcctgggtatcgcgcagcttgttccacgacttttcgagcacctggcggttcgagcgttcgcgctggtagagccgctccaactcccggcgggccgcctccaggcgctcgttgcgctcgccgagctcctgcctcgactgcgccagctcctcctccatgctcttctgctggctgatgtcctcttgcatgaggaagacgttccgaaggacgccgctggggtcgaaggtcgggaaaacgcggctgcgcaggtgcagcttgcgaggcgcctggccggcctggcccagcgacagctcgccctcgtgcatagccgtgccccggcccgcgaaggccagccggaccacgtcgcccaggctcgaggccgaaacagccggaaactccaggatgttgaactggcccggctgggggatgggaagcccttgccaaagcgaggaaaactcggcgttgcacaacagcagcacgcccgaagcatcgaagaccgagatgggaaaaggcgcctgctcgaccagctcctcgagccgcagctcaccctctgaagccgaggccccgcggggcgaacgcggcgccagttgcccgcagggccatgcctggctcggcctgacggtgtgcagcctggccagcgcgttggccagaagggccgcgtactcggtttcgcctgttgtggtgcagtttatcatcgtccgggttggggtttgggaaatatgttggacaaaaacattgattttcaagggatgacctgccagcgcagcgcgcgctggccctggtcccaggccacccgcacgatgtaaagcccaggcgccagctcctggtccaagaccaactggttttcgccctgcgacaaaggcagctcggaggccagcgaacccacggggatgccccgggcgtcgaacagctcgacccgggcggcctgggcgtaggggacctccaggcgcaagatggtctttccggcgctggggttggggctgaggctggcctgccatgaggcttcggcggccggcaaatggctggccgcgtccacccggagcgcgaagcgctgccaggcctcgcgaccccgcgggtcgcgcaagacgagcgccaccggatgctcgcccaccgaccccggcggcggaacgccccggagccgcggcgaggcgggcagttccctgtcgagccagagccacggcgggccttcggccagctccagctccagcggctcaccgctcttcgaaacccgcgcgtggaccggcagggggatcgcgtccagcagcacggcgtcgagcccgtggctgatggactggtccttggtgaagcgccactccagctcgttccagcctggcactatcggcagctcgtggtagctccactccgctcccgtcagggccgcggcctgctcgccgttgacgtagaggcgcagcaggtcgtagcccagctcggccgagaccttgtacccaaacgaaagcatgtcctcgcgcaagacctccaggccgagcttgaggccgctgctctggttgtgcatgatgtcgcccgagcgcgcggcgaagcggccttgccaggcgtcttcctcctgcacgagccatgcgctggcgcccgtgctctgccaatcgaaggcagaaaagtcaccggtctcgaaatcctcgacctgctggccgacggtggccgggtgcaacaggctgtcggcgcggcatccgccctgccagaaccaggccagctccaggagctgccccagctccagcccggggtccaggtccgcggaaaagaccatccggcaggtatcgccgggggccagctccggcgtgtcggcccaagccctgatccagcgcagcccctcgacgccgtcgcgcgcccaggcctggcccgcgggcaggggccgcgtgccctggttgctcagcgccagctcgaaatcgaccgactcgcctggctccaggcctccgctctgcgcctgcacctgggtgtagccaatggcgtagctgtactcttgccccaaggccgcgaggctgtcgggccgcgagctgaaatgcggcagcaaggcgcccgcctggcccacaagcgcgatgctgggacgcggcgcggccacgcggaaagccgcctggcccctgccctgctcaagcccaccttggccgacggaggccgagagcctggccaggtgcccgtcggggctgtggcagagggccttggcccggcccaagtcttccagccagagcgtgtcgccgggggcgaggctgaagctccgcgcggcggtatcgaccagctccacccaggcgtcatcgcagcggaggacggcctgccacgactcggcggcctggcccccgaggttttcgagcaagatgccgatgccgacctcctggcccgccgccagctcctgtccgtcctgggccaggcgcaaggcccgggccaccacgaaaggcccctggggcgccagcacttcgacactgcccaggtgcggcacgcggttggcggccgtggccaccagctcgagctggcaaggcgcatcgagcgcggccagcgagagccgggccaggccggaggcgtcggccagggccgtggccacgagctcgcctgcgcggctgagggccacccgtgcgccctcgggggcctgcacgtcgagccaggcctgccccagggccaccgaaggagcgtaggccagtgacatttcctgcggagtgccccagtagattttcaccgaaggatcgcccatcaggtgatagacctcccagtagtagcccacccgcgagccgctctcggtaacggccaggttggcgccctgcgcgaagtagccttgctcggggcggtcgggcgcgagcgagcccgcggccaccgagcggtcgaagaagccccgggtggtgcccagcgggccggggttggccacgatgctgccgaagcccacggcccaccagtagtcctcgtcccagtaggtgtcgttggaggccccgatgtagccaatggcgcccctttgcggcaggcgcagcacccgctcgccgaagcagtcggagttgaatcggttcgactggcagcagttgccgaccatgagccagtacttgccgtagttgaggatctgctcgagctggccgttgccgatgggcgggtcggaccagccgttggcgctgcaatgggcggtgtagttggccaggcttccgccgaggctgaggctttgcagaatggccgcctgactgcccgagggcaggggctgaaggtaagcgtcggcctggaagccgttttcgggcgtgaagaaatgctggcgggcgtagttgatctggccatttccccagacggcctggtgggcggcgtcggccccggccacgagcgcggcgcggtcgaggaagccatcttgcggcaggaggtacttttcgtaggccagggtcttgtcgatctggttctggagctcttgcggagtgttggccgaaaaacgtccgtagagcacctcggggaaaaggtcgccggtgtattcggcgtagggcaggtcggtaacatggctgccgaaagacccttggaaggcgggcaggaaagccacatcgccgaccagcagaaggtagtcggtcggacgccagcccggttcggggtcgaggtaggcctgcgtggcccaggcgcggatctgcgcggggctttgcccgatttcgtcggtgaaggccaggcgcacctggtagcccatctgccgcttccactggaggaaaggctggagcacctgctcgaaatcgcggtggctgaccacggcgaaggtgggcggcaggtcggcgtcctgctcgtgcgccgtgttctggggcggggcggcgaggcgggcgctgatgctggcctggcaggcggggatcgcctccaggctgtcgccgcgcaaggccagcgggcggaactcgaagcggtagatcttgtgctggcccatctggccgaggtagtcgaggtaggcgcccgctcctcgcggctcggcgggcgaggacggccaggcgctggcattcccactcttggaaagctggatgggcactcgggcgcattcgtcctcgggccagagctcggcccaggcgcggcggctggccgcgccctcggcctcgagctccagctcgacttcgagcgggacgcgcagcagcttgcggaagaccggcaagtcagcctgtccctcctcggcgctcgacatgggcgcggccaggccgagcgccaggccgtcggggcgaggttccagcccggcctggcccatccggaactcgaggctccacgccaggcgctccgggtcctgcctccagagcaaggcatcctccaggctcttctggccccagcgccaggccaaggcgcggccaccgtccaccaggctccattccggctcgcccgagggagactgcgcatgggcatttaccgaaaaaagaataaaaatgagaagcgcccaaaggcggatattctgggacgattggaagttcggcatggcctgatgcttggtttagggctttaaagatgaaaaaaagcacggtcaagtcaaatcggcggctttcgcgaacaccacgaggattttttcgaatatacgcttttttcaaccatactcctgtgcaaagcgtgcgccagttggtcgtattcggcaggaaaagccctgggcagaaatcccaaaaatattcccaaagggccaagtcctatctccccaaaaaagcaatggacaaaggccctagcggctcgatttgaagaaataattccgctatcccgattcgtctggcccaacttggagggggcttgggcgtacaagagaggccacatttccaaaaccaattcccaaagccatgttcaaagaagaaaaagacatatgcccgaaggcgacacgctgcccgcttttcgacggcaggctgctgagcatcccccaggcggccgaatcgtacaagatgctctactgccaggccgggcgagaaaagtacaccgtgtgcaagcgctaccagacctcggagcgggtgggcacctgcggcaagttcgtcatgccgaactcaagccttacggtggatgagatcatccagaaaatgcgtgagcaagggctgatcaactagcccgccgcgccccgaggcgcgtgggcatggccttcggccacggcccatgatagcaagttgccatccaacgtgatagacggccttgaaacgtctttgttttcgcattgaacccctacggggttctggttcggggtggttctttgctcccccggatttcatccggggctattcagattcagtcccttcgggattggaggaacagcccgattttgtcggacgctggtacctgcgatgttccacccatgaacgcaacttggtaagcaccttggcattaggattttggctatattggcgacacaaactggatggcaatgacaaaagacgaagccagggctaggatcaaaatgctgatggacaaatttagcgctcaaaaggactacgacaaatcgacgcactacaacgagacgcaaacacggcaagatttcatcaatcccttttttagcgcgttgggctgggatctggacaattcaaaagagcaattggaaacctaccgagatgttcggcacgaggacaaaatcaaggtcaacggccataccaaggcgccagattactccttcaatatcaacggaaagcgcaaattctttgtagaggcaaagaagccttcggtctcaattcgcgaaaatccagcccctgcgttacaagtcagaaattacgcctggaatggtggcctaagcatctcgattttgactgattttgaagaatttgccatttatgattgcacaaggaaacccaaaacagttgagaatgcgaacgcaaagcggttgaagtacatttactatacagattaccttggcgaatttgatttcatttgggacacatttggttttgagagtgttgcaaacggcagcatagaaaaatatgcgaaaaacaaaatcaatcttaaaaaggcagaacctgttgacaaggaatttcttcggacgcttgaaaaatggcgagagtatcttgccgtctcgattgcattgaacaacaaaaaattagaagaagaggaaatcaatttcgctgtccagcaaaccattgacaggatagtatttttaaaagtttgtgaggataggaaaattgaaaatgaaaacaacctgctcaaaaccatccactcgggaaactactattggaatctttatagctatttccaaactgccgaccaaaaatacaattcagggttgtttgatttcaagaaagacaccataaccaagaatattgtcgttgaaaataaaatcatcaagacaatcataaccgaactatacggaaaaagcagggaagccgaagcggattttggattcaatttcgccattattccagtcgagatcctgggttttgcctatgagcaatttcttggaaacttttaatcgaaccgtttggaattgaaaccaaaggggccaggaatgcggccttgtggacggcggcgcttttaatcgaaccgtttggaattgaaacaacatactaagaatggtcttattttatgtgcgacgttcttttaatcgaaccgtttgggtacgtagttacctaattgcaatcctataaaggccaatgcctgatattcaatgatttataagttgcgatttacaagtttggctaagcaaattttgaatccttacttatctgtaaaaatccatccaatccctgccatcagctttcatttccacaccaattcaacacgccgctggcgatggggtattccatcctcgaatgcagttgggcgttggggtgccgctggggggcaattcggacgaaccccgacgggcttctggcttgccagggttcactgtcgcgcagatttcgtccggatctatacaagttcaatcctgaggagattgtcagatttgacagactttgatggacagagtgggctggggtggatatttcaccatcgggtgcggcagcgagttggcatgaggccccacaaaaaaatgcctctacccgagggcagaggcttagttcattttgaacttcggctcatgcttgcgcaaggccttattgcaataaggttctgaaaggaaataatgctggcacaaatgtaggatttctttttacatttacaaactaaaccaaaaaccatatgtgatttttttccaccaatgtttaaatcatttttcaaatggttcaaaatcagattgttttcggcctcgaccttggaacaaattccgtggggtgggcagtggttgaccttgagcagaacatcgttctggacgcaggggcacgaattttttcagcaggggtcgccatcgacccaaaaaccaagaaggaatcttcgctgaacgagcagcgcaggctgagccggcagatgcgccgccaacattttcgccggaggctccgcaagcaccgggtgctgcggaggctttccgaaatgggcttggccccaacggaccaggccgagctgcaacgctggattgccgatgatccttacgcgctcagggccaaggccttagatcacgagctcagccgctgggaacttggcagggccttgttccacctcacccagcgccgcggtttcctgagcaaccgcaagggagccgccaaggaggacggaactatcttcgagggcaagaagggaagcagcatcatccccatcaacctcacccaggagagcatggaaggcttccgcaccctgggcgaatacctgcacagcatcagcttcaagcccggcgaggcttccgacgcctcccggccccggctgcgcaaccgctacaccctgcgctcgatgtacctcacggagttcgaggcgatctgggagcgtcagcaggagttccaccccgagctggggccggacatcaaaagggagctgggcgatcccgagaagggcatcctcttcttccagcggcccttgcgatcgcagaagtcgctgatcggcaaatgcaccttcgagcggggtcgggccaaagaccctgttctcgacaagtgggtcgagtccggcaagccgcgctgtcccatctcgcatcccgacttcgagcgcttccgcacctggcagttcatcaacagcctgcgcgccggaggcgaaaagctctcccacaccgaccgcaccaccctcttcgaggagttcctccgaaaggatggcgagctgaccatcaaggacctggccaagaagctcaagcacctgtcggacaagaagttcaactacgaggacaacgacaagcgcccaggctgcaagaccatcgcccggctttcgggcctgatggggcagcaggcatgggacgccggcgggcccgagaagcagcacgagttgtggcacgccttcttttccatccagaacgaggagcagctcgaaaagtacatcctcggcaaaggagggcttagctccttgcgttggaaagagttctgctatccgaagaagacgaagaaggacgacggaaaaccccagcgcaagcgcaccctccagctcgaggacggctacgccaacctcagcctcaaggccattcgaaacatcctgcccttcttggaggaaggctacgagtacgaccacgccgtgatgatgggcggcatccgcaacgccttcggcgcgaaggcttgggacgccctgagcgatgagcagcagaaggacctgaaggacgcctgtttccgattccggaaggaagtgcccgaccgggagaccggagaaatccgcaagccccaggaaggcgaggtcatccgcgagctgcgcgactacctgcgcacaagctacaagctctcgcacaaggccgtcggcaagctctaccaccacagccagcaccagcgcgccagcggaaccgccgccgaactgccgcaggtgcccaacctgcgcaaccccatcgtccagaaggccctcggccaggcccgcaaggtcgtcggcgagctggtcaagcgctacggaaggcccgcgcagatcaacgtcgagctggcccgcgagatcaaggtcagcgccaaggtccgcgagaagatggagcttgagaaccgcgaccgcgaaaagctcaacgccgaggcccggaaagtcgtccgcgagtacggcctcgcgcccagccgcgagaacatccagaagtacctcctgttcaaggaaatcgacaggaagagcgaagggagcatcgtcacgccttattctatggatggaaaagccatcaacctcgacaagctcttcagccgcgactccagcatccagatcgagcacatcgtgccccgcagcgtctcgctcgacgacagcctggccaacaagaccttgtgcgaggccaacatcaaccgcgccaagggcaacaagacgcctttcgagttctacaccagcatcggggccgactggaagtccatccaaaagagggccttccagctcctgccctaccccaaggccaagcggttcgtcagcgagacgaagctcggcctggacgacttcatcagccggcagctcaacgacacccgctacatcagcaaggccgcggccgccttcctcaaggaaatctgccccaaggtgcaggtctcttccggaggggttaccgcccggctgcgcaagatctgggggctcgaggccatcctgggcggaaacatcctcctggaggagccttggaacgaggccgaggagggcgaatacctggcttgggtcagccagggcaaggtcctggagctaatcgccgtggacgaccccgactacaagaagaagaacgaacagttcctcaagcaaggagcggccctgcgcggatacgtcaagaaccagcgcttcatccccgagaaaaaccgcgacgaccaccgccaccacgccgtggacgccatcgccgtggcctgcgtcaagccccagcacgtccagctcctggccaagatcagcagccacgacgacagctcacagcccaagcccgagttcaaggccctcgacccctgggaaggtttcttccaccaggccaaggagcgggtccaaaagatcctcgtcagccacgaaatccgcgacaaggtgttccagaaggaccgcaaaaaggtaagaaaggacggtaaggtcatcctctccgaaggtgtttccgcccgcggccaactccacctcgaaagcgtctatgggaagcgcagcgtcttcggcgaggaagccttccaccttcgcaagccgctggaaagcatcaccaaggccgcccaggtcaacaagatcgtcgatcccgccatccgcagggtcgtcgagcaggccatcctccgcgcccatcccgccatcaagctcgatgacaagtacgacgtgccgaaggatgcctttttcgccaccgaccccaagaccggagccaagcggcccaaggtcttcctccgaagccagaacggaatcgacatccccatcctcaaggtgcgcatcaaggaaaacctcggcaacgcccggcctgtcaaccccaaggccacccagtgggtcaaccccaagaacaaccaccacgccgccatctacaagggcacggatgataagctcattgacgaggtcgtctccttctgggacgctacccagcgcatgcgcgacggaaagcccgccatcctgaaggtgaagcccgacggcagccgcctggtggccgccttccaggccaacgagatgttcctgctcggcgtgcccgaccgcgagatcgaacaagtgctcgaaagccctgtcctgctcgccaagcacctctaccgcgtgcagaagatgtccgacagttactacgtcttccgcctgcacaaggccgccaccatcgagaacgactctgaaatggtacgcatccagtccatgaaagcctggcaggagcacaaccccgtcaagctgcggatggacgtgctgggcaagctggttcgcgactgatcccccctggcagagtgtccgcccccggaacggcgggcggacgctcctttctctttgcatttttccctttcctcaaaaccgaagcccaagcgcccatgattcagcgaacgctctacgtcggcaacccctaccacctttcgctcgagctgggccagatggtcttgcgcccgaaggatcccgcggcccaggccggaagggtccccatcgaggacctgggctacctggtgctcgacaacccccagatcagcctcagccaggccctgctcgccgccctcgggcaggccaacgtggccctggtggtctgcgacgagaaacggctgcccgtggcccagctcttgggctaccgcggccaccacgcccagaacctcacctaccgccaccaggtagccgcctcggcgcccctggtcaagaacctctggaagcagaccaccgtggccaagatcctcaaccaggccgccctgctccaaagccgcgggctgcccgccgacgacctccgcgccctggccgcgaaggtccgcagcggagaccccgaaaacctcgaggcgcaggccgcccgaaagtactggccccgcctgttcggacccgacttcctccgcgaccggcacggcccctggcccaacgccgccctcaactacggatacgccgtcctgcgcgccggggccgccaaggccctggtcggcgccggactgctgcccgggctgggcatacaccaccacagccgctacaacccctactgcctggccgacgacatcatggagcctttccgtcccttcgtggaccaggccgtggcggaatggaccgaccaggaacctgacgccttcgaactcggactgcccctcaaggccgccctgctcgagaccctccaagtggacgcccacttcctgctcatcacgcgccccttggccctggcactggcgcagtccgccgccagcctggcccagtgcttccgcaaagaggcgcgcaacctggcctttcctgaacttttcaagccttgaaacgcccccccctcgaccatgacaaaaaaccgccttaacgcctaccaaaacatgtggatgttcgtgctttatgacctgcccgtaaccagcagcgagaaccagaagatcgcccagaaattccggcaaaacctcctccgcgacgggttcaccatgctccaattctcggtctatgtccgccactgcgtcagcaacgagaaggccgacatgcaccgtggccgtgtcctggcctacctgccccccaaaggaagggtcagcatcatgcgcatcaccgacaagcagtatggctccatcgagcaccactggggaggtgaaaagccgcccagcaaggagtcgccccggcagctcatgctgttctgagtctccccccgcacaggattgaaaaaatgggccggattccctgcgcgagcagggatccggcccatttttttcgtcctcaaaagtgccccaagcccttgcctggcaagactttgcggggacatctaatttaggacatttcctttcagaaccaaactacaa

SEQ ID NO: 3929 - DNA, 23372 bp, synthetic construct
  misc_feature 1..23372: note = Synthetic
  source 1..23372: mol_type = other DNA
aatagaaatgctatttaggactgcagctaccggaagcgatgatgaaatagcagagatcgtggatgaagtacatcccagagcagtaaaaaaagtatatgaatttttagagattttggtgcagcaacatgcatggtgtgcccttgagtatgatgaccgttcatttcggtatgcagattatgatcagctcacatactcttcggctcggctgaaagacgacaatattcgagaagaaacagaaagttacagaggagagtttatcggcgttcttccttcaagcaggacatttgagtttaaactttccgatcaggagggtgtgcttcggggaaaaatagatagtgcgattgatgacccagatcttttgaaccgggaatggctgcataaacctgtcactgtctcttttaatgtcgttcaagttggcaatggtaaaccgcgctatacgttaatagaattggaatctattacattgtagcgtcctagggtttcaacaggagagggataaatactggcaaaatcatagctaggaccgccgtaacggtcccgattgctccttttgcaccgtggcaaatgagtctggaatcaattttatcagaaaaacctttaggggtatttaaatatatgcaatgtttttaaggggaagcaatgaatgaagaacaactagaaaacctctgccttgattggttttatgatggagggtggagtattttccatggccctgacattgctcccgatggcgaaaacccaaagcgcaaagattacgcccaggtcatactcaacgatgacttgcaagccgcttttgagcgcaacaatccccatttgccagccgactgtttcgaacaggtcctctccgccgtcaccaaacccgaaagcctcgatcttgtcgccaacaaccgcgcctttcaccgcctgctgcttgaaggggttccggtggaatacaaacaagatgatgaaatcatcaatgaccatgcgtttttgatcgattttgacacagtggccaataacagttatgtcgccgtcaaccagtttaccatcaccggcaccaaacagccgcgtcgtccagatatcatctgctttatcaacgggctaccggttgcggtactggagcttaaaagccccgctgatgaaaatacggatatatgggatgcatacaatcagctgcaaacttacaaagaggagatagccgatcttttcatctgcaatgaagcgttagtcgttagcgacggatacacagcacggatcgggtcactgacggcaaatcaggaacgcttcatgccgtggcgaactatcaaaaacgaagatgacaagccgctgctggaatggcagcttgagacaatggtgcgtggctttttcgattgtgagcttttactggattatattcgattttttgtactttttgaaagtgacggggagagcatcatcaaaaagatcgcgggctaccaccagttccatgccgtgcgcgaagcggtcaaggcgacggtcgctgctgcacgggaacctagtgaaacctctgctttagagcaagatacccaaacgggaagtaaaaaagcgggagtggtgtggcatacccaaggatcgggcaagagcatctccatgacctgctacgctgcgaaactgttgcaacaacccaagatgaaaaacccgacgctggtagtagtgactgatcgcaacgatcttgacggtcagctttttgaaaccttttccaacgcgacagagctgctgaagcaaaccccggtacgagtcaataaccgtgaagagctcagggattttctggccgagcgggagtccggagggattatcttcaccacagtgcaaaaatttgcgctccaggaagatgaggcaaaacaccctgcactcaatagccgtcacaatattgtcgttatctcggatgaagcacaccgtagccagtatgggctcaaagcccagctgaaaagggacggcacgtataagtttgggtatgccaagcatctgcacgatgccctgccgtttgcttcctttatcggctttacgggaacaccgatctcccaagaggacaaggatacgcgagcggtatttggcgagtatgtgtcgatctacgatattcaagatgccgtggaggacggtgcaacggtaccgatctactatgagtcacggctggcgaagcttgacataaaacaagaagagatcgccaagctttccgaccaggtggaggaggtgatcgaagatgaagaggatgtggggaaccgtgaaaagaccaaaggagagtggagtcgcctggaaaagcttgtgggatcgacacctcgcctaaagcaggtcgcggccgatcttgtcacacactttgaagcccgcaacgccactatggatggaaaagggatggttgtgacgatgagtcgggatatcgctgcacatctttataatgagatcgtagcgctgcgtccggagtggcacgatgatgatcctgaaaaaggggctataaagattatcatgaccggatcggcttcagataagccgctgctgcaaccgcatatttatagcaacaaaacaaaaaaacgtttggaaaaacggtttaaaaatatcgatgatccactgaagatggttatcgtgcgtgatatgtggctgacgggctttgatgcacctgcttgccatacgatgtatatcgacaagccgatgcgcgggcacaatctgatgcaagcgattgcacgggtgaatcgtgtctttaaaaataagccggggggattggtagttgactatatcgggattgccaatgagcttaaacaggcgctgaaaaactacactgatgctaaaggcaagggtgaaccaacacttcgggcagaagaagcatatagcattatggttgacaacctggatgcgattcggggaatgttttctaaaacatcagaaggtgagggtctggatgtttccgagtatgaaacacaggcacaaaaacttttggtaccggcagctaactatatactcggtttagaagatggtaaaaagcgtttttttgatcttgttgtgaaagcgagcaaggcgtattcgctttgtagtactttggatgaaacccaaaagtaccataaggagatcgctttttatatggctatcaaagctgcactggcaaagtttacgtcagttgacaaaaagcgcacacaagaagagaaaaactctgctcttaagcagatactcgatagtgctgtgactgccgaaggcgtagcggatgttttttcactatgtggcttagaaaaacccaatataggactgctttctgaggaatttctcgaagatgtacgtcaaatgccgcatagaaatttagccgtagagttgctagaaaagttactcaaagacaacatacgttccaaaacccgcaacaacgtggtacaagaaaagagatatgccgaccgtctggcagaaacactgcgtaaatataacaatagagctatagagactgcgcaggttatagaagaattgatccagatggctaaagagtttcaagaagagataggacgtgaagcccagcttggactcaatcccgacgaagtcgctttttatgacgccttggccaataatgagagtgccgtgcgaaaactgggcgatgatacgttgaaaaaaatcgcggtggagattacccagaagcttcgcaaatcgacgactgtagattggcaagtgcgtgacagtgtgcgggccaagttgcggatcttggtgcgtcggacgctgcagcgatataaatacccgccagataaggcaaaagatgccatagagctggtactacagcaagctgaagcattgagtgcctcgtggacggcaacaggacaatagttgaaaagacataaacatcacgtcaacattttactataatcgcattgagatcatgagaatccaaaaacgattgaaacattgtataggacctttgaaacctctttgcaatgcacgagtacatataaaaaaagacttaaaatatgatattttggtgtgaaatagtgcgcaaaggcgatagatacaaaaagtcgatgaggtaaaaccaggaatgctgaatgaattactattaagatttttgaaatgtatgcttgattgaaaacttggtggcgggagaaggatttgaacctccgaccttcgggttatgagcccgacgagctaccaaactgctctatcccgcggtctgtgtaaatagaagaaaaaacttaaactgtgtggatggggtggagggattcgaacccccgaatatcggtaccaaaaaccgaggccttaccgcttggcgacaccccattgcgtttaagttggtggaattatatagaattttttttgcgttgtcaagggatttcgatataatttatgaaaatttttattactgggagtttttatgccaaatgcaatacaacgagtagaggaagctatcgaagagatcaaaaaggggaacatggtcatcatgatggatgatgaggacagagagaatgagggcgaccttgtctacgcgtccaacttctctacccccgaaaaggtcaacttcatggcctcatacgccaaggggcttatctgtgtgtccctttccaaagagatagccaacagactggaactcgaacccatggtcaacaacaacacctcctgccacgagacggcgtttaccatctccgtagacgccaccgaagccaagacggggatcagcgctgaggagcgcgatatgaccatcaagctgctcgcttccaagatcagcacccccggtgatctggtcaaacccggccacatcttccccctcatcgccaaagacggcggggtactggagcgaacgggccacaccgaaggctcggtggatctgtgcgacctggcggggatgaccaaatccgccgtgatctgcgaaatcatgaagcccgacggctccatggcgcgcaaagccgatctggaaggctttgccaaagagcacgagatgaagatcgtttatgtttccgatatcgttgagtaccgtttggcaaaggagtcgctgatcaaagaactctctagcgaaaccatcgagttttgcaactcgcaggtacggcgcctggactttaaagatcacgacggcagagtgcagaccgcgcttgttttcggtgaaacgaccgagacgagcaacgtcaagtttcacaacgtgcgtttggacaaggagctgtttttggacaatgaaaaatacaactactttacaaaagcgatcaagtaccttcaggaaaacggcggtgtgctgatctttttggatcgtgacgacaacgtcgatgacaagatgaaagagtacggggtcggggcgcagatactcaaagcgctgggcatcagccggatcaatctgctcgcttcccacgcggggacggggtttgtaggtatcagcggcttcgggctgaccgtagagaaagagacggttatctaaaacagcgtcgcgcttgcgctcgggcgcagaaagggcggagaatccagtacggttcttcgcaccccggcgatcaccgcgtagtcaaaactctcctgcagctgctcatacagctgttcaagatttgcaaaatcctccagatacagcaccttcagatatcccagatgtttatcgcagtagtctttgatggcgtcaaattcgtcgctgaaaatcagcacgcgcgaactcttgccaaactccacgctttgcaggttgcggtcgcaaaactgggggtaaaagtagctgctgtagtgcagcttttcgacgttatacgccatgttgctgcccttggcaaaatcgatgagtgaaaccagcttgtccacaaaaaagggcgggatcgctactttttggtagtagcggttgtcgtagatgaagctggattcaaacagcgtgccaggcaggggggtgtactcctggggcagctgggtgatgtagctgatatctttggtaaaggagtttaaaaagctccggtcgcagcagatgaagacctgcttctcgccaaagatctttgccagatcattgatcccgctgcgcaaaaagacgatatttttatcggtaaccatctgctccagcagttcaaaccccagacaatccacgtagtaaaactgcttctcgtgctcttcgaggtggtagcgcagcagcttctttgacgccgttttgagctcatctacccgcagccacgcgatctcgctgtcgagtatctccaccacgcggtccacgatgatcccgtacgcgccgttttccacggctttggggatatcatcgtactcgtaggcaaaaaacagatcgccccgtttgaccttgttggcgtcaaatacggggttgtaaaaggaggtgattgcgggggtgttgagcaaggaagcgcccgtaagcgctttgagggtctctatcctcatccaatatcgctgcctgctttgcgtgggtgttcgggacggatgagagaaagtcccttcttgtctttggccgccagcagcatcccttcgcttttgagtcccatcagtttggcgggtttgaggttggcgaccatgcatacttgcgaatcaagcaggtctgcggcgctatagtactttttgatcccggcgaccacctgccgcggggcggcttcgccgatgtcgacttgcagcagcagcagcttggagcttccctccacctctttggcttcgacgaccgtgcccactttgagcttggtttcaaagaattggtcgatggtgatgagattgaggtcctcctcttgctcctgctgcttttgctcctccgcgcccttgtcatctttgagcagctcctcttcgatgcgggggaaaagcggcgggatcttggtgatgacaaaatcctcaagcacccctttgtttttgatcagcttctcatacgcgggcgtatcgatgctaaagtgcagcgcttcggcgatcttgtcggtggttttgggcataaaagggtgcagcagcaccgtcaccttcgccaggatattggcgatgagtcccacaagcgccatcgcctcttcctctctgccctctttcatcagcgtccagggctggtagcgatcaatcgcctgatttgccaccgtcagcggcttccacagctcctctaaaaagcggtggatctgcatctcgtacagcagcggttcgatggagccgagtttgtcgttgacttcatccagctcgctggcgtagtatttttcgatatcggcgcctttgatgttgccctcgaagtatttgccgctcataccgatgatgcggttaagcaggttgcccagatcgttgcccagatcggagttgatacggtcgatgagcgccttttggctaaagtcgccgtcttgtccgaaggggacttcacgcatcataaagtagcgaaaattctcgatcccgtaagcgtccgccacctctttgggatcgaccacgttgcctttggatttgctcatcttctgcccgtctctggtccaccagccgtgcgcggctacgtgcttgggcagctccagccccagactcatcaaaaatgccggccagtacaccgcgtgaaagcgcaggatatccttgccgatcaggtgcaccttcgccggccagaactccatttttgcctcatcctgcccgtagccaagggcggtgacgtagttcatcagcgcatcgagccacacatacatcacgtgtttgggatcgttggcgctttttggcagcttgacgccccactcaaagctggttcgggtgacggagaggtcgttgagtccgccctcgacgaagcggatgatttcgttgcgtttggagcgggggaggatgaagtcttcgttttctttatagtactgcaaaagcttgtcctcatactttgagaggcggaaaaagtagctctcctcttcgatgacggaggtagttttgccgcagtcggggcaaaactcgtcgttgaccagctgtttgtcggtaaagaaggtttcacagctgacgcagtagttgccgctgtagacatctttgtacacgtcgccgttttccatcatcacttcaaaggctttttgcacgccgattttgtgctcgttatcggtggtgcggataaacttgtcgtaactgatctcaaaatcatcccacaggtttttaaaggtcgcactgatctcgtcggcgtactcctgtggtgcgcggcctctttgctttgccgattgttcaatcttttgcccgtgttcgtcggtaccggtgagaaaaaacgtattgcgccccacaagccgggagtagcgcgcgagcatatcggcgatgaccgtggtgtacgcgtgcccgatgtgcgccacgtcgttgacgtagtagatgggggtggtgatataagtgtttttacaagacataatgacctctctcgtgttgatattttttagtataaaatgttttagaactcaaagccgccgccttcgcctttgttcatgctttgatacaccgctttgacgtagtcgatgcgggtttgacactccaggacctgttcgcactcaaagcagctttgcaagccttgctcctgctggcacttttgcagcgcttcggtgtattcttgcagctgcagctcgtacttatcgatctccataggtcgctactaccctttcgatctcggaatcggagccaaagaagcagggcgtcgtatcgtgggggtgcctgggtgagaggctcagtacatctttcgtaccctccacggcgcgaccgcccgctttttcaaagatcagcgcaaaggggaacacttcaaacagcatccgcagcttgccctcgggcttgtcgctggtggcggggtagctgaacaagccgccgcctttgagcaaaatctggtgcagatcgggcaccatgccgccgctgtagcgcaggatatacccctcttcaaacatctgctcgatcatcgctttgtggtgcgcgggccagttttgctgcgtagcgcccgaggcgttgatgacccctttgggttcaaggtttatggttttgacgtcgataaacgcatcctcgtgcaggcggatcatctggacttcgtcgctttctttttgggcaaagaccgcttcgacgcgggggccgtagaccacgtagcagctcgcgacgatgttttcccctttgggttcgccctcgtagataccaaagatcgagcccacactcagattgacgtcgatgaggctggaaccgtcgaggggatcgtagcatacggtgtagacgccactgtcatttaagtgctggtaaccctctttctcttcgctggagatggttttgatcgagggaacctttctgagctcctcttcgatgatctggtcgctgaggatgtcgagtttgagctggtcttcgccggattggttttggttttggctgtatccgctgtcttcgctgatgatcgcgtgctggatgcgtctggcgctggtcttgaccgcttcaaaaatctcgttcatgggttacacttcctttgcgtttttttcgatccaaccgatcacttcggcggtatcgttgaggttgagaatatcgatatttttcgggagttcatatttgttgatatcaatgctatcatcgatcgctatggcttcgctgcaatcaaaataatcggtatcgatcccgttgcgaaagatcgcgatgcgcggcagcggcagcgtcttgagcccctctacaagcaagatatcaaactcgccgatcatatccatcacctcctcaagctgcttttggcgcttggagaagtaggtggtgcgggtaggggagaccaccaccgtctccgccccggtttggctgaatttgtaactgtccttgccctcaacgtcaaagcgcgccttgtccttggggtcgtttttgatgatcgccacctctttggagatgatcaactccttggctatcttttctataagcgtggttttcccactgtttgaaggtcctgtaaatgctaccgcgtatctctttttcatggggaaaattataaccaaaaagaacttatgggtttattgtgttttgacttcttcgggtgaggtgtcagtatagtggtctgcatgaaagagtaatttggcagtgtcgagattgcgccgggcaaaatagagccactctatagcatatttttttgttgaatatgacctattgaaacctgtaagcaaagttttaataaaatgaaaaatatatattatctatataaggtttagctatgcaggaaaagatattatctctggatttgggtgtgacttcgatcggttttgccgttttggaaagaaaagatgattttcactacagtcttttagataccaatgtgtggatgcgtaataacccgtttggagacggtgattcgcctaagaaactgcggcgaagctataaatcgcaaagaaatctaataaaaaagcgtagaaaaagagctaaagatgtgcgcagatgcctcattggaaatggcgtcataacaagtgatataaaacaggataaaaaaacatatatagactcatggagactgcggggcagggctgcgtatgaaagaaagctatcacgactggagtttttaaaccttatgcagttttttgcaaagcatcggggttataaatcgctgagtgttgaggatatgatcgctgagatagaagccaaagatcaaatgaaagccgagtgcgaaggaggtgatgaacctcagccgccgagccttgaaaagtggcaggacaggttagcgtatatggatgcgctcaagtgtcaaaacaaagataaaacggtcgggcagatcatttttgatatggaaacaggtaatgaaacaccgacttatagaaaccatgatgattatcgttatatgataaagcgtgaggatgtggcaaaagagattgaacaagtatttgcaaaacaggaagagtttggttttttcccaaaaaatacaagtgtgaatactctcaaagaacagatcaaagatatcatcctcactcaggaagagctgcagcctatagaggatatgatcaatcgctgcgcactggataaaacgcaaaagtgcggatcactgtactcatacagctatgattattttaaactcttaagaacgcttaatgagatgaatatcggtaaagacacaaaattaaccatagagcagcgtgataagctgctgcgtcatgtgatggagcggatagatcgttttgaaagtgtggaaaagctgacggtcaaagaggtgcgcaagctgcttgggcttgaaaaagagatcaagatcaacaagatgcttgatagtgacccaaaaaagaaaaaagataaaacaaacgtattggtaaagtttaaattttttgccgcgctgagcgcgcttgatcaggagacgttacagaaaatctttgcccatgacaaagcggtgcgaattttggatgaactcagttacgcggttttgatacataccagcccaaaagcgcttatggcaaacgcccgggaaatactaaacagttatgatatgggattgagtgaggataaagtgcagacccttatcctctcgctgtataaaaacaaaccagccggcaataatagtggcaagtacagctttaaaactctttatcggttgattcctgaacttgaaaaggaggtgatcggtgaaaatattgcgaaacaaaaagcgggatttgatgagcacaaagaggattacagcgggtatgacaaggggatagagtatctggatttgaagcagtttgaaaaagatgaggatcttatctcgaatcatagtgtcaaaagtcttgtatcgggtgcgttgcgtttggtaaagcatctgagtaaagaacacggcgagtttgacaagataaagattgaatcggccagagaattgagcattcccgatgaagtacaaaaagatattgaaaacgctcaaaaaaagaagcaagaagaaaaagagcgcatcaaaaaagcatacgcacaatacaaagaaaacctcacagacagagatgtcaaaaagatccggctgtgggagcagcaaggggagatgtcactgtatgattcgggcgtgaagataggagtagcgcagctgctcagcgaaaaagtacagatagagcatatcgtgccccgcgcgttaggtggtgtggatgctgattacaataagatcgtggatttttctaatctcaatagcaaaaagggcaacagactgccgatggactttttgtctgaagataaaaaggaatcatacgcggaagttgtaaaagcgttgaaaaatgaaaaaaagatcaatttcaaaaagtttgtcaatttgatggcagaaaacctggataaaacttttcatgaagtgcgtgatagtaacctgatgcacgctaccagctacgcggagatacttttgggtgatgtgctcaagcgttactacccttttgccaatgaagcgtacagatcaaacggagtaggggtagagcacatacagggcagagctacttcgcatctgcgtcagctgctgcacgtggacgcaaaaagtcgctataccaacttccaccacgccgaggatgcgatcctggtcggagtgctttcaaaaagctatctgcaaaagctttcaaaactgtatagagagaactacggtactcaatacctggacggtaaagaagtgacaaaacagatatcaccttttatagagggagcgaagcttgcagacgtgatctatgatttgcgaaagcgctatgaacaggaccttgaaaccagtccgttttataaagattttcacggtgatctgcgggcggtgaagttttttgtcagcaaaaagcccatcgatactaaagcgcacaatgagacggtgcagggcaaagattactcctacagggtttcctgggaaaagctgcttgggaatataaaatcaaaaccaaaacctaccactgatccgacaaagtttgcaaaagagtttgataaagagatcatcgggcgtgtaaaagtgcttcaggaaaatcctaaagatcccgtggcaaaagcgatagtccagcgaaagcagcagatagtgtctgctttaaactccgcggcgtttatcaacactgaagatgaaaaagaacagttaaaaaaagagatcgacaggctatggagcattccgctgaaagattctcaggacaatgatatccgtaggattaagcgggtaggtgaagaggtcagtataaacataagaggcggtaaagccgcaaccgccaaatcgctacactatgttaagtttatctacggtgccagaaaatttacaatatcgcgggtagatatcagaaacagcgctaaagaagcaaaaaagctgcaacctgccgatacgatgaaagtatatgaaaatgatttgttagagatttttaaagagagtaaaaaagtcttgcatagtgccgagatcggtatcgtcaaaggatttacggagagtggagtgagggtaaaactgcgaaatcctaaatttcctacaaatgaggactatcaacctaaagaatatacaaagtggaaaggtataggctctttaaaagggataaaaaagtacgatattgatatcacgggaaaagttcaagggttttatcggcttggcagagtgcttgtcggtgatgaggtaaaagaatcgaaagtggttatctatgaaaaattaaaagagtagggcatgtcatttaaaacggtatttatcacaaagccggcaaaaatatcgctgaaaaatgaaaaccttatcatcgagatagatggtgttaaacacagccagtatctccatgatatacatacactacttatagaaaacaaccgcagtcttatcactacggccgttatctccgctttggcaaaaagcggggcggtcgtactgtttgtcgataatgattttttacccgcttctctttcccttcctttacatacgcactctttacactccaaagtcacccatgcgcagttgaaaatggggcaaggctttaaaaagcagctttggaaagcactcatacgatcaaaaatagataatcaagccaccgtactgcgttacatcgaaaaaccgcaattccgcttgcaaaaattagccgatacggtcaaaagcaatgatagcggcaataatgaagcaaaagcggccaaatactactggcatacgatatttagcgattttgtgagggaaacggaaggtgcgacggatataaaaaactccgcgcttaactacgcatacgctatcttgcgcagtgccgtagccagagcgatggtaggagcaggtcttaatccgacgtttggagtgtttcaccaaaactatttcaacccttttaattttgtagatgacatgatagaaccgtttcgcccggtcatcgatctgcatgtttatcatcttttacataagtatgatgggtacgagtacttgactacggagttgaaagcggagcttgtagatacgctgaatcatgagtatgtggatattgacaaagggttatccagtgtgcgggtcgctgtggagatcacgataaactctttgcaaaaggcgattatggaggaaaagctgctgtctttgcagctgcctgccatagatgctccagcgtacagcgtgataaaaaatgagtgcatatagattcatgtggctgatggtgatgtttgatatgcccacacaaagtaaaaaagataagaaaaactacctgcggcttcgcaaaagtctcatagccaacgggtattctatgatgcaatactcaatatatgtcaaatcatttcatagttatgaagccagcatagctggaagaaagcggcttaaagattacatagcaaccaataaatttaaaggcaatattcgcatggtgtcttttaccgataaacagtttgagcatatggagattcttatcggggaaaaaagcagtgatgaaatagcgcaaccaaaacagctggtgctgttttgattttgcttatggtctctatcctaaagatagattatttcaatatccctaacattgaaatccctgttttgttaaaacagaataattgtagcattttttagacaaaattgcaaaaaacagccacaaaaatatcgttcaaacccctatatatagccgctggtaagctcacctattttaacaaaacagggatttgagggatattaaaacgatcttacagttagtgattgtgcttcgataattttaacaaaacagggatttgagggatattaaaactcccaactcagtttgctttttctttgtattattttaacaaaacagggatttgagggatattaaaacaaaacaaaagaaacgaacatgcacaaaaaaattttaacaaaacagggatttgagggatattaaaaccctaaaagttacttcattttttaagcatggaattttaacaaaacagggatttgagggatattaaaacgcattattcgaaactactgttgacgcatcaattttaacaaaacagggatttgagggatattaaaacagtaaaatattggttcaagtaacagctaatattttaacaaaacagggatttgagggatattaaaacacatcaattatcatatattttttagaaggcattttaacaaaacagggatttgagggatattaaaacagtattgttaaaataccactaattaaaatcatattttaacaaaacagggatttgagggatattaaaacgccagcgccggatcaatcgcttctttgtccattttaacaaaacagggatttgagggatattaaaacatgaagagatgctgctgcgaacacgtataaattttaacaaaacagggatttgagggatattaaaacaaacaatcttcacacgtttccatcttttagattttaacaaaacagggatttgagggatattaaaacagtaaaccagcaccatagatcgatcttctaattttaacaaaacagggatttgagggatattaaaacaaaatcctcttcgattgaaagtcttgtaaaattttaacaaaacagggatttgagggatattaaaacaatccaagccttgataatgcttttgtaagtattttaacaaaacagggatttgagggatattaaaacggctcattgttaccgcccgtcatcttttttctattttcacagcaagcggcaggataataaccgtgcttttacatggcggagcctgcacgcctatagtcacgtcatcacttgcctaataaaatcttatcaaaaaaacagacaatgtaaaataaaatgaatctatgctaaaataatctttacacgggtgatacggtctattcgtaccctgtgtggccaaggagtgcggcagatggattggtgttcatgtatcgacgccaaagaacccgtggtgtctgaaccctgccgtgttaccgggttcctctttggcgcttttgtataatccttaaaggatcaaaaatgagatattcagccataaacttgatggcggatatattgcatatgtatcgcatttaaagaagtaagcgaacctgacaatgaaacaaacccgatctttggtatttggaaatttgaggtagacagcagggccaccgctttcggttattaaagcttctttttagtcaaactttcttttacagattttaccacagtttaataccccgttaccgcagattggatataattaaaataaaaacttaaaaaggcggagtttgcgggtttttgttttagttgcggtgtttttaggtatggcagtgggaagtgagtattacagcgttgatgagtatgtcaaaaaatacccgaaacaaaaggggttgatggagcgctttgacagcattgtacaggggcaagccgttgctatagacaaggtgcataaaaaagtgaaaatagcgatgctttaccccggagggcaggtgagtgattattggcggcgaagtcgggaatcctttgaagccagaatgcaagaactcggtatcgactatgcgatagaagctatctttgtggatgaaaccgacgagatggggctgaagcgctcacttttgaaactgctgaaaaacgacagcgactatcttgtgtttacgctcaatatcagcggacataaaaagctcatcgcacagcttatcaacaaccaaaaacaaaaaatcattttacaaaacatcacgacgccgcttaagcagtgggaggggacccaaccctttatgtatgtgggctttgaccatattgaggggacaaagcttttggcgcgctatttccaaaagcagcagaaaaagggcgcgaactatctgatgctgtatcatacgcaggggtatgtctcacagatgcgcggagacagttttatagagatggttcaggatgcgcatacgctcaaaaatgcgtattttaccggtggcagcagagaaaaagccaaaagatttgtggccggttatggggagctggagtcccttgattatatctacagctgctcaacggatgtcgctgtgggggtcagtgaagcgctgcgggaatcgggggtgtcggaagctgttttgctcaatggatggggcgggggaagtgttgaacttcagatgatagaaaagggtacgctggatgtaacggtgatgcggatgaatgatgacaacggtgtggcgatggctgaagcgatcaaactggatattttgggaaaagagaccccgcttatctattcgggaagtttcaagatagtggataaaaccacccccgcacagaggatagagcagtataaacaaagagctttcaggtacagcagatgaaaaagcgctttacactcagtttaaaatccatatttgcccttgtcttttttataggaacgctgtttatgctcagtatcgctttttacttcgtgtcaaactcctatgaagagttgctgcagaaaaaatcaaaaaaatatttccagcaaagcagaaagatggcacaggtgatcatagatatgaccgtcgaggagttgaatgaagcggtcaaaaacacaacattcgggagtggttttttcgcagcggttaaaaatgaggatggaagatatatagaaaacagattactccaaaatatgccctctactgcaaacttttcagcttttgtcacagagcgtaaagcctacagcgctagctatcttttgtatgaccgggcaccgttgatccgagaaatccgaaagatacacacggcagcccttgaaaaaagattgaccgccatagagatcgagggtagaaaaaagctctttttcctctcttcaaaagctgtagtggacaaaagcggcaacgttatcggtatctatgcggcggctatggaggtcaacagtgcaaacgctttgatcaataagatccaaaaaaatacggcgcttgattatgtctctatcggttttgagcgctacagcattcttcaaagcggtgaggagttcctccccaagcccgttacggtttatgactcacttatgaccctggatgacaagatggcgtataaaacagctttggagtttaacgggatagaaagcaagctcagcatctccatgctgcagcaaagccggatgcttcgcaagcagaataaagattttaccgctatctttacaacgctggtgggggtgtttatcctgctgattgtcttttccgtacttgcgattcagaggatagtagctgctccgctgaaaaagctccaacgctttgcaggagaactgctgcaatcgcaaagattacacaaaccgctgcagctttatatcaaagagtaccagcagttaagcgattatctgcaaaatctttttttacaggtcaaggagaatgaacagcagctgcttttatcaaaaaaagagatcgaagaggagaaaaactttcaaaaaacactttttgaaagttcgacgatcccgaccgttgttatggatctcaagacgtttcaatatatcgactgcaaccccgcagccgtgtcaaaatacaggtttggttcaaaggaggagttgatcggcaaaacccctttggacgtatcggcaccgaggcagtatgaccaaaccccttcggaaaaaaaagcgttggattatataaaccgggctatcaaaagcggcaaaattgtttttgagtggctgcatcaaacacccgacggcgagctttgggatgcggaggttcatctgctgagcttcaacaccgaaggcagagagatgatgcagttttccatcgttgatatcacccagcgaaaatacgcgcagcagcagatccagacgctgaatacaaccctggagcagaaggtgcgggagcaaacaagggagctgcgtttgcagttggaggagttgaaacacaaagataagatgctgcaggaacaatccaaactcgcagcgatgggtgaaatgataagtgccatagcccaccagtggcggcaacccctcaatgcgctcagtatcaatatccaaaaccttgaagatgactatgaagaggggctcatagatgcgcggtttctagaagagtttgtggataaagagatcaaaatgataaactttatgagtagaaccattgatgattttagggattttttcaaaacggacaaaaccaaaacaaaattcaatatcaaagatatcgttgataacgtccacaggcttttacacgcccagctgcaaaaccacaatatcgaatgtaccatagagggtgagggctttgagatagaggggtatgcaagccagatgcagcaagtgtttttaaatcttttcagcaatgccaaagatgcgattgtcaaaaacgatactgatggtcgcatcacgatacggatcgacagccaaaggggtacggtctttttctgcgatagcggcggcggcgttcaaaaggaggtgcttgagaggatgtttgagccgtactttacgaccaaagatcccgataaaggtacgggtatcgggctgcatatcagccgaaccatcatcgtaagccacatgagcggagatatacaagcgtacaatacaaaaaacggtttgtgtatacagatagatttgggtaaaaagtaggaaccatttgactttttttaaatgctaccctaaaattgcaaaaaagttttaaaggaatacaatggaagaattgccaaaatgccccgaatgcggtagcccctatacatatgaagacggtcacttgcttgtgtgtcccgagtgtgcccatgagtggaatccgcaagagcaaaacgaagaggatgcgggattggtcgtaaaagatgcaaacggtaatacattagctgacggcgatgatgtcacggttataaaagatttgaaggtcaaaggaagctccagcggcatcaaagtgggtacaaagataaaaggtatcagacttgttgagggcaatgacgggcacaatatcgactgtaaagtccccggcgtcggcgcgatcaaactcaaacaggaatttgtcaaaaaacagtaaatcccctacgtcattaaggagggatcgcaatcctccttacccttcgataaagatccgatcgctgtattcgtttttgatctcttcgcacagcatatcgctgactttcagtcccgtttcgagcatggcgtttgccagtttggatttgatcaccagctgcaggggtcggttgcccttgtgccgcagcgcaagccggtgcagggtttcgatgatctcggtgtctttatccagctcgatacccaaaaccagcggtttctgctttttggctgctttgagatccatgatcttgtgcacgcggatgcgggtaaactggtcatctttggttacggtggttttgatggcgatgggctgttcgagatccatctggtttaactgctccagataatcgctaaagagcatcagctctatctccccgtgcagatccatcagcgtcaagatgccgaatttgttgccctttttactgatcttttcggtgatgttttccaccttgccgataaacagcgccttctccccgtcggcaatattctccagatccgaagagagggtgtagtcgatcttttcaagctcttcacggaactcgtcgagggggtgccccgagacgtagatacccagcgtcgctttttcaaactccaggatcgttttcaagtcatattcgggtagcgtatcgaggctgagctccaccgtcgtcatctccgcatcgtcgccgaaaagggagtttgtggcgtcttgtttgagtttgttggccgtcgaggcggtctggacgacggtgtcgatctgttcgagcatggagcggcggttgtactcaaagcggtcaaaagcccccgatttgatcagcgattcataggcttttttattaaccttggagccgttgatgcgggagataaaatcgttcatatcctcaaacatcccctctttacgcgcttcgaggatgggttctatggccgagcgtcccagtcccttgaccgcgcccataccaaacaagatcacatcctcaccgtcaagcgtggtggcgctgaactcgacgatagagcggttgatatcgggcgggagcagttggatgtcgaggcgtttgacctcatcgatatattttacgatcttgtcggtattgtcctgttcgctggttagcagcgcggccatgaactcctgggggtagtgggttttcagccacgccgtttgataggtgatcatcgcatacgccgcggagtgggatttattaaacccgtagccggcgaacttttcgatcaggctgaacagttcgctggcgtttttggggtcaaagcctttctccgccgccctttcgctgaactccttgttatacttggccatgaggtcggcttttttcttccccatcgcccggcgcacgacgtccgcttcgcccaggctgaagcccccgatcgcctgtacgatctgcataacctgctcctggtagacgatcaccccgtaggtgggttccaggatcggtttgagcacctcttcaaactcttcaaaaaagtagctgatctgctcttccccatgctttctggcgatgaaatcatcaagcatccccgattccatcggccccggtcggtacagcgccaaaaccgcgatcaggtcctcaaagttgctcggtcgcagccgtctgttgagatcctgcatcccgtccgattcgatctggaacatccccagcgttcgccccgaacagatcattttgaacacttcgggatcatccatctccatattgttgatatcgagctttttatcatatctggcttcgatcagtttgcgcgcgttgtcgatcacgtccagggtcttgagtcccaggaaatcaaacttgatcagatccacgtcctctaagaagttcagcgaatactgcgttaccagcgtttcctcgcccgagggtttatacagcggcgttttgtgccacagctcctcgttgctgatcaccacccccgcggcgtgcatccccgggtttcgcttcagcccctccagcgccaaagaaaactcccacacccgcgcggcttccttgtcgctgtcgatgagctctttgatcttgggctccttttcaaacgcggtttttagatcgatccccagctcatcggggatcagcttggccatagcatcggccttggcgtagggcagtcccagtacccgcccgacgtcgcggatcaccccctttgccaaaagcgaaccaaacgtgatcacctgcgcgacgttgtagcggccgtatttctccacgacgtagtcgatgatctcgccccggcgtgcctggcaaaagtccatatcgatatcgggcatacttacccgttcggggttgagaaaccgctcaaagagcaggtcgtatttcatgggatcgatgtttgtaatccacaggcagtacgccaccagactccccgccgcggatccccgtccgggccctacggggatgcccagtttttcgcattcacgcacgaagtcccaaacgataagcatatagcccgggaacttcatcccgttgatgatatccatctccttttgcagccggtcccagtagcgctggtgctcactctcatctaccagtttcagacgctccttgagcccctcggtgcacttgtagacaaagtaatccgcgtcattgtcatactccaccccgtcggcctttgcgtactccttgacgaatttaaaattcggcggcgtgggatcgcccagtttgatttcaaggttgcatttatccacaatctcctgggtattttccaccgcttcggggatatcggcgtagagtttggcgatctcctcgtgggatttgaggaaaaactcatgcacgctgtggcgcaggcggttggggtcgtcgtactgcttattcatggcgatacacatgaacgcttcgtggggatcggcgtaatcttttttgaggtagtgggtgtcgttggtcgctacgatcttgatccccgtctccttggcgatctggatgatctgcgtatccacgtagtactggtcgtcgatgccgtggcgcataatttcaagataaaaatcatccccaaacatctccttgtactccagcgcgatctccttggcccgctcgtaacccttggcaccgaacttgacgtttcgctcgctgttggtgttaaggtgccaattgatctcgccctgcaggcaggcactggagcagatcagcccttcgctgtgctctttgagcagctttttattgatccgcggatagtagtaaaacccctcgatatacgcctgcgaactgagatacatgaggtttttgtaccccgtttcgtttttggcgtagaggcagatgtgaaagcgctggcgggtagatttgtcgccgagctcttcactgttgtgcaggtagccctccatcccgatgatgggtttgagcccttcgcttttcatcgtt

SEQ ID NO: 3930 - DNA, 9904 bp, synthetic construct
  misc_feature 1..9904: note = Synthetic
  source 1..9904: mol_type = other DNA
gagcttcgacgggcatgtgatattccaacttccattgtccagttgtaggtaattttgctttgaacttggcataagaaggccgatctgcattgcccgcgtatacgaaagcgtaagtacgtcgatacttaccaaatgccctcggatctgagcgtcttacccatctctgtttggttggttgcactccgcgttccggtacataaatcggcagtccatgatcccaagcttcgaccttggaggtcccgagtaaatcacttacgaaagatactaccggtatagacgttcgaggtggattctcatacacaatctcgaatccctggtctaaatcatcgataactacttctgtagcgtttggtggcgaccagtcaatatcgcgggcgtatgttcgagtacctggtccgagttcctcgttaacgatcgtatccacatcgaagtgtgctggaatatcaatccgaaccgcttcgtgattcagcgagaggtatggttccagatatacgatgtctataggtcgaggccagtgagtatcaatcgacaatcgaaccgactcgttaccacgtaccaaaaatgctttcgaaaaactcctagttctctcgcgctcggcaccagccggttgttcgtggagccacgatacttttgcaaaaccatcggtcggttcagcattgtggacgattagacttgcttgaaacaccttccctccctcagaatcaggcagtcgttttattgttggctccgctagaatgaagcccggcagtccctgtgcgttaagccaatttccaagagacccttctaagtctaaatcaacttcttttgccccgatgagtaaatcatcgtaactgtacgatgttcctctttgtcggttcgctaggtgccctaacagacgagcacttgaatccttacctaataagtcaatcaaaattctcgacattgctgcagactttagacgaatcactcgaaacgaccgctctggagcttgatcgagtctaagttcgcccaacgtgaactgttcaagatcaatccatacttgggtttgcttcccctcctgcaataaagctaactcttcgcggctttgctgggggttgatttgattaaagtcgaacagatcataaacgcttcttttcgcattcttcaaggccacctcaaaaataaatgatcgccctggacctggaccgattctatctggcatgaaaatgcttcggtcaaaaaccaaacgttgtgcgacttcttccatcacttgacttagtactatcgctccaggtccagtgggtgaggcttgatacgtaacgaaatttcgagcaaacccaatcgttgggtgttcgccaaagacattgcccttgaaatatgcggatagatccgaagctgaatgcataaacgatagtatctgagattcggtatacccgccccagtcttcagccatgtcaatgagatcctgaaaagacaattcaccaccaatcgaaatttttgtatttggtagagaggattctcgcatcaacaccatacctggcggtcccataattgtgcccatgttccaaccgccaccgtacacacgcaggtacgttgggacttcaacaagagaaaattgctcataaggatagacaagtccctgttttttgacatgaaagagtagactcgcgatacgatacttgaggggattctcgatttcgctcaggtctcgaaatctgcgttgatggtgtttggtgtatagtacttcgaactcaacatcttgtaccaccgcactagctcgttcaaatttcgagcttactagagtgaacgcggggaccgggttctttggtgcaattcgaaattttgatcttctgctctcatcagtcgaaacaagctcacaatgtcctggtcccgcgactagccagtctttcggtacggacactgtgagatcgatcttgtaaaagtcttctggtcgagtctccaatgcgttctcaccagttgctgcgtcggatgtgggataccacttgatcccagaagtaagtactacaaacctaggatggaatataaagctttctgttcccatagcaaacaaatttcttaccttgtccccagcaatgtctttggttttgacagcactatctaaatacgcaaagcgagcatccgggtgacctcgggctttaattctgactgacactatatcctcatccacggcgtcgatcgggatttgtaggatcccttgctcgaacgagtgatcgtcgatttcattgtcttctaaccaaatatcagaaattcgatagcccggattcaaagccaacactacaaagtctcgagagttgttctttggagggatcatttcgacggtgaggtccaactcaattttgcgaccagggactatatcgacgttgccactgatgctagtaatgtcaggaaaactacgcagctccaacgcatcgtgtgcttgaacccagctacgtacttcttgctgtcgtaattgctggtaaatcaatgatccacagattatcaaactgctcaaaacgcaagaacaaataccgactactgaaaggagtctacgattcggtaacggccgccgccaaccacaacctgctaacactacaaatccggcagtgagcaacaacaacgagaatcggttaacgagtatctcggccgacacaaaccgaggagcaatttccgatgggaacagcgttccaccagtagtagttaccagtgtgctagacatatcaacaggtaagcgacagaacaaccagaagaagatcacgatgcccgcgaatgatagtagaagaacgattactctggatcgtattgctgaagacaaaaagatcgtcagcgcgccgaagaatgccagatttggtatgagatcccaaatcaaaaaggaaactaagctgtgcaattcaatcagattaccatagcctaaccccgcggtttctgcaatccaaccgtaaagaacgattgcacccacgaagaacatgatcgtcgcagcaattaataaaaccaatcccaacaaccgccctattaccacaatcacgtttgaagctgggacgacttctaagacctcgttaatcctactccggcgatcgctttcccaaagatcgtaagcaagtaaaacgattacaatacaaaaaagtgctacaaagtggttgcctaacgtcgcaaccaaatacgtaggagccatcataccagcactggctgattcagcagctctaagaacgtactgtatttcaacaagaacgtaaaaagaaactgtcaacaagcacgcgaagagaagaacaaactttgtacgacccgacttgaaggcaagatttatctcagtgaaggctaatactgacaacattcttgcgtacatctatccgcgcctcctagatttttgaatcttacttcaagagtgatggaaagtataacgttgcaatgaagctgaagttcgttattgtgtacgctggcgtgaggtcgaagtaaaaaagtcccaacatcgacgtgcttggagctggtcgatgagtgagacttctttatagttccgacactacgaggtcggagttaaacaaagacgttcgtatcctgtgaggaaagtagtactaatcctcggtcgcgggacaattattgcattgtcctggtcttgtgtcgttgtcgactgaaaggcattcgctggaaagatcagatcgaaccacgatcatccaagatttcacgcgatttccatttccatctcgaatagcgcagtagtagcgatagtcttgagagatatgatatggaatgctagcgtgtaggttgtagcagttgtagttcaagtacagattaacccaacggtttgaactggatgaacttccactgagggcacccgacacaagaacgagcaagaccacagcaagtgcaacagaaactttagatttaaaagatcgcttaaacatgttaaacacctcctatgtgattagacctgtgtttccgaaaagagttcgataatcattgcttcaattttccgcgcaacgaccactagcagtactcaaacattattgagaccaaacagttgctaagtccgattttcgagcgatttggtaaatatcgacagtcgtagacgtgcataaagtgccgaaacagatgcaattctcgatgctctgtggcgtgactctttactagaaattgatcacctccccccagacccgccgaaaggccgcaaaaaaacgcacttagttcagtgccctagaaacaaaaaatcccaatcattaacaccgaagcgagctcaggacaaaatttgatcttagtattctcctaccacgtcgcgtgataggatatcaagatcacaaatcaatattgattacagttcaaagcagttctttgtggtagtgccgaacggctcctaacatcatcggacgcagaggtttcgtcaagaagaccatgttttaggcatgtcgtcattgcaaaaaaacctagaacctacaagccgttcagcggtacggtgtgagatgacttgtgtctctgattgtgcagatgttctgcactgtacaagattagacttgagtttgggacgggaaaaaaggagggtagccaaatgaccaccctcaacttggtgcatttaccacaattcttcgattgtaggtctgcttgttaacggttgcaaacccaacgagtttgcccgctaatgatttaacagaaattcatcagcgtgaaccgagttcccggtcgtaaattataatgactatacatggtagtatttagggtagaaccagtcatagtcagagctaacgatcaatatctgtgactaataaacaaaaatagtgactaactatagcagtatatgacttcaattcgctacagattaggattagatgttggttccacttcactcggttggtggatttgggaagaggacgtcaccggtgaggttattcggagtgtcgatggtggtgtgtgtatatattctgacagtcgagaaccaaaaacggggacatcgaaggctacagctcgaagagttgctcgaggtatacgccgccgccgggatagatatctcaagcgtcgcgatcgattaatgaaccaactagttgagttcggtttaatgccatcaaattcatcaaagagaaaagaactagagtcgttagatccatacaaacttcgcgtacgtgctctagacgaacagttgcagcccttcgaactggggcgcgctctgtttcacttgaaccaacgtcgaggttttaaatcaaatcgagtcgtcgactcggcgaccgaacaaacggaacaaggctcgatccgtagtggtatatccacattggataaggtgctaatggatcgtaagtacagaaccatcggtgaatacctacttagtgatcacaagtcaaagaagtctgtccgttttagaccaggcgtagagagctatccaagtcggaaacactaccaagacgaattcaacttcattcgaagaatacaggaacctttgcaacacctcccttcagaacattgggacgctttagagcaaacaatattttttcaacgtcgcttacggcctatagaaccgggaaaatgtacgttatttcctgacgaaaaccgcgctccttgggcacttccgattgctcagcaattccgtgtatttcaagaaatcaactcgttgcaagtaatacaaatcggtgaaagggatcgtcgcttatcaactgaggagcgcgaacgagcatttcacatcctctcaacccaaactaaagttagatttgaatccttacgcaaaaagttgaatctccggttagattcacgattcaacctagagggtgaaacacggaaccaccttgacggggacaaaactgcagcaatcttacggaaaaaggaaaactttggaaagagttgggatcaattggacctcttagaacaaacacgaactgtaaagattctgttaactcgacagcgcgaagatgaggtaatcagaattttgcaggaagaacaaaaactctccaaagcgtctgctcgagcgatttcgacattacgtcttcctaaaggctacggtaatttatccgaatacgcgatggaagcgatcgtacctcacctcaagcaaggactgctatatcacgaagccgttacagcagcattcccagatcgagatcacagccaggtcgacgaacacaaaaaagtcgatttactcccgtattatcctgtgttgttagatcgtcatgtttcaagaggttctaacgatcctaacgacgacctgttcaagaaattagggaaaatcgctaaccctactgttcatgtgggcttaaaccgtattcgacgagttgtaaatgcgattgtcatgcaatacggtccaccagcaaaaattgccgtggaacttgcgcgcgatttgaagaattcatttgaagagaaacaaaaaatcaagcgacgacaagccgaggaacgcaataagaatgagagacgacgagaagaccttgagaattgtggacgcaatccaaatccagagtacttgcgaaaaatccgtttatgggaagaacaaggtccttgtcacgcaagatgttgtccttattgtggacgtatactgagctatgagatggttctcgatgatcgaacacaaatcgatcacattcttccattctctcgaacgctagacgacggtttatccaataaagttgtttgttgtaacagttgtaatcaaataaagcgtaataaaactcctttcgaagcatttggattctccgagaatgataaatttgattacgacaagatgttgtatcggatatcttcaaattggccaaaaaacaagaaatggcgattctaccccgacgctatggcacgttatgaggatgaagaatgcgggtttttagctcgtcaactgaacgacacacgatatctttcccggataacaaaaacgtatttgcaattcttgtgcgattcaccgacacaagtttctgtcaccccaggacatctaactgcattaattcgaggaaagtgggggctcaattttgtgttagcggactcaaactacaaagatcgcacagaccatcgacatcatgctatagacgcagctgttattgcattaatagacagatcaatgttgcaacgagtttccagtgccgccgcggctggtgttaacgttaatagatttttgccaaatatgcctgaacctactaagtgtcgaaatttccgcgatcagattaaagatcacgcgttaaaccacatcttcgtggtacatcgacctcggcacgtgaatacgagacagagtgctaatactacttcaggacaactccacaacgatactgcgtttggcatcgtcaacagctcggattcaaacgtttcgtttgtaggtgttcgtcgactattacttagcgacttgaatgaagctgagggtcgaaaattgttactgggaaaggcaggacctggggaacgtattagaaagactgttagagacgagagccttcggaggcaattgctaaaagtttggctctcgttttcagaacgaaaacagtcgtggagagaattttgtgagtatgttgcgaaaccgggacgagtcactaagtatggcgttagaaaactgagatacacggaacataaggattctttaatcaagattcgagacatcaacggacgcgtttacaagggatttaagcccgcaagcaatgcccgtatggacattattagactacctaacggtaagtacaaaggacaatgtgtcagtacattcgacgctaaccaagagcgtcttgagctagaaaggagtagaaaccacccagaagttaagtgcgtatctcatctgtttcagaatgacctaattgccattggagcaggcaacaatcgagaaatacttagggtcgtaaaactagcgaaatctggaagagtttgtgccacacatcattacgaaggtggtaagcttgatgctcgcgacaaggacgttaacgatccgtttaaatatattgatatgacagcgcaacgatttgtggaggcgggcttgcgaaaaattaagattgatccgataggaaagatttacgatccaggtccaatcattacgcgcgcgtgaaagatcggattattgagatttccacagatggaagtaagttgtctaagtcgaaaggatttatggttatttcgtccgaaaacaacgaatcacgcgtccctcttgatgacattggtgttgtactgatatcctgtcgaggcactatctacaccaatcctatactcgtttcactcgccgaacacggtgttcctgtagtcatagttgatcaccgttttatgcctgtggcgtggttgtggccattgagtgggcaccatactcaagcaaaactgatgagtgcccaaattgaagcatctaagccattgtcaaaacgattgtggcaacagatcgtcaaagcaaaaattcaacaacaagcagccgtcgttgaatacctcggacattcgtcaaagagttttgatcgattattaaagagtgttcgatcaggagacacgaccaacgtggaagcccaagcagctcgtttgtattggccattaatatttggcaaaaactttcgacgtcgtcgttccgaaggaaacgtcaattcactcttgaattacggatacacgatactacgttcagcagctgctcgtgcagtcgtaactgcagggctacatccctctatcggaattcatcactcaaaccagtacaacgactggcagttagctgacgatatcgtcgaaccgtttcgcccgctcgtcgattttacggttcttcgactcgtaaacagtggaaagcgagatttggagactgaaactaaacgggtactagcacgaaccgttgctcgcgacttgaacactaccgtgggaaccacgccagtttcaacttgtttgattcggctagctcaatcactagctcgttcattcgttgagcaaaaaattcagttacacttaccccataagtgcacggcttttgaacttcgagcaatatcgaatgggtgaagaaatcttaactgggtatcgaatgatgtggctgttaacgatgtttgaccttccggttcaaacgaagaaagaacgaagagctgcaacaaagtttcgcgattttctgttgaatcaaggattcgaaatgtgtcaatattcagtctatcttcgctttgtagcaggcaaagaacaagcagacacattcattcaaagaatttcgttcgcagctccaaacaccgggtccgttcaaatattgatgtttactgaccggcagtacgaaaaaatcgtttcctttgaaggcggagagcgcgaagccgcgaaagaaaatcccgatttctttgagctcttttagcgtaaatggctcgttttttctttactaattctccttgttatattctgtattaccgtgatcttcgttgcggtgtaattttaaagggggggaatctcggttcaaccgcaactcaaggatggattgaatacaagcgacaccatctcccatatttgcgttaggttatcgaatcacgcctacgtggtctctagaactaaactggcagtttggtccgcgtgaaagtttcttgactactaaccgtgatggcgagacatctctttacgcttcagttgagagtcggttcctatccgcggtaatttctagagaattttctctgcctcgaagcttcgtactagagacgaaagcaggagtaaccaactccgttttcgagaacagcatcaagactgaacgttcctcattcttacgatggacgattgaagacactagtccagtagcaacgctagggattagacgagtgataacgaacaaactgtcagcaagagttgggttttctagctacttgcttgagaaagtcgaacctgtaacatctacttcgttcggtttacggtataacttctagagcactaaaactggtcgtgaacaagctcagatgatgacgatagcgactctgtggaacccactgactagcgtccgcataaatcgtctgtaggtctgtcgctctcgagatccaaacttccgtgttctgaacctacatcgaattcaccgatggtattccatccataccctgcagattgtgcg

SEQ ID NO: 3931 - DNA, 23273 bp, synthetic construct
  source 1..23273: mol_type = other DNA
  misc_feature 1..23273: note = Synthetic
gttactcaactccatatattcattatcaggtaggtaatggctcttggactgatgctcctggttacaaaatgacttcaactaacgaaaagacaggttatactcataagtatacaattgacctaggtacttcaacttatgcaaatgtttgctttaacaacggtaacggtagttgggatagcagaaacggtcagaactatcattttgaaaaaggtacatatactttctccaatggtaatatgactaagattgcagactaatacttttttatgttcctcatataaaacagaatatatacaattaagaaaaaggtaattggtactatctacattctgacggtaagtgggatacatcaaaaggttctacatacgaaattcacaatactaatgtaaaacttaacacaagaagtgctaaccttacagttgacaattttgtttacttagttccaacatttgaaaatgttagaactgaagcagagattaagtggacttcaagtaatccggaagttgcaactgtggataatgacggtaaagtaactgctaaaagtgttggcgatgcaacaatttcaatttcagtacaaaatcctgatgataaagaacctgttgtaacaacttgtaaaatcaaggtcaataatattgatagaattgcagtaacaaagctacctaataaaacagaatatactgaaggtgaaggtttagatatttcaggtcttgaggttactgtttattacaaggacggtacttctaaagtagtagaaaactatacattagattatgaccttactaaagtaggtgagagaactgtaactgtacagcattatgactatatagatacatttaaagtaaaggtgaatcctaaagccgaacctactaatccaacaaaaccaacagtaaagaaagttactaaagtttcattaagtaagaaatctgttacattattaaatggcagaagtgcaactgttaaagttaaggttagtccatctaatgcaactaacaaaaagctaaagtggacaagctctaactcaaaggtagcaatagtaaattcacaaggtaaaattactgcaaagggcagaggtaatgctacaattaaagtaatggcacttgatggtagcaataaatacgctactgttaaggtaacagtaaagcaacctgtaacttcagttaagctaaataaaaattcagctatcctaaaagtaaagggcaaagctaaacagaaaacagttacactaaaagctactgtaaatcctaagaatgcaaatgttaagtcagtaaaatggacaacatcaaaatctaagattgctacagttaatagcaaaggtaaagtaactgcaaagaaaaaaggtacttgctatatttacgctactgcaaaagatggcagtaaaaaatctgctaagtgcaaaattacagtaaaataattaatcaaaaaatattaaaaaagctgacattacaaaagtagtgtcagcttaattattctattctttctaatattaattcttgctaaagtttaataaataatatataataatcttgtaaaaacaccaattttttatttattatgatagaattatatgaggtgattatatgaaaaggttagttttaagaaatatacttatgtatgttatttcatttgcattatttattgtaccattgtttttctttgattatttttcaccactttatttacaatggatagcaccactgtttttgatttatgcaaaggtatcttgtgatttaaagcaaaagtcattaattaatatatggagagttgtaccgacctgtgcagttattttaggtgcatactttttagataattcatatacagaatggtattacctaaaagttacaaatgaactacctgacccatttacatatcttttgggtaagtatttttaccttgcatcatttatattggttgttggttttatgtgtgtatatcagttatataaaattgcagttgaaatgtataataggcataaaaaagaggttagtagttgattttataatagaggttataaatgtataagttattatatgaaatatcaatttttgatataataggtatgataatacttttaatagtttttttgtttttatctattacaaccatatttgctgtaatcaatgcatttcgctcacattctaaaattatcaagagaattatgttgactatagtttctgttggttttacttttggaacagtagctattttcttttttacatttattaacaatgacaacccttattttgcatataaaactaataattataagacagtagaaggaaaaatatgcaactatgaaagaaatgaaggctctgaactaaagtatgaagaattcaaggttaacaatgtgacttttgaatatgggattgatatttcatacggttacaatgttgataaagcaaaaggtcataaatgcaaaaatggtgactatgtaaaaatcggttatgtttatgatgaaactcaaaatgtgaataccattgtgaaatttgaaattcgtgaagattagtttattacgagatgaatttatgaaaagaacaattacactaatattactgatagttatgattatatctgttatgtgtggatgcagtaaaattaccgacaaggttgattttgacaagatagataaattatctattgtaactgataagggaaaggaatatactctaaattctaaccaaaaagatactgtcatttcagctttaaaaaatgctgaaagcagtagtgacagtaatgattatgatggtggattttccattgacggatatgttgataacaaagtagaatatacctttactatagcaaatgaaaatcatattacagttaatactgataaaaattcagtatataaaatctcagaagaagattattctgctttatcaaaagtagttgaagaagttgtaaaataagaattgctaaaaattatataacaaaagaaaaagcctctcttttgagaggttttttcttttgtaaaataaatccgttatgtatcacaaaattattataaaaatttctaattataagcaatagaaaaataattatttaatgtgatattatgataatgtgaaattatttaagaaagggaaatgaaaatgaaagtcaaaaagttttctgcagtattagttgcttttttagtggcagtaacttcaatggtattgccattgtcagatacttttaacagttttataaaaacaaccggttcagctaaagcagtaactaaaaacagtgcagtaaaaatgcctagtgatgctattttgttcgatagtagtgaagaaaaattcaaggagatacagtcaccggaaaagggtggtttctattactacaacagttattacaatagaagtataaatttctatgatgttaataacaatacagtaagaaagattaaggactacaaagacaaggctgtttatgatgtttttgcaactgactcaaagttttatgttgtatatagagatggtggaaatcctaaccctataatttactatgttgatgaattgaatatagaaaccgaaaaggtagagtcaactcacaatgtaacagaatttgttgctaataattataattcttatatcagaacaataggtgttgacagtaaaggtagaatttatctaactacttttgacggtttaaaaagtgaaaagaaatatacaattcacttactatcaaaagattataaggaactttcttctgctgatatggaagatgattgttttgaatattatggctttgacagtagtaacggcaatttctattttgaaagttataaaactgcaaaaagtcaatggggttcttcaagtggttatagaacattggctttcggtaatgtaacaaataataagataaccgtaagtgatgaaattcttgatattctttacgcaaagtatgttcagtatcattacagtagtgcaattatgttgactgagggtacactagcttggacttcatcatataattcaacagttaatgttctagactctagcaagtttgatacaaaaaatcctaacaacccaccattactaggtaacttatcaagaataggttatgagggtgatgataaattttatagtaacataggtgctagagcagtacataacaacctgaacaacactactgtaatttatatgaatgataataggcttatggagtttgacagtaactataagcatatttctacaatcaatactgagtaccctgtatttgcactattaaattacggtgatgatattcttgctattgaaaaagatactgacagtaattattatgtagaaaaatttacttggaaatttccaacagaaattaatttctcacaaacttctgctgctataaaggtagggaaaagcctttcactttcagcaacaagtaatgctttagcaacatattcttacagttggtcaagtagcaatgacaagatagcctctgttacaagtgaaggtaaagtttacggtaatagtgtgggtacagcagtaatcactgcaaaaaccactaacggtgttactgctcaatgtactgtaacagttgagaaaaattcttctgcaccggcagttgataaggtaaaattgtcaggaaaaacttcttcaaatatttcaaagaatgattattataagtggtcctcagttattacttcaaatttaagtgaaaatgctgacggtacacttaacagagttgaaagtacatcaaatggtgtgttagttgaaaaatattcaagtgatggcaaaactctcctttctacaaaaacagttaagaatgaactaagcaaattcggtggctatttctgtggtgaagataataactacatagttttcggtgaaaataacactttagaaaatgattctaaagaagtagtcagagttgtaaagtattcaaaagattggacaaaaataagtgaatgtaaaattaacggttcaaatacaacaaagccatttgattttggttcactcagaatgacagagcttgacggcaaactatatatacatacttgtcatgaaatgtatgctgacgagaataaaataaaccaccaagcaaatatgttatttaccattgatgaaagtacaatgaaaactaccgactcaatgtatgatgtgttaaacctaatgaatggttatgtcagccactcatttaatcagtttataaagactgacggcaactatatttatagagttgaccactctgaatcaaataacttttcctttggtgaccaatatctttctgtaaatggtatcacccttacaagatactacaagaatgataaatcaacttctgtaacagtaactgtaccggaaaaatttgatgtgaatattagcaactataccggtgcaacagtaggtggctttgaagttggtagtggtaattgcttaatagcctttacaagagatatttcaaaggacaacaaaaacagaaatgtttatttaactgtaaccgataagctatttaataacacaaagaaaatagctttaactaattataaggcaaataataaagtaacttgtggtaatcctcagctggtaaaaattaatgataactttttcttagttatgtgggaagaaaaaaacactactacaaataaagttacaactaaggcaatgacagttgatgctagtggcaataccatttcagctaaaaagacaatgcctgttagattgtccgattgtgagcctattgtatgtagtgacggtacagttaagtggtatgtaactgatgacagtacacctacattgtatagtgtcaatccttatgaaatagaaaatatccatgagcataactacacatcctcagtaactaaagaacctacttgtacagaaaatggtgtgaaaacttatgtatgcaaaggttgtggagatacttataccgaaactataaaggcaaaaggtcattcgtatgtaactacaataacacctgctacaatgaaaagtaacggtagaaaaatcagtaagtgttcaatttgtaacaatgtgcagcatgacaaagtaatcagcaagatttcatcggtaagtatttcaaaaactactttcacatataacggtaaaactcaaactcctactgttacagtaaaagacagtaaaaataaaatcttgaagaataaaaccaattatacagttacatattctagaggtagaaagaatgtaggcagatattctgtaaaggttaagtttaaaggtaattatagtggggaaaagactttctattataatattgtacctaaagcaactactgttaagtcagtaaaaggactttcaaagggtatgcaagttaatttaaaactacagaaaactcaaactacaggttatcaaattcagtacagtacatttaagaatttcaaaaatgcaaaaaccgttactgtaaagaataatgtttctgctaaaaagataactaagttaaaggctaagaaaaagtattttgtcagagtccgtacctataaaacaacaaaattctccggcaaaaattataatatctattcttcatggtcatcagcaaaaacagttgtaacaaagtagtataaaacagaattctactattcatattaattccttaaagataatcctcatcattatatggtggggattatcgctttttaggagatttaaactatttgtttttccataataataagtataaaaataacaaccaaagtcccaaatatgggacttatcttttatgaaacactataatttttctttttctattgtgtttctaaaaataagtatgatataatgcataatatacagaaactgatattaattattaattattttatataaatttaattgtttaaggaggatattatggattatcaagaaattatgagagatattgcaagtggtttaaccggtgaaaatgaaaaagatatacagtacttaatggaacaaatggaaaagtacaaagagcatgaatttggaaaagaaattatcagggcttgtggtaggctgataagtggaatgttgcctgaagaaaaggtcaatgaatttgctaatgcttttgaaaaagataatgcagaaattgaaaatgaaattgatgatttgttttctaccctacaatcaggtgattataatttggcacttgataaagttgaaaaattagttgaaaaggctgaagaattaatttctgccggtatgtatcagaatgattcagttagtgattatttttgtttcattaatcctatgcaagaattactttatggttatagacatagagatagtgagaaagatattagaccatctaattttccatttgccacaatatatttcttttatggaaatatattgtttgaattaggtcgctatacagaagcaaatgttgcccttgaaaaagcaaaaagatggaatcctatggatgcagatattgcttttgaatatgcagaaacatacaaggctatgggggacattgaaacattctttgattatacaattgaaattttcaattttgcttataaatctgaggatttagcccgttgttatagaaatcttggttattactttattgaaaagaaaatgtggcaagaggctatcgcttgtgaagattatagtttgaattttgattctaatactgatgctgcttatggtgagttgttttatattgaacaaactacacatttggaaataaaacctgcacctattgaaacaatgaagaagtttagtaggaaatacggctttccattagagcctaatgaggatgttgtaggattagctatagcttatggcgagaatagtgcagaaaatggcaatgatgaatttgcaaaatattttcttaatattgcctatgacttaacccactttgatgaagtgaaacaactacttgatgaattagaaaggaaagataatgtatcatatgaacagtaacagttgtatggagtattgaataatacttttatctttgttttgtatgtgataaggttgataagtaaatattaatcgaaaaatatctatgaaaattgcaaagtgtatttgttattattaatatacctattgttttttaatagttgtatgtgttaaaattccaatatagacagaattatattgtaaaaaatttgaaatattaaaggtgttatatgaacgataaagaaattattaaagaactaaagagtgtaatgaccggtgacttagagaaggataccgagttcttagatagtataattgaaaaattcgagggcagtaaagaggataaggatacactttacgcaataggtttgcttattagtgaagctgttccttttgctgaaaaagaaaaacttgtgcaatcttttgaaaaagaagttcccagaataagtgaagaactagataggattgcaaatattattggaaacggtgactatgatatagcactttcattagctgaaaagttgattgaagaaggggaaggctatatcaatgatggtacatttaaagaaaattccaaaatggtatttttcagttttgaagaatctatgcaagaggtactttaccgttctttgcatagaaaagaaagaagagaaatatatgcagtaccatttccgtatgcaacaatatattttatgtatggttctgtactatggaatttagaagaatttgaagaagctcaaacagcctttgaaaaagcaagaaaatggaatcctgtatcagcaaccatcacattacaatatgctgaaactttaagtattaatggtaatattagtgggaaaaaatgtttaaagctttttaatgaagtttttaaatatacttttgaaccaaaggaattagcttatgtttacagaacattaggaaagtttttttctgaaaatgaattgtggaaagaggcttatatttgttacaataccagcctaaagtatgatgacaattccggagacgcttacaatgaacttgagtttattcaggatgaaagtggtataactgaaaatgatatttcatttggtgatgagatgaagtttactaataattatggtatctcactaaagccaaatcaaaaaattataaaattagcagttgattgtggcgaagaggcttatgctgaagaagattttgaaatggcaaagtatttattggatattgcttataatctatctcctaaagctgaaatcaagaacctgttggatgaaatcgaaaaagaattaaactcttgattaaaacttaataagtatagaaccaacctatgagtagttacttgtaggttggtttttgtatactcaaaaagtatagtcacaatttatttggaattttgaattatatgttgcaataaaaggttttgatatataaattaaaaacagtaactaaagtccaatatttgggacttatctattataaaatactataattttactttttctattgtgcttataaaaacaagtatggtataatgcataatatacagaaatagatgcttatagctagttgttttatataaatttataatttgagacgatgaatttgcaaaatattttcttaatattgcctatgatttaacacactttgacgaagtaaaacaacttcttgatgaattagaaatgaaagatactgtatcatacgaacagtaacagttgtatagagtattgagtaatattattttgtaataaaaatatttaaagttttaggtcattgtagaattaacaaaattagaatgtagtaaaaccccatgaagtaaaactctcacagggttaattactagaatttattgagttatacataaaaatatggtattatacaacaaataatttatatataacaatgtatttggaattactgtatataagttaaaaagtttcacatatgggacaattaatgtgttcaattatgatatgattaataagataataaaaaagagcaatcgttagattgctcagtgtggtgttttgggtttccactaccctacggcattctgccttgtcttagaactctgatgaacattgataaacttataaaagcggtttaaagtgttgattgatgaatattgataaacctatacatcgatttctaagttctttaacaacattttattatataaaaacaattttgtcaacagtgaaaggagaagttttatgatttatattattggtttagatgtaggtattagttcagttggttgggcagtaataagagtagataaagattgtaggagaatagaagattttggagttaggatttttgattcaggagaaactagggatagaaaacaaagcaagtgtcaggaaagaagaagttttagaggttctagaagacttatccgtaggagaaaacatagaaaagaccgattaaaatattttcttaatgagatttcttttgtaactgaaaaagagatgaaggatttttatggacataataatcatgatattattgatttaagggtaaagggtttggaagaaagattaacaccggaagaattgactgcctgtttatttcatattgcaaaatttagaggttataaacctttttatgatttggaaaaggttaatttaaagactgaggacggaaaacttctcctacatatgaatgaaaccaataaaataatcgaaaatggtggttatcgttctgttgctgaagcaattcaaaaagattcttattttaaagaagaaacaactggaagatatagattccataacaaaagtgataagaacgatattttgttttctaatggtatgattaaaaaagaagcagagactatcttgaattgtcagaaacaatattattcacaattaagtgataaaaatatagaaaaaattattgatattattttttctagaagagattttgaagatggccctggtaattcagacgataagaatagaaaatataccggtttctatgattcaattggaaaatgtagattctataaagataaaaatcgtggttgtagattcacagttctaggtgatgtatttgcattgattaataagttatctcaattcaagtatgtttcaattgaaaccggtgaagtggataagatgcccaaaaatttgatgcatacaatcataatgaaagctatcaaagatgcttctcttacaaagaagggtattattaaaattgctaaagaacaaggttttacattggtaagtggtaatgaagaaaaagatgataatactgatataactaactgcttaaagtttgtaaaacctatgaaaaaaatatttgatgcagatgatagtggctatgagtggggaaagttaataaatgaagatccaacaaatatggatagtttattaaacagaataggtgtgttgctttcttacaatattactccaaatagaagattagaaaaaattaattctattcctgaaatcaaagataatgctattgtcgaaagattatcaaaagttaagctttctagaactgcgaatgtttcaaatgagtatatgattaatgcgataaacgcatttagagaaggacaattgtatggcgattttcaagccaaagtaattaaggctaatttttcttccaataaaaatgctacaaaacataaaaagttaccacctttcacaaaagactctgaaatttatggcaatccggtagtacttcgttctgtaaatgaatgtagaaaagtggtgaatgctatagtcgaaaggtatggtactcctagtgcaataaatattgaagttgcaagtgacttaaatagaagtgctgaaaataggaaaaaattagctaacaatcaaaagaaaagacgtgacaataatgcatcggttttgaaaaaagttgctgatttattaggcgttgaggaatctgaaattacaaagtcacaacttgacagatttaaattagctgaacaacagggctggcgcagtatgtattcaggagataatctttattcagatgataaaggaaaaataactgacaaagataaaaaagctattatcctaaatactgataaggtgtatgaaattgatcacattattcctttttcaagaattcttgatgattcattgaacaataaagttcttgtctttgcaaaggaaaatcaagataagtcagataggacaccactgatgtaccttgaaggtgattcgagaaaggaatttattaagagggttaattcattttatcaatcaaaaaatgaaaacaaagagataggttctataagcaaaattaaatatagctacctaatgttagatagcttaactagtgaagaagctctaaagtatcttgaggagtggaaaataagaaatcttaatgatacaagatatatttcaaaatacttagtgaagtattttaatgacaatcttttatttgaagagaataaagacagcagaagaccacctgtgtatgcagtaaagggtgcaattacctcaatgttaagaaaacaatggcttaacaaaaaaacttggggtaatctagacaagaaaaaactaaaaagtgttactaaccttgaccatgctattgatgctatagtaattggcaattgtcttccggcttatgttgaaattgcagttgagaatatcaaacttcgagatatttattattcctcaggtaaaaagaaaactgaagaatattataggagtagagacacatttattgataatctatggaagttttatggtgttcctaaaagtgaatctgcaagattacttgagaaaatgacagaaaccccatcattgataaataaccttcgacaagaagtggaatgtagagtacaagattatggtactatgcagttctttagtaaagatgataatggaaaaactaaagaggaatgggatgaaatatacagaagaaatataactaatttctatgtaggtcagaaagactttgtggattctattcaaatgccaattgtttctcataaacaagataaaagatttagaggcaaaattgctaatagtaattttgttaagacaacagacgatgtttctaaattttacaagaaacaaatcgatgaaaacaattttgcatacatggatgatagaagttattattgtgttgatgtttataaaaaccataagggcaacaccaaaattactgccttaaagtataatgacattataaagaaaaacggtaagttatatcttaagcaagattataaatttccagaagattatcgagaacatttgatgtacctatattccggagactttattagtgttgaaaataagaatagtaagtattatggttattatgtatctgtaaaaaatattaatagaaatttgcttaatatagatgaatgtttttatgagaataaagtgattgattacaaaaaacgtattgaaagagcaataactgaaagatctattgtaaaaaaatactacatagatattttagggaaaattggtggtgaaatttataaatgtggagaaccgttatcatatcttccggagaaagattgaatattaaagataattggcttattgtttattcgcaaaatggcgaaacaaaagtaccggttgatgatttatattcagtagtaattgaaaatagatctgcgatgctcagtgtaagtgtattaactacacttacacaagcaggtacacatataatattttgtgatgctaatcatctgccaacaacaatttcattaccactaaataatcactatagaccttatagtgtagtgaaaaaacaaattgaaatgtcacaagtttttagggattgtctatggcagaaaatagttgttcaaaaaattaagaatcaatctttatgcttgaaatatgttggtgttgaaacaaaacgttataaagaaattgaggatatttctcttaaagtgaaggtaggagatataactaatagggaagcagttgctgcaaaaaaatatttcccatatttattcggtgtaacatttagaagaagtgatgatgacattacaaattcagcattaaattatggttatgctattatccgttcttcagttgcgaaaacacttgcaagctatggatttaatggtgcaataggtttacatcatattagtgaaactaatccttttaatctagcagatgatattatggaaccgttgagacctatagttgatatgtgggtggatcaagaatgtgaaaatctttttgaaacacttacatatcataatagaagagatttgatagacttacccaatcaaatcatatgtatgaataataagaagatgaagataagatatgcaatagatatttatgtgaaatctttggtttcagctattaataaaaataaagttgagctacttgaaatacctatgttaattccttttgatgaattttttgaggaaactaatgattaatagatttatgaaagtaatagtgttttttgatttaccaacaagtacaaaagaagaaagaaaacagtattcttggtttagaaaaaatttaattaaaaatggttttgttatgatgcagttttctgtatatgcaagaactactagaaataatgatgatgcaaagaaatatgccttgttgattaaaacatttttgccaccaaagggttcggtaagggttctgaccataactgatcgtcaatatgatactatggaaatattgttaggagaaaaatatgcagaagagaattaccttgacaaacgtgatattcttgaattataatttaattgtgttgataagggcaataaatcacaaattatacaatatgttgtggttttagctctctgatgaatattgataaacttatacttttgttagtcaggttataaacggaatgaggttttagctctctgatgaatattgataaacttatactgaccgataagaacggcaagaagatttttggttttagctctctgatgaatattgataaacttatactagacacttatcaatattggtgtgattatgttttagctctctgatgaatattgataaacttatactgtttggcattgaaacagatatacggttagttttagctctctgatgaatattgataaacttatacaaagccctaatgttaatggttacgaagcatgttttagctctctgatgaatattgataaacttataccagttagataagcgatgaccttgacgatatgttttagctctctgatgaatattgataaacttatacacaagaagaaatcgaatatctatctttcaggttttagctctctgatgaatattgataaacttatacgtgttagaaaatataaagtcccaaatttccgttttagctctctgatgaatattgataaacttatactgtaaatatagcgattacaccaattttgatgttttagctctctgatgaatattgataaacttatacatgaagagatatgtaaatactgccgaggaagttttagctctctgatgaatattgataaacttataccgttctgttgttgcttcttggttggctcgtgttttagctctctgatgaatattgataaacttatacccaaggaagatatttactgcgaccatataggttttagctctctgatgaatattgataaacttataccgaatactgtttatatcgaaccgttcgtaggttttagctttctgatgaatattgataaacttatacttcgctggtatatacacctcgaaatcaccggttttagctctctgatgaatattgataaacttataccactcaaattttgggtgctttaaatattttgttttagctctctgatgaatattgataaacttatacggattgaacagggcgatgcagctgatgcacgttttagctctctgatgaatattgataaacttatacaagcatagtacctttaattaggtactatgtgttttagcctgctgatgaatattgcataattatatttataataatcaaatttcaaaacagaaaagtgcatagtgaaagattacttaaatattgattgaattatgcacaaattcataaaaatgtacattgtattattaaggtaactgtgctaacatcatgctataagaaagaatcaaaatcgaataaattgtattagaatataagaactgaattaatcgaacaaaataaaatagcatttgctaaaggctttatagcagtaaagaagttagcaaatattatttgtcaaattaaatactatagttctttataggaaataaattcttgtaaagaataaaatttaactccattttgtttgataattcagtgaaacgaagatacagattattcgtttttgatttaatataacaaaaaggagttttttattatgaaaaaaactaaaaatttaattgaaaagtcagaaaataaagaagatattgtattaacaattcctgcattgttagaattgcaaaaacagattgaagaaatatctcgtaacattaataatcaagtagttaataacttgttctttaatattgaagatgtcatgaagatgaccggctggtctaggaaaacagtagaggagttgtttcgacatcctgaatttccttctacagatttaggcaaaaaacaacttgtactaaaaactgctttcattaatttcttttcagtaaagagaaaaagtagtgaaagaaatacttggattaataatcaataagaggtgttttttatggcaaataaacctaagagaaaaggtaacggcgaaggcacaattttctatgacaaaagtcgtaagagatggagatgccaaataagttatcaaaagtatagtggagaaatagcaagaaaaagtttatcagcatcaactaaaacagaacttattaaaaagagaaatcaattattaaaagatattatggagcaaaaaatttgtgaaactacagatgctacaatagttgatttgcttaaggaagatgcagagtatgaccacaatatgaatagaatacaagattctgcttataacagaagactgctgactgttagaattatagaaaaaggaagtctagctaaaattccaattacaaagatacaaacaaatcaaattaatgattttttattttcgataaagcactattctaatagtgtaattgataaagtgtattcttcaatgtctaaagcttataaccttgccatacataaaagattaatgggatataacttgatggatagtccgtttattagaaagccaaagtcagataaaccaactaagaaagtagtagcctttactgttgaagaagaaaatgattttcttaattatcttaaagatatgaaaatcaataaaaatgctattgattacagacctatgttttacattgaactttttgccggacttagaatgggagaaatttgtgctttgactgctaaggatattgatttgagaaatagacttatacatgttagaaataccgttacaagaggtataattatgcaataaaagtaggggacagaacaaaaactcaaaaaggttatcgtgatgtaccaattcaagattgtttagtgcctatactaaaagaagttttgacaaactataaagagaatgataacggactactgttttataattttaaaagcaatagaccaatatctacctcacaagtgaatagttcgtttaccagaatatgtaagaaactaaatatagaaatcagtggtggtcagcatcttctaagacatacctttgcaaccagagttattgagtcaggaatatcagcagaagtattgaaaaactggatgggacataccgatatttctgtaactataaatacatattgtgatgtttttgatagactaaataaccctgcaatggaacagtttaatacctattgtcagcagaatttaagtatataaaatttagtgaaaatcttttgctactgcaccagaactgcaccagagaaattttttcacaagaaaatgcctagtatttaagaaattactaggcactttttatgcttaaaaagaaaaataatcagttgaaatttataatcaatagatatttataaaatacttttttatcgccaaaacctcattaataggctgtttttggggcaattttctgtgattttatcactttttaaatatttttgcaaaaaagtgttgacttttaggacatcataagatataataaatatcgttgttgagagacaacaaaacgcaaaataaaatatatgcgggtgtggcggaattggcagacgcgctagatttaggttctagtgttcaccgacgtgcaggttcaagtcctgtcacccgcaccaagaaaaagagaagtacactagtacttctctttttctttatacaacaagccctagggtgacaggacttgaaggtgaccgttaagaaaacagtccggtggactgtttaaaaaagcactaacggttaagttagtgctaaattacttctttgtttcttcttttggcttaggttctgcaaattcaacaaaaccaagtttgtttagttctgttgctctttcatcagaacaatcatacagttcaccactatgccttgtgcatagattattctcaacatcattaaagtccctagtaacctttactttcatatcatcaccaccttttaggtattaaaaaagcactaacaagagttagtgcctaaatattatattaaattatttaccgttactaatcaatttctcaacctgtcctctagttaatgcaatttcataccttgggtcttttggggatattatttcaaatggttccaaaatatatctaggagaatgctctttatgaacaaaagttgtaccttttgggtaatcatcaaaagttttattctccggaatagttgaaatatctattttcatattttatcctcccaagaaaattctaaattatactgttttgaaaacagttcaagaccagcttcatccatttcttttagataagcataaataggtttaccttcctgtgctgctatatcaacatacttttccccagcaattcccatgcagttccaatattcactttctatggtttctaaatcttttaatttttcattccattcatcagaattacgcaacacataagaacctctaccattgcaagctcttatttcagtcagtttgcctcgtcttaatatatttatatcctcaggtgaaaatacggtaccactaggatgattatgagttaaaacgcaacctttcatttgcttaatctcttcatcactgaaagtaacttcgtcaactttacccttttttaaatattttctattaccgactgcatcgtaaataatagctgtttcaaattcattttctgcaatttttctttcatcttctaaaagtttttgttttgcagaaatagaaaaaacattcgtacctattaaatctttattatttattataccactttcactagaattttcaattatttcatcaagtttttctttatattcttcattacttgtatgccaatcatcagctctattctgatactttattttattatcttcatcaaggctatgttcggcaagtctgttgtatcgtttttcttgtctttctgcgttttgttgctttgtttctagggtttctctttcttccatttttgcaagttcttcactgcttacaggttcaagagaggtaataccctcgtaataggtacttgtactgtccttacaccttggatgaaacaaaccacctgcaatagcctcactaagcaaaggataattaccgtcagctttactgccaccggaatacacatcatcaataaataccctgccaatgtactgtgcacaatcaggacaaccaccttgacgagaattaaccaccacaagtgaaataccccattcttgccttttctgaccctcaccgtagagataagcccttttattagcagtacggattgccatatctgcatagtcagaaagtgtatgcctagcaccgttacgatattccacacaattaagacctacttgtagcatatccttaactgccatatcaactgctttttcatatgtacctgcaccactgtttgcatagacctgagcagtgaaaatagcttttctgtacttgtcatttgacattctgagtattgcagtttctgcctttttcatatcgctcttagttgcattaataagtgcatctaactttctgtcattgactttgaaaaattcaccagtagctgaaggacttaccttaccgacattaaagccttttttaatagcttttaatatttcagcctcttgctttgcattgccatcaaccattgcagttttcagcatttcctcaattttcttatttaatgtggaaaactgcttaccgtatttcttttggttggttctacggtactgttcaaggcttttaagttgttcagactgccactgtgaccagttataaccttctttttcttcctctgccctatgatgtttaaaatttctcatcatactgtcgatgagttcattttctatggtttcaaaggctttggaaatatcataatcagccattgtttagtaccgtatttaggtcatcaatttcagaagtttcatcaagggtggttatgccttgttcttccttaattcttttgacttcctcagctttccaatcggcacacttactatctccatagagcttttcaacagaagtttcaacactcattattgcactttgtcttgctttaccaacagtttctacttgactttcaaagctagggtttgcatactctctaaagttaattgccacatcaaggtcagccggtactaaggctttatttgttagttcataataagcattaagtacggacttaacaagattaggtaatgatttttcaagaagtttaacaaagttctgtgttgtaaaagacggtcgggtgtggtacacttgtattagaattctatgcatttttgcaaaaaggggagggtgcctgtgtctgccaaccgtaagggcttgtctgtaacggaacaccatgtgctgcgcagtgtggccattgccgtcttgtttgtgctgtccggcgtgttagggcatattcccgcgtcggtgccttatgtaaaaacccttatggaatgggcagggtacagcattgtgctgctgttgctgtctgagtggatgattcgcatttttctgcgcgtgcggcagcgctctatttgctattgtctgctggcggtggctgggttgtgtatcttttggtatatggcacgcaccttaaaatggtcagtggtaggagacgagttgatgcggcggtatctgtggtacctttattatgtgccgattgtactgttaccacccttgtcgctgctgacggccttttgcgttggccgaccgccgtcctaccatgtgcatcggcgatggctgtggctgtttgtgccggtgggtattctgattttgttggtgctgacgaatgatttgcaccagtgggtctttgcctttcaaaaggattttgtaaacagtacatccagctatatcagacggggtgggtactatgcaattgccgcgtggtcttgtgtactgattatggcagcgttggcggtgctgtatcagcgatgcaaaattccggacagtcggcggcggattttgctgcccttcctgtttgtggcactggcagctgtttatgcggtagcatatccttttttcagcgatacatatctgtttaagtgtatggatttaaccacattgttttgcggcgtgatttacggcgtgtttaatacctgcgccgccgtgggcttgattcaaaccaatagccgttacgaggcgctttacagccaaacggatatggatacttggattatggatgaaaatttgcaggtggcatacacctctaagggcgtggttttgccgtcaagggagcgtatggagacggcccttcggcataccgtgccgttgcctgaccaccgtcagctgaaatgtatgtccatatatggaggctatgtgttctggattgaggatgtgtctgccgtccatgcactgctggaacaactgcaagaagataaagagctgctgcaggacaaagaaagcctgttgcaagccgagattgaagttaaaaagaagcaggcggccgtagaaaagcagctggacttatatacaaaaattgacgcctccgtaggggcgcaggccgcggcgatggagcaagtgctgcaagcgatgggcagcgacaatgcggagcaatcgctgaaaactctgtgtctgctgtgtgcctatataaagcgcaaaagcaatttgctgctgcttggagagcacaacgcaagcgtgtcagtgcgggaattgtcgctttgcttgcaagagagctgcaacgccttggctctgttcggtgtgcaatgcaacttaaatccctctgatgagggagaagcgccgattgagacgctgatagatttatatgccgcctttgaggcgcaaatagaagcccaaatgccaggcttggaggcattgtatattaaggtgtcgcaaaccccggcagaagtcatggtgcatttggttatgcagccgcattcttgatttgtaccgctttggcgctagtgctgtaccggtggcggtatcggcggatgttgtccggcaactcgattcaggagagtacggacaaggtgcccttggggctttgcttttattatccggatggtgttcccattttaatcaatgcgcgtatgcagcatttggcagagcgcgtaaccggcagtgcgattaccaatgcagaggtgttttgccgccgtgtggacggcaaaaccgtagaggcggacgggcggtactaccgtttttgcagtgcggatatggattgcaatggcgagaccgtgcggcggctgtgggcaatggatattacggatttgcatcgattgacgctggaactggacgcagagaatgcagcccgtaaggaaatcaatcagcgactgctggcgtacagtcggcaagtggaggcactgaccagagaccgggaagtgctgaaggccaaaatggatattcacgacaaaatgggtcgaatgctgttagagactaaaatttttttggaggaaggcaacagggattatacctccattgcaaaccgttggcaccatacgctgacggtgtttaccacgcgcttttggcgagagcgtacaccggcggatgtgcaggcgctggagcaaatggcggcggctatgcacctgcagttgcaaatggacggcgtgccggagcaggcggtgtttttggaagcggtgcgggagtgtatgaccaatgcggtgcgccacgcaggcgcaggggcaatgtatgtgcaggcaacgccccacagaattgtgattaccaataacggcaaaccaccggagcaccccattaccgagggcggcggtctttcggatctgcgccaaaaggtggagcagcagggcggtacgatgacggtagaaagtgcgccggtgtttcggctgcaaattgatttataaaatctgtccttttgggtagggtgtagcggtgctaaatgcagtataataaaagtacaacaggaggggattgccgtggtacgagtgttgattgtagatgaccaatcgttggtgcaaacctatttgcgcacggtggtagaggaaaacccggattgttccgtggtgggtacgctggattgtgcagacgcagccgtagcacgctgcact

SEQ ID NO: 3932 - DNA, 6807 bp, synthetic construct
  misc_feature 1..6807: note = Synthetic
  source 1..6807: mol_type = other DNA
tgctttttctcaagatatttctaaaactaatagaaacagaaatgtttatttaacaataacagatacatctttttataaaacaaagaaagtcccattaaccggttatactgataatgacaacataacttgtggtactcctgagctggtaaaaataagcgaaaatttattcttggttatgtgggaagaaactaataaatcaacaaatgaagtagtcactaaaggaatgactgttgatgcgaaaggtcaaattgtttcatcagcaaaaactttgactgcaagattatctgattgccaacctatattatgtagtgataatttagttaagtggtatgtaacagataataacggtactactctatatagtctgaacccctattatatagaaagtctccataaacataaatatacttctaatgtaactaaagaacctacttgtaaagaaacaggtatcagaacttatacttgtgaatgtggagatacttataccgaatctatagctacaatagaccataaatatcagtataaattagtgaaacaatcaacttgtaaagaagagggattaggtaaatacacttgtacagaatgtggagataattatacaaaaactatttcaaaaacagatcacgattatgaacagaaagtagtaaaacctacttgcacagaacaaggctatacactaaatgtatgtaagaattgtggtgatacttataagagtaattttgtcgataagatagaccataactataagtatgaagtagtgaaagaaccaacttgtacagaagaaggcttaggtaaatacacttgtacagaatgtggagataattatacaaaaactatttcaaaaacagatcacgattatgaacagaaagtagtaaaacctacttgcacagaacaaggttatacactaaatgtatgtaagaattgtggtgatacttataagagtgattttgttgataagatagaccataactataagtatgaagtagtgaaagaaccaacttgtactgaagagggtataggtaaatatgtctgtacagaatgtggagaaaccctaattgatactatacctacaattgaccattcatatgtaatcacaacaacacctgctacaatgaagagtaacggtagaaaaatcagtaagtgttcaatttgtaataatgtgcagtatgacaatgtaatcatcaagatttcttcggtaagtatttcaaaaactactttcacttataacggtaaaactcaaacacctaccgttacggtaaaagatagtaagaaaaagactttaaagaataaaaccgattatacagttacatattctagtggcagaaagaatgtaggcagatattctgtaaagattaagttcaaaggtaattatagtggggaaaagactttctattataatattgcacctaaatcaacttctgttaagtcggtaaaaggactttcaaagggtatgcaagttaatttaaaactacagaaaactcaaactacaggttatcaaattcagtatagtacatcaagtaaattcaaaaatgcaaaaaccgttactgtaaagaataatgtttctgctaaaaagataactaagctaatggcaaagaaaaagtattttgtcagagtccgtacttacaaaacaacaaaattctccggcaaaaattataatatctattcttcatggtcatcagcaaaaacaactgtaacaaagtaatataaaacagatttctactattcatattaattccttatagataatcctcatcattatatggtggggattatccttttttaattattaattaaaaccacttgctaacaaaagaattttataaaataaaaatattcaaatttgcatttgattttataattactatagttgaaattttgccttgaaatgtgaagaaaaattgcaaattaatttcaaaatgtgtaaaaaaagaggcttttaaagtgtgaaaaataaggctgtaaaaaaagcccttttttacaacttttgaattagccgaaaagccagatattatcagggctactgccttgtaaaaatttcaaaaagttaccgaaataagactaaatcggcttttttcctttttttattttaaggttttgtgttgttgataaatgtatttttatgtattaaaaaagttgatttagtcttattataatttaacgatttagtttttataattgacttttttagattgctaaatgtgttatattgctagaaaatttttactttataaaaactaaatccaactgttttatgatggattttattgttgataatattaagattatttccgaacctttgcaagaaataaattatatcataccaagaataattaggaaactataactgctacagttgtatctattcgtactatttcattatatcgtatccataacaacaaccaaagtcccaaatatgggacttatctattataaaatactataattttactttttctattgtgtttataaaaataagtatgatataatgcataatatatagaaatagatgataattattaattattttatataaatttataatttaaggaggctaatatggattatcaagaaattatgagagatattgcaggtggtttaaccggtgataatgaggaagatatacagtacttaatggaacaaatggaaaagtacaaagaccatgaactgggaaaagagattatcagggcttgtggtaggcttataagtggaatgttgcctgaagaaaaggtcaatgaatttgctgatgcttttgagaaagataatgcagaaatagaaaatgaacttgatgatttgttttctaccctacaatcaggtgattataatttagcacttgataaagtagaaaaattagtggaaaatgctgaagaactgatttctgccggtatgtatcagaatgattcagtcagtgattatttttgtttcattaaccctatgcaagaattactttatggttatagacacagagatagtgagaaagatattagaccatctaattttccttttgctacaatatatttcttttacggaaatatattatttgaacttggtcgttatacagaggcaaatgttgcacttgaaaaagcaaaaagatggaatcctatggatgcagatattgcctttgaatatgcagaaacatacaaggctatgggggatattgaaacattctttgattatacaatcgaaattttcaattttgcttataaatctgaggatttagcccgttgttatagaaatcttggttattactttatagaaaagaaaatgtggcaagaggctattgcttgtgaagattatagtttgaattttgattctaacaccgatgcagcttatggtgagttgttttatattgaacaaaccacacatttggaaataaaacctgcacctattgaaacaatgaagaagtttagtaggaaatacggctttccattagagcctaatgaggatgttgtaggattagctatagcttatggtaggaatagtgcagaaaatggcaatgatgaatttgcaaaatattttcttaatattgcctatgacttaacccactttgatgaagtgaaacaactacttgatgaattggaaaggaaagataatgtatcatacgaacagtaacagttgtatagagtattgagtaatattattttgtaataaaaatatttaaagttttaggtcattgtagaattaacaaaattagaacgtagtaaaaccccatgaagtaaaactctcacagggttaattactagaaattattgagttgtacataaaaatatggtattatacaacaaataatttatatataacaatgtatttggaattactgtatataagttaaaaagtttcatatatgggacaattaatttgattaatcatgatatgattaataagataataaaaaagagcaatcgttagattgctcagtgtggtgttttgggtttccactaccctacggcattctgccttgtcttagaactctgatgaacattgataaacttataaaagcggtttaaagtgttgattgatgaatattgataaacctatacatcgatttctaagttctttaacaacattttattatataaaaacaattttgtcaacagtgaaaggagaagttttatgatttatattattggtttagatgtaggtattagttcagttggttgggcagtaataagagtagataaagattgtaggagaatagaagattttggagttaggatttttgattcaggagaaactagggatagaaaacaaagtaagtgtcaggaaagaagaagttttagaggctctagaagacttatccgtaggagaaaacatagaaaagatcgattaaaatattttcttaatgagatttcttttgtaactgaaaaagagatgaaggatttttatggacataataatcatgatattattgatttaagggtaaagggtttggaagaaagattaacaccggaagaattgactgcctgtttattacatattgcgaaatttagaggttataaacctttttatgattttgaaaaagttaatttaaagaccgaggacggaaaacttctcctacatatgaatgaaaccaataaaataatcgaagatggtggttatcgttctgttgctgaagcaattcaaaaagattcttattttaaagaagaaacaactggaagatatagattccataataaaagtgataagaacgatattttgttttctaatggtatgattaaaaaagaagcagagactattttgaattgtcagaaacaatattattcacaattaagtgataaaaatatagaaaaaattactgatattattttttctagaagagattttgaagatggacctggtaattcagacgataagaatagaaaatataccggtttctatgattcaattggaaaatgtagattctataaagataaaaatcgtggttgtagattcacagttttaggtgatgtatttgcattaattaataagctatctcaattcaagtatgttttaattgaaaccggtgaagtggataagatgccaaaaaatttgatgcatacaataataatgaaagctatcaaagatgcatctcttacaaagaagggcattattaaaattgcaaaagaacaaggttttacattggtaagtggtaatgaggaaaaagatgataataccgatataactaactgcttgaagtttgtaaaacctatgaaaaaaatatttgatgcagatgacagtgactttgagtggagaaagttaataaatgaagatccaacaaatattgatagtttattaaacagaataggtgtgttgctttcttacaatattactccaaatagaagattagaaaaacttaattctatttctgaaatcaaagataatgctattgttgaaagattatcaaaagttaagctatctggaactgctaatgtttcaaatgagtatatgattgatgcgataaacgcatttagagagggacaattgtatggcgattttcaagcaaatgtaattaaggacgatttttcttccgataaaaatgccacaaggcacaaaaaattaccaccttttacaaaagactctgaaatttatgataatcctgtagtatttcgttctgtaaatgaatgcagaaaagttgtaaatgctataattgaaaggtatggtactcctagtgcaataaatattgaagttgcaatcgatttaaatagaagcgctgaaaataggaaaaaattagctaacaatcaaaagaaaagacgcaataacaatgcatcagttttgaaaaaagttgctgatttattaggcgttgaggaatctgaagttacaaagtcacaacttgacagatttaaattagctgaacaacagggctggcgcagtatgtattcaggagataatctttatttagatgagaaaggaaaaataactgataaagataaaaaagctattatcctaaatactaataaggtatatgaaattgaccacattattcctttttcaagaattcttgatgattcgttgaataataaagttcttgtctttgcaaaggaaaatcaagataaatcagataggacaccactgatgtaccttaaaggtgattcgagaaaggaatttattaagagggttaattcattttatcaatcaaaaaatgaaaacaaagagataggctctataagcaaaattaaatatagctacctaatgttagatagcttaactagtgaagaagctctaaagtatctttaggagtggaaaataagaaatcttaatgatacaagatatatttcaaaatacttagtgaagtattttaatgacaatcttttatttgaagagaataaagacagcagaagaccacctgtgtatgcagtaaagggtgcaattacctcaatgttaagaaaacaatggcttaacaaaaaaacttggggtaatccagacaagaaaaaactaaaaagtgttactaaccttgaccatgctattgatgctatagtaattggcaattgtcttccggcttatgttgaaattgcagttgagaatatcaaacttcgagatatttattattcttcaggtagaaagaaaactgaagaatattataggagtagagacacatttattgataatctatggaagttttatggtgttcctaaaagagaatctgcaagattacttgagaaaatgacagaaaccccatcattgataaataaccttcgacaagaagtggaatgtagagtacaggattatggtactatgcagttctttagtaaagatgataatgggaaaactaaagaggaatgggatgaaatatacagaagaaatataactaatttctatgtaggtcagaaagac

SEQ ID NO: 3933 - DNA, 16142 bp, synthetic construct
  misc_feature 1..16142: note = Synthetic
  source 1..16142: mol_type = other DNA
taaccacccgcgaaaagataaaatctatatcagcaattcgacggtattcgacgaatccgcgcaactgatcgatacaaaatcgtatacagaaagcctgcccgccggaagcagcatagcacattcgttcaactatacgctgccaaacaacctgtcgggaacaaaatatttctttgttcatgccaattacgatagcagtttccgcgaaacaaattataccaacaataccagtgccgctgcaggagtaaccattgccaaccccatagcggttgatctcgctgtaagcgccgttgcagtggcagacacagtattcacggtttatagttccaaaataaaatacactgtcgtcaacaatggcccgggtgcaacttatggcaactggaccgacagtatattcatcagttgcagcccggtttacaatccttccggcagttatttcgtagcgaccaggaatcataatgaaacagtaaatagtggcagcgcctataccgattcattccaggtatccatgccatttagctggcggatcagcaattgttttcccgaaaccatgaatgctaccgcctatttctttgtaaagaccaatgccggcggtcagttgtacgatacagtaaacaataatacgggaggttcgggcgcgaaaattttgatcaatccattggtagatcatatcgttacctcctttacaggtccggatacagctaccgtagcaagaccatttaccagtagctggacagtcaagaatgttggataccatccggccatttcggattatttatcctggatcgataaggtttatttctcaccagactccattgaaaacggaaacgatattccttccagccatttttatatcgacagcaggctcgaaagaaatcaaagctattcggagatacaatccatcgttccgccgaatacgcccacaggtgactactatgtatacctgaaaaccaatgccggcaattcgataacaggagaaaaggtgacgaacaacaatgcaagattcattcgtgagccatcgggcactgccaaaaaaatacatgtcgttcagcccctgctgcccgatttgattgatactattctcagcgttccatcaaccgcggcagccggtcagccgctaaccctggtatatcgaaccagcaatatcggcgccggttcaacctatccaagtttctacagcaataccatctatctctccagcgattttattcccggtaatgcaggagatatcgaactcgcagcacgcaatatgtcttcggtattgcaggccgggcaaaactatacggatacactccggtttacccttaatctaaataccataccgggcaattatatattgattttaaaaactgatgccaacaatgcagtagttgaatcgaacgataccaataatctcgcgtttgcctatgtaaacatctatattcagcaacccgtagatcttttggtagaaaatatccaacaccccgataccgttttactaggctataatatagataccgtaaaatgggtggttgccaataattctgccaataccgccagcgggatctcttcggatggagtttatctctcgaacaatagcagtttcgattctacggccatattgattggtattcagaataaaaatatttcgatgccgccgctcgcgcgcgacagccagtcgttccgaccccttgtgagtagccttgccgaaggatcttatcatgtattggtgaaaaccgatctgctaaacaatatcaacgagcccaataagaataataacaccagcccctcttcccggaaaatttatgtaaaagcaaaagagcttgcattgaatattccggagttcaatactcttcataccattacccgttattataaactggtaatacccgattcgctaaacggatccacgatactggttacgctccgcagcaacgattccctaacgatgcgcaacgaaatgtatatggcattgggatatgttccctcgcccgcccgcttcgattaccagttcaatacacctaattatggcaatcagcagatattgatgagctcggtggtagattcggtttactatatcgccattcgttgtgtgtcggcaaatccagttgttcagaacataacactgaatgcagtacaactgccttttgcgcttttaacggtacaatccaatagcggtggaaatatcggcaacgtaacggtgaaactgaacggttcgctgtttacagccaatatgacggcacggctttccaaaccgggaactaccattgatgcctcggctatttactttgtaaacagtaccaccgcatttgccactttcaatctacagggcaaaccattaggcctatacgatgtactactgcaaaaaccggattccagcaatgccttacttgcaggcagtttcaccatcactaccggcaacaatggaggcgtgttaacaggtggtggcaataataccgggcagacaggaaacggcaacacgccgggatgcgacccgggcgcacccggcggactcaattcgctgctccttaccgaagtaattgttcctgaaaaagtatttgttggatggccattccccatccaggtgaattatagcaaccctgccaatttcgatgtgccggtacaaacaagaaccctcttcaacgataaagaagtagtggtagcacttacacaggcaggactcgccgacggtaaaacatcgctttacctcgaattgaaagaacccggaggtccgcccggaatgatcagggcggggggcagcggaaccattattgtttatggaaagacgccacccaatacgccgggtcacaccttcatcaaattcactttaaagtaaagagcagtatcatgattcgtccaatcttaaaatgggatatgagaaatatattcttaagcaattgtttccttataacaggtatattggttgttgccagtttacagggcgcagcgcaaaacatcaatattcccaataaaaccgggcccatgggcctgcaggtaaacacgcttacgggcaatctctactactaccgccaggacttattgattccggcaagagggcttgatttcaatataggctttcactataacagttttgcctatcttgaaaacgatggatacggaaacggatggactttcaattatcatatcctctacaacaatgatagtcttggtggaaagaccatacgctggggtgatggacgggaagattattatactccttcaggaccagcttccttcaatgcgccgaagggatttttcgaccagctggaagaataccagccgggaaaatggaggatcactcagaccgatggcaccaaatttttcttcgataacagcatgcatcgccgcatcacccgcatggaagatgcaaacggaaactatatcgccttcagttacgcagataccctgctggtttcattaaccaatggggccgggcaaagcatcacgctgtcttataataacgggcgactcaccagcattaacgatgcgctggcaagccccgcccgcagtttcacctattcgtacgacgcagcaggtaaccttaccgaagtaaaagatcccctgaataatagtacccgttacagctatttaatcaacgggcctatgaaatcggtgaccgataaaaacaataacaaggtagatatcgtatacctcaacaattttgccctcagcgaaatgatcggttgcaacaagagaatcagctttagttacgatacggccagtttgcgcacccttgttaccgactatctcgaaagcggcaataaccaggtgagtcagtacgattttaaaaggcaggaaggaaagaaatggctcagtgctatttcgggaaactgctgcggcttcgaaatgaaatttgaatttgatgcagccggcaataaaatcagcgaaaccgatgccaatggaaatactacccgttatacctacgatgcgcgcggcaatatgctaaccatcaccgatccgctcaacaatacgcaaacatttacttatacgtccgacttcaacaaaccatcgagcttcaaagaccggaaaggcgccattaccagcatgaattatgattccaggggaaatctcctccaaattaccgaacctggaaacctggtgtataccgcaacctacaataccaatggcgatatcaccagcagcaccgatccgaagggaaataccttcacctataactacgatgcgctgggcaatccgttaactgtaaccgggcccaatggttattcggcgcaactggcatacgatgcacggggtaacctgctttcgtttacagatgcaaagggaaatagcagcagtatggaatttgatatcctcaaccggctcaaaaaaataaccgatccgctcagccatagtgtacagcttggttatgatgccgccggcaatcttatctctttcaaaaatcaaaacaatgaaagcagcagcatggcatacgatgccagcaaccgcctcgtagaaagcaccgatgaaatgggaggaaaaaccattgttcgatacgatgccatgaacaatatcaaaagcatccgcaatgccctgggttatgaagccggttttgaatacgataaccgaaaccgcctgcaaagaatcaccgaccccgagggaaatacacttacagccgattacgatgcgaggggcaatcttacccagcttcggttaccagatggacaaattcttaactatacctatgatgcacttaacaggctggtatctgtaagcgatgcggttggaatcattataaatgccagttacgacaaaaacgggaatatcatcagccgcagcaatgcaagcggtgctacctatactgcagaatacgatgcgctcaaccggatcaaaaaaatcaccgatcccctgggcaaatcctataatttaacttacgacaataataataacatcgttgcagttacggatcgcagtggctttacttctacttatacttacgacagcttgaaccgaatgaaaacggtgaccgactacaatggaaataccgtttccattacttacgatctgaacagcaatatcgcatcgcttagcgatgaaaataacaatactaccagctatacctacgatccgctcaatcgcctgataagaaccacttttcccgatggacgctacctggaaaattcctacgacaataaatcgaatcttattacacgacggctcgcagatggaagcctgatcagctttggttacgattcgctcaaccgcgtagtttctaaaacacttcccggcggaaacacttattcttatgcctacgatgcactgggtcgtatgtcaacggccactaacagtgaaggaacagtgagttttagttacgatgccctcaatcgcgtaattacggaaagctttaacggtcgaaccattcgctatacttataatatcagtggaagaacacaaagcattatttaccccgacagtaccctcatcgtaaaaacctacgatacgcgcaaccggcttaccagcatcacaaaaaacaatcaattgctggtgagctatcaatacaataccatcaaccagctcacatcgaaattgatgggcaatggaaccagcaccagctatcaatacgatatcgccaatcggttaagcaatatctttaccgcaggcggaaccatacaaaacagcagtttcagctataataacaacaatcataaaacttctatcagtcgcctcaacaaccccgcacgctcggagcagtttacttacgataatggccgacgccttaccaattacaaacgcgggcccatgggtggaacgcctctggtggagaattcctatacttacgatgccctgggcaaccgggtatcggccagtttcaatggcgtcaataccagttacagcagcaataacctgaaccagttgctgagtagcaataacggaacgcagactattaatttcaccttcgataacaatggcaatctgctcttcgacggccgttttcacaaaacatacgatgccgaagggcgcttgctgaaagactccgcctctccgattaatgtaattacctatggttacgacgcattgaacagaagggtgcggagaaatgccaatggcatcagcgtgcgttatggcttttcagggttttcattgattgaggagatcaatccttccaatggatcgcttctcagcaaaaccgttttctcggattttctgagcccggtagtgaatgaaaaaaacggtcagcaatatttctatcaccaaaacgaaatgaactcagtggaagccatcagcaaccagtttggccgggtgctggaaacttatgaatacgatgcctatggcagcatgaagatctatgattctcttaacaatccaataaacagctctttaaccggtaatcatttcggctttacaggacagttatacgatagtgccacgagaacctataaattcttcttccgcgactacaatcccgaaaccgggctttttaaccagcgcgacctggttggttatgccgatggcatgggcatgtatcaatacgttcataacaatcccgccaatggcattgatgtattgggattgaacgattgcgatgaacagaaaaaatccctgctcgatcaaaccgaatggctggagagctatgtcaatggaatcatctcctcgctcgacaaaatgagtgattataccaaaactgccgataaacttaagctcgcaaaaacactggccaacgatgccaaggtattcaagggcgcggccaatgtaatggaccagatgggattgctggataaggcgcttgatttctggatcaagggcgatgccttggccgatgcgtcaaaggctctcaacaattccaactcggttaagctgctgggcggttttaaagattttgccaaaggagccggcaatgcacttaatgtagcggatgtatccatcaagggatttaaattcaaacaggccgtgggcgattatatgaatggaaatatcgacggctaccagctcaccaaatcgggtggcaacctcgggcaaagtgcattgggtttttcgggcgttggtggactttataatctctttgattttgcccaggagaaactgctcaccggccaaagcatgaacgacaatgccgaatatgccgggcagttttacggcgaactgtattcgaatatggtcgataaccaggattggaagacgattccgctggttccgaaaaaaaatggaatcggtttcgaacgcgatccccgttttatggaaatgcggcgccgcatcgaaaacaaagtgtacaggcgaaaggccgactgcccgcaaaacaatggaggcggcacgcagcgaccgtcgcccatcaatggttccgaaaacggcgatattaccgaggcgatctcctccttcgatcccaatgaaattattggcccggatggtatgcccgataaaaactgggtgtctgtgaacgaccgactaccttataccgttacttttgaaaacgataaatcggccaccgcacctgccaaatacgtaaaaataattgtgcccatccatccaaaaatgaacccggcttctttccaattgggcagttttggtttcaatagcctgagttttacggtgcctccggcaagcgcatcttattaccagcgactcgattgccgcgattcacttggattgtttgtggatgtgattgctggttacgatattggaaccaaccaggcattctgggaatttcagtcgatcgatcctcttacactccttccacctgccgatccgctcaaaggttttctcctgttgcaggatagcagcagtctgacctccgggcatggctttgtaaacttcagcatcaaacccgtttccaatgccaatacactcgatactatattagcgagagccgatattgttttcgacaacaacgataccattcccaccaatgtggaattaaataccatcgatgcattgccgccggtaagcaatatcgcagcgctgccagcaaccagcatcaataccgaaattgatatggtgtataccggtgccgatgatgtcaatggctcgggagtaaaaagctattccatttttatatccgacaacaatgccgcgccggaactatttgcagctgatttcagtggcggcgatacttcttttatcggtctgccaggtcatcaatataaaatatatttatcggccaaagacagtgtgggcaataccgaagccctgcgactggtagattcagtattcgtgctttccggagagaatacgatttgtccgaatgggaatattgtcttcgattccaaaacgagcggcgccgtttttcaatggcaggtagacatgggttcgggatttgtaaatatttccaacggcggtatatatgcgggtgccaacagtgccatccttcaactcagcaatgcacccacatcgatgtacggatatcgttaccgctgcatggtgaatggaagtttgtacagcaccacgttcctgctcaaatttggaatgaaatgggaaggaatcatcagcagcgactggttcaacccggctaactggacttgcggaactctgcccgacgaaaacaccgatgttattattgagggaggcaaattcaattacccggtgattggctccgatgtatcggtgcgcagccttcgattgaacagcggcgccagtgtaacagtgaacccgggagtaactattaccattcgcaaataaataaaagggcgtttgcacaggcaggcgcccataacaaaatttatatgacacattttattattcccaccaacaagggccataaagccgtgctgcccgaaaacatcatccgtattgaagcctgcagcaactattgcaaagtgtattttgccaacgagtacccgcttacggtagccaaggtattgcattggtttgagcagaaactctcctgcggcaatttctaccgcatccaccgcggtcatattgtcaaccgaaaattcatttccaccatctcctgcaacaaaaccctcaccctttgcaatggcgaacggctgcaggtgagtaaacgaaaaaggtatatgatacagcagatactggattgatcggaaaacgttatcgctcacaaatagctttatccaagcgtaaaacatcagaatgttggtatttgcttctttactccaaatgggggtaaaaagctgccggccgcaggctgcacgaagccgatccgaaaacatgatgatatactttaatctgatagatttcccacaaccggagaacacattatattatcggggagttccttctattactctcaccattacccgcagttataaaaaaatccgtacaaatacggtggggttgagttattgtttttactaatttacaatcattgatcttaaagcgtcctcgcgatgctaataatcaaccaaaacagtatatgttgaaagttgaatgaagcattctttgattgcccgttttcggattcagctattgatatatgccgatcgcccgaaatagtagttcgcatatataaaaggatatgaagtcatattattattattttaaagttagcagcttggtgactatattccgaagaatgacattttgtttacaatatttaacctattagtattccattacgaactccattgttcatcactcgactctcgaccaaataaaaaacctcttcaaataaacactctcaaacatgcacgaagtaagattctcgctccctgaacgtgagctcggaaaatcagatatcgagtttaaaataaaaaaagacggtaaggtatttggaactctaggagtttctaaagggtccatagtttggttcccaaaggacacatcttatggtcataagatcagttgggttgattttgattcttttatgaagactaaaagaaggcaagaaaaacgatagccaacttgaatgaacactgttaggaataaatctgtagcggtttcagattttgtgacagaacaatacagcaattcttgtttgcaaaaacaataatcccggctttcgccgggactactgtaaaagtgttcactacggaataatccttattgtgatttgcttcaattgaatacaaatatattcaatacaaatcgatttgaaattttttttttaaattcacagcaacccttaagctaagttcacatgaaaaaaattcttggccttgaccttgggaccaactctattggctgggcactgatcgaacgtgatttcgaaaacgaagttgggaaaatattgagcatgggaagtcgaattatcccgaccgatagtgatttgttgagtaaatacgaggccggtcaggcggcttcaaaaaatgctgcaagacgccaggcaaggggggcgcgacgattaaagcaacgttataaactacgtcggcagagattaatagatgccctaaaaattcttggctggatacccgaatcttttcttcccggccatcgctttgaggtcgacgaaataacacttcgggagatgaaaacgctctttcctggctcagatatttcagacgattgggttgtatattatttacggcacaaagctcttagcgaaaaaatttccgaacgagagcttgcccaaataatttatcatatgaaccaaaggagagggttcaaaagcaatcgtaaaacagctaacgaaattgcagaaatcgacgatacggcagaagaaaataccggtaagaaaaaaagagagaagaaagttgaaattgtaacaattgtatcacttcgagatactgaagaaaaactaaaaggcaataccatcttcgaaattgaattagtcgatggtagaaaagggaccatcgccagaaaatcaaaacctgactgggaaaacaaagagattgaactcgaaatcacttggattccaccgacgcaaaaaagtcccgagcgcctcgaattcagacccctcaccaattccgatgcagataaatgggcaaaacaaaagattgccagggaagaagcaatagttaagtcgggacttcaatatccgggcagctattattttcatgagctgctaaaaaaccgccaataccagatcaaggatgtttctattgatcgcagcttctatgttaatgaactgactgctatactccataagcaaattgaattgaatccagcccttcaaaataaggacgccataattaaaattgctgaaaatttttaccccaaaaatcttgaaaaacaaaaagaactaaagaatcacgatctcgttcatttatttataaatgacgttatatactttcaacgtccattgaaaagtaaaaaaagcagtatcgctgattgccgttttgcattcaaagaatacatggcgcctgacaagcttgacaaaataaggataccttacaaagcagccccaatcagcagccctatcttccaagagtttagaatctggcaaacaattaacaatatcagggttctgcaaaggcaatatcgggacgaagctggcaaattgcatcttgaacaagatgtaaccactcaatatgttgattgtgcgggtcgggagcaactatttgaactctttgacaatcgcgaaagcgtaaatcaaaaacaaatactaaaggcaatcgggttggatgaaaaagatttccttgtaaatctatttcggcttaacgagcaaaaagaaattccgggtaatgaaaccaagacagctatccgtaggcagtttaaaaaggccggctacgaggcggaaggaaaccttttgatatcgaacccccagaaatattacctcctttggcatattttctattcattggacgaggataagcatatttcaaaagcattatgcagacagtttgcaattccacctgcagtagccgaaatagtatcaaaaattccggcgttcaaattgcagtatggctcgttatcgcatcaggctattaaccgactattgccattaatgcgatctggaaaatattggagttggaacaatatagacacatctactaaacttcgtcttcaaaagctgataaccggggaatatgacgaaaacataagcgaacacttgagggagctcttttctaaacatcagatcaccaatgaagacaaatgccagggaatgcttgttgcaatggcagcgtattcggtttacggagtccacagcgagcgaaatcaaaattcatatgatactccggaacagttactacccaaagagccgttgaacctccgcaatcccattgtagaacaggttgtaactgaaaccctgcggattgtacatgatatatggaaaactcatggccgcccctgggaaattcatattgaactatcaagggatttaaaacgaaatgccaaagaaagagaagaaatctctaaagtcatctcggaaaatgaaaacgaaaacaaaagaattgcagcaatactcagagaattgaaattaggaaaccccaattccataagtgatattgaacggcttaaattatgggagaggcaggcagatgagaaagcgcgagaggaatttaaacagattaagtttaagcgcccaaccgaaccaacccggcaagaaatagagagatacaaactttgggctcaacagaatttcttgtcaccttattctggcaagcccattcctctttcaaaactttttacgcgttcttacgatgttgaccacatcatccccaggagccgattcttcgacgactcccaagacaataaagtggttgtggaaacaactctcaacaaagaaaaggataacaaaacagcttacgagtatataaaatcaggcagcgtgaacggcaatcagttgttgtcgccttctgaatacgagtcacatatcattcgttatttctttggcaaaaaaagaaacctgttactaagcgaagacgtaccagaacgcttctccaaccggcacctggttgacagccgctatatcagcagaaaactaacagaattgctcgccccagtttccgaaaacactgctgaccctatcatttcgacaactggaagtataacgagtgaattaaaatcagcgtggggcgttggggaaaagatgaaggaagtagtacggtggcgttttgaacgacttactgaaaagagcggcgaaccctatgtttggtatgaagaagaattagatgacaaagaacaaccgactggcagaaaaacccttcggctaaaaggatacgaaaaacgtattgatcaccggcatcatgctttagatgcccttattgtggcctgcactaccagaagccatataaagtatctaaacgatctcaatgcaacacaatatcgaaaacgtcctaccgataacgaacttaagacctatttgccaaggctacttgaaaccggaaaggacaactactggcaaagtcgaaaatttagaaaaccctggaaaaattttgtaaccgatactgcggaggagcttaacaatattatcgtttcattcaaaaaaaatatccgcctctacgggaaaaaagcaaacaaaaatctcaggtatattcagctaccagacggaacattcgtaaaaaaatatttgcccgtactggacgaaatgggatatagaaagctttcgccctatgtaagagcgtcattacacaaagcaacgatcgccggaaaaataatgctaaaagagtacaaacaagtctcccttagtgatgcattcaagatgccagaccaaatagccaataaggagataaaaaagtatctgacagcactcttgacagaagtgaacggtgacccaaaaaaggcaattaatcttttcaagcaaaagccactaaacgataacgatggtaacccaataaaaaagataactattgccgaaacagtttcctacttcgctagtcgagtagacgtttcatctgggtttgacgaaaaacgaatcgaaaaaattccagatccagtattgagatctgaactaaaaaaacacattaagtatattgacaccctgaacagtagcaaatcaactgacgaaaaagttgacccttttggcgcagaaggtattgaaattttgaacgggcaactaatcaaaagtggcaaatttcccatcagcaaggtgacgattaaagaggaatcaacagcaaaatttgaaatcaggcctggcgcttttacagaagccgacaagggtaccaatttattttttgttatttaccaaaacgtaaacgatcccggtgatcggtgctttgaatcgataccactaagaatcgtgattgaggcactggcagctggcagcggttttgtagaagaaaagccagggtataaatggtttactatttcacccaatgatctggtttatttacccgatgagaatgaaaacatcgcctcggttgactggcaaaacaagcggttgctttccaataaaatctacaaacttgttagttgcaataaggggcaggctttctttgttccacataccgtctcaaaagtaatcgtagataaatttgagttcgactctctcaacaaggtggaaagatcattggacggcagaatgattaaacaattttgtatcaaattaaaaatcgatcgcttagggaatattacccccacaggtacctagacccttagtttgttaacgctttgcgcatatgttgaacatgtctaagcctatccactagcactccatgctataggattatcgctctattttttatagccaaagaaaagggtttagataatctttattatgtcactagcagggcctaaaataagtttttgcagaaaaaactttttggtccattcacttgaaaaagatatttgataacttcaaggttaagtgcgatagccttctcaagtttcttgaaatttcccaaaatatacggggttctttttcgttccttttataaaccaatatcccagatgattaaacgaaccatctgcctggaaagccctgcccacgtaaaatgccgtaacgatcaattggtagtgagctatagcggtataaagggactggagtctctgcccgacaaaaccgtaccgatcgaagatatcggtattcttgttctggagcatccgcagattactatttcacattacttgctaaatcggctgatacagaataattcggcaattgttacctgcgacgcccatcaccacccaagtggtatgttactgaatctcgaaggaaattctgtgcagtccgaacgcttcagggctcagatcgatgccagcgagccgctgaaaaaacaactctggcaacaaacagtaaaagcaaaaatcatcaatcaggccagcctgttatcgcgttacggaatgccttccgaaacattaaaaaattatagtcaatcggtccgaagcggcgatgcagacaataatgaagccaaagccgcagcctattactggcagcacctttttccccctgcctggatgttttaccgaaagcgcgatggggttccgcccaataacctgcttaattatggttatgccatattaagagcgtgcgtcgcaagagccctggtgggttcgggacttcttcccaccctcggcatcttccatcggaatcgttacaatgcttattgtttggccgatgatatcatggagccttaccggccttttgtggatgccatcgtgagagagatcatcgagcatacttcgcaggtggaaaccctgacgcaggaattgaaagtgaaactgctgaaactacccactgttgacgtgctgctcgaagaaggcaccagtcctttgtttgttgcggtgcagcgaacctcggcttctcttgcccgctgttttttaggggaggagaaaaaactgctttacccggaatttccatgagattcctgatcaaatacctgtcgcctaccgaaaaaggaggaacatatgaacgcctaaatgcctatcgtatcatgtgggttttagtattcttcgatctcccaacggaaacggccaaagagcgcaaaatttatgcgaagttcaggaagagcctgctgaacgatgggtttagtatgttccaattcagtatctacctgcgtcattgtgccagtgccgaaaatgcccaggtgcacattaaaaaggtaaagcagggattgcctgaaaaagggcatgtggtaattatgaccattaccgataagcagtttggaatgatcgaagtatttcaaggaaaggatccggcccccacggccgaaataccccagcaactggaattgttctaattccctgatcgaccgagggatttggcaacttgctttgccggctccacaagagcttttggccgaaattttgccaataaaaaagccccggacctatgaaattcggggcaaattcttgatttttttcgcggacaaaaacgtcaaaaatccttgtcttgcaagcctttggccataaactgttgtactcaaagatcgcaagaactgaaattgaaagcaaatcacaac

SEQ ID NO: 3934 - DNA, 23225 bp, synthetic construct
  source 1..23225: mol_type = other DNA
  misc_feature 1..23225: note = Synthetic
gccagcgtgctggagtcccggcccagcggcgccgtgccctggggccagccggtgtcgttgaagttctccgcccgccacgcggtgccggcgtcgccgctttgccagtagtgccaggtattggtcagggaaaccagcgggaacgtcaacgtggtgacggtggtctgcgggccgcccgggttgggcccgcccggggtgggctggtcgaagcgggcaaaagcgtccgcgccgtcgggccggcgtccctcggccacgtcgggttgctgcgggccgtacaccacgcaatccagcacctcgaccacgcgcaccgccccggggggaaccccggtttggtcagtcgcggcgcgggccaggctgagcgcgccgccgtccgcagcgagtcggaagtcaagatggtccgcgccgcgctccggcgcgctgtcggcctggaacaccgcgtaaccgcggccggcgatgaagctgagcggcggcagtcgcgtgccgggcaccaccggcgccggcccgtccggcaggacggccggggccacgggcaggtcgctcaacaccaccccgtccagtgccacgggccgggggtcgccgttgtacagctcgacaaagtcgtcccggaagaagccgcccgacgcggccagccattcgttgagccgcagccgtgcggggtcacccagcgccaccgccatgttggcggcgccgaaggtgggctgtgtcagcccccagcgaccgtcggtgagtcggccgatggacaggtcgggcacctgcaggccgaattgcaccgagtccagcaacgcgccgccccgggtgggcgccgcgaacaggtacagggcctcaccggtttgcttgagcgcgaagcccagatgcagcccgggcgcgttggtccgctcgtccgccgccgtgaccaggtaaccaccggcgggcagcagcgtgccgggcgggaaggtgaaggcgtagggtgcggccggatcggtggtcagcccgcagcccgacaggtccaccgcctccgggccggggttgtacaactcgaccaggtcggggaaggcgtccccgaaagccacggtaagattcctggccagcacctcgttgaggcgtacccgcggcgcgggcggcgtgtacgccgggtccaccatccacgtggccgagcgggtcagttccgcgtcttcgccgtacacgggatcatcctggtaaaagccgcagtcgcgccggccgctgacttcgaggaagtgcgggccggggggcaggttggtcaggacgatgggttgcgcagtcggcgtttcctcactccaggcgccgccgtccagtcgccagcggtagtgcgtgtagcccgcgccgtcggtccagctcgccgcgggaatgccgtggccggtgcggttgaacccgaccgtgatcaccgcatccgtggcagcggtgacgccggcgggcacgccggtcaggcgcacgccctgcgaccggctcgcgccgtaaagcggggcgccgtccgcagccagggcgggcgaaccgggcaggggagcgagccagtcccagagcacctgggcggccgcccacgaatcgaactgcgtttccgcgacgtcgggcacgtgccgcagcagcgggtcggcgggggaattgccgccgccggggccggtccagggcagggagagcaggttgttggtgaacgtgacgagcgcggcggtggggctgcggaccagcttctcggcgtcgtaaacgatgttgccctcgaggtaaaggcccgcgccctcggtggtgccctcatcggccaggttgaccacgccgccgtcggtgtccagaccgcccgcgtgcgtttggcggacgatggtgttgtttgccagcacgtaaaagttgccctgcttggccgtggccgcctggtcgcagtcgaagaacaggttgttcacgatcgtgacctcggaggtgcgcgcgccgtcgctgccgccgctgacgccgctggcgctgtcgggcgagccgttcttgtgggcgtggaggaagatgttgccctcgatccaggcgtcggtgccgtccaggtccacgtggtcgtcgcaggcgcccaggaaaacgttgcggaggaactgcaccaccggctggccgggccgattgccgccggtgaagtcaatcacgtcgttgtagccgcgggtctgcccgaaaaagttccgcaggaaaatcccgcgcccgcccgccttgatgccgccggagccgtgcaccagttcgaaggcggccgtggccgagggaaacacgcagtcccgcaccataaacgacgcgccgtccagcgacaggtactggcggtccgtcgcgccgaaggtcacgtggtccagccagaccgtgccgccgaccgcgtggagtgccgtggcgccgttgccctcgatgagcacatggaccaggcgcgactccggcgaaccggcgctgccgttcacggtgaggccgccccaggcgcccgcgccacccggcgtgcgggcgaagcggatcggtgcgtcggccgtgccctcggccagcagacgcccgccatcggccaccaccaggttgacggccgggtcgagaaacaccgtcgtgcctggctccaagcgcagcgtggcgccggcggccacggtgaacgggccggtgagccggtacgggccttcggccgcggtccaggtggcgtccgccgtcaaggtgcccgatcggctctgcgtcgcgccggtgtcgcaccagatgtccacgcgggtggtttcaaaaaccgcgcccgtggtgtcgagcgcctcgaccaccacgcggttcagcccggggagcaacggcacgccggcggcggaccaggtggcggtccaggccgtccactgcgccggcacgccgccgacgcggacggcacgggtgcggattggattggcgcgaccctcgagggtgaggacggaagtggtggcgcggtagtaaccgttgctgagggccaggccggtgttggtgacgctcagcgtccggggaatctgggcgagcacaaagtcacgccggcgcgcggcgaaatccttgaggccggcgcggaccgattccggcgccagatcggccagggtgtgctcgaccagggcagcgaatcgctcgggggcgaagaccgagtcggccagccgctgtaacgtggcgaagtacaccggcgcaaagttcgggtgggtcatgaagcggcgcagcaccggattggcattcatgcgccagaggctgtcgtccacccggcctgccaagtcaccctggccgaggatggtgtccaggtcgtagggcaggagttgggcgcgcgggtcttccaccccgaagtacaggaaatagtcgtcgccctcgccgtcgccgttgttgccgttggccagattggtctccttgttgtccaccagcgtctcgagagcgaagtagagcagccactcctcgacgttgaccagcgaccgcaccgcggcggcgtaggtggcgtccggctcgcggtccagcgtgcgcgtgaggcggatcaggtcgctccagtcgtcttcgctgacgttggtgcgcttgaagtagttttcgcggtacggcgcggggtcctcgccctcgaaatgcaggtcggcgccgggcgcgcgcaggcggatgccgcggtacaggttgcccgagctgtccagggggaagacgcgggcggcgaactcgctgttgaggacctcgttggccacgtaaaagccgtaggtgggcgggccgtcggcggccaggtcggcgttgttcagccgcacccgtaccgggcgggcggactgggtgggcagcccggcctgccggtacagcgcgctgcccagcagttgcagcggcgtgtactggctgttgaggttgagggccgaggcgttttgccagagggcgtcgttgcggaagttgacgcggaagctctgcgggcttttgccgcggctgccgttgccgcggttgcgcacgccgaccagataacgcacctcggtgccgtggccgtcgtggctgatgaacgtgccgttgaactgcgcgtggctgcggctggcggtgcggttgatcgcccgcagttcggccagctcggccgcgcgcaggatcaggcggtagcggggcagggaactgggcgcggtcggcgcgtcgtccacctgataaagcaggttcgcgatttgcgccggcgtgccgtcctcgctgaccggcgtcggatacacgcgcgtgtgcccgtggacgtcggcggcctcgaggtaaaactccaccaccgttccatccggtgctgcgggcagggtgacgccaaagaccccgtcgcccgccgcgccgtcgccgtgaaggccgtcgtcggccatcggcagagccatgaactgcgggtcgccgtcgcggcgatagaacacgcgggcttgaagcgctcccggggactcgtcaagcagccgggccgtgacggtgaccgtgtcggtgctgcggggcaccgccgggaaatgcgccggggccaggatcaagggcgcggtgtccggggcggcgaccgagttgggtgcgccgggtgtgccgttgggcacggcgctgggcagccagttttgcccggaaccgcccggcaggcgcaggttgaccagttcgagcgagcggcccccgccgtccgcggccgaggtccagcgcaaaccccggcgcccgtagtcatcgggcgcccgctcgcgcagcgcccagtcgccctcatcggcgtagcgcacggcgtccacgcgccggccctgggcgtccaccagctcgagcaactggccgctgttgctcagaatgccgtcccagtcgcccacgacgttggtcacgccggggtgaagggtggcgaagaccgcgcggtccgcggcgacgaccaggtagccgcccgacggcagggtaaggttggggaaggtgaatcgcacccccgtggtgaaacgccagccggccaggttcaccggcgcggggtcggggttgtggatttccacgaactcctcgcgtacatcctcgctggccgggtgatacatcaattccgtgatccggaccgggtccgcggccagggacgccaggagcgcgccggcgcccgcgctgatgattccccccgcccgtctaagccgccagacagcgccgtggcggagcccgttacattgcatcgccgggatgttgctcatttcgggttttgggaagcaagtgccctgccagccgccgtcggctgaccggggaaatacaagtgcttgcattgctgcgccggcacccggatgggacttggagagaagggggccggcactcaccgaaacaccggatcgggtcgccctttagcgaagggcgattcacctggattccggaagccgacctgccctcaaagtgactgtggacggccgtagtctgggactgggacgctgctcattcaccgggctggggcccggggtgctagcttaggactgcgccagtctgctgacgctttacaggatgctgccgcagtcttgcgactgcagccgcagaccgggcgtgaatccagccgggttggtttgtcaacaggaacaaacaagcccgctggttatcgtcccaccgattgacgctcgccaagcagcatccccggtgcctgcgggttggccaagcaatcgcaagtcgtttcaacataaagcttgactcccccgcaggtgcaaccagcttcacttagtttgaagcgtcagccgggaccacggctttcgccagcggctttgtctcaataaatcttgttcgattatcgagtggccaccatgagcgacaagtggtttccagcccggacaggtcttgagtgtcttctgagtgacggtgcaggtgaagtggtatccagagtcaagctggccttaagcaattgtttcaagtacatgctgttcatttctccctgcacatgtctcttgccggccatctccgccgcgacgctgggaggtgctgacctgcccaaggtcggcgagactctcaccgttaccaatgactcgacactcaggattttacccggggaatcggcgctgtttcacggcacgatcgagatccgtggttggaatattcaattctcccttgtcaatgagggcacgctgatcgccagcaatggaatcgtgactgtttcgggaggccccggtggccgggccgcaatccacagcgcaggtacgctgcgaggcggcacgctgcaaatcaacgcgcttggcgccaccccggtcactgtggacctgaccggagacgtcacactggaagatatgaggttgatggcccagttggacagcgacacaaacacgctattgacggtgttcatccgcgttccggcctttcaagtgtcgcgagtcatgtttgtgtcgaatggccccgggggcggtatccagtgcgatgtgaaagcgaaggccggtcagacttttctggtgaatgaatggcgcaacggcgccaactacggtggcagcatcacacacagattccacggtgaaggtgcagtccttctccggcaggcggcatactccgcgagtggatggagccacggtattcaatcaagaattcagacggaatgcgagttgacagttaccgcccacgcactcacttgcgacggagcgcgcgtgccgccctttgtcctcgctggcggcggccaggtctatgctaccaacgcggtttcgttcgggacggtggaaaacggtgtgttgcgagttgtcccacagcccgtgcttgtcgcgtcgcctgtttcctccggcttcatgaagctgcaagtctcagcgtgttttcccgacatcgcgtactggatcgaatgctccaacaggctggaggctgattcctgggctggtcttctcaacttttccagtgtaaccgaaaccaacgtccaggtggatgttcgcgccggcgccgggtccgcgttctaccgctgcaggtttgaatgagcccggtctgttcatcaaacaagacggtggagacgaaccgccgccgcggttcttcgttcgaggttgggcgccgatgtgtgcgcgccagcggcgcttgccatgcacggccagcgctttcgggccagtggcccggttttgcgatccccgggatgagttcggtgaactggcgaataatggggagaagcccgaagtccgaaatcccagtccacggtccacattcccgagtcttcagtcgaaggtgggcattcggcacccgcttcccacgggccacgaaccacaatccccaccttccaccttaaatcttcaggaaaatcttccgccggtacatccagagcaggatgagccagatgacggccagcacggccagcccgcgcagcagcggctcatacggcgcgcccaggaaccggaagaagtccgcccccagatgggtattgaaggcgtcacggataaaatccaccgccagccattcgctgcaataggccgcgatcgagttcgtgcccaccaccaccagcggaaaggcggcggccttccaccccaggccctccaccaccgcgcaaaagccggccagcagcaggaagcaccacccgccgctgaacagcacccaggatggcgtccagatgcgcttgaccaccgggcagacgcccagccagcccagcagcccgcccagcgccaggcccgccaggcccagcagcgcgaacaggcgcacgcggtcgcccgtggcggggagacgtcgcagccagccaccggccagcaggccgaggatcatggtgcccagggtggggatgaagctcagcgtggcgtagccgccggtgttgtgggtgaattccgtcgggcgcggaaagaggttcagaaaccacctgtcaaaggcccaggccaggttggtgttcttgttccagtgcgcggcgaagcccgggagattgtgcgaccagtccgccgccacgccggctttcgcccagtcaaaatccggtccgggcagcgggtagagggcaaaggccagccagtagctcgcaaggatgaacgccagcgcggaccactggaccttgggcgacgtccaggccagggcgaacaggaacgcataacccagcccgatctgtgtgagcgtgtcctcgaaggtgaaattcgtctgctggtggccgatggaccgcaggaagatgcccagacccaccagcaccagtgcccgccagagggcatggccgaacaggccgcccaccgaggcgccgcgcgcgaggcggttggcgatggagaacggcaccgccacgcccaccaggaacgaaaaggacggttggatcaggtcgtgcaacgtgcagcccacccacggggcatgactttgctggcgggccaagaacgcccagaagtcgctgtccggcagggcggcggccacgctgcccagggccagcacctcgcccagcatgagcaacatcacgaagccacggtaggcgtccacggacgcaacgcgaccgggcgcggtcccgggattgccggagatcggtgcgggggcggtgacgggcataaatcagggtcgggcgcggcacatgctcagccgccggtcccggtgagccggcggatcaattcccgggcgcgttcgttgttggccgccgccgccgccggcgacgacgcctccgtgtacacccggaattccggggcgttgcccgagggccgcaagtggacgatgtcgccctcggctaaggtaatgcgcgcaccgtcagtgaagtcgagcgaccgcacctcgccgaaggcatcgcccaaaagccgctgcgcggccgtaacgccgccggcctcgatcccggccaccagcgcccggccgcgctcgggcggaaaggggctcagcagtccgctgtgcgtgtagcgcggcggcaggtcgcgcaccatctgcgaaagacgcaggacgtgtttgctagcggcgtggagcaccgtcagcaggggcagcgccgcgtcacgcgtcggcaaaggcgtcagccgggtgccgggcgtgtcgccagcgatctcactggccagcaggaaaccgccgttggcctcgaagcccaccacccgtcgcgcgccggcctgcacggcctcctgcagcgccgcgaccacgtacggcgagccgatgcgcgtgcgcaccacgcgccggaaccagccgcacaactcaagggcggtgctgcagttcaccggcgccaccaccgtgtccgcgtgcagatgcgccgccaccaggatgccgagcgcgtcgccgcgcacgcccgtgccgcgttcgtccaccagcaagggacggtcgccatcgccgtccgccgaaaccagcgcatccgcgccttccgcacgcacccactcggcgagttgggcggtgttggtcacggcttccgtgtccacagggatgaactgatccgaccggcccacgcgggcgacccgggcgccgagtttctcgagcaggcggccaaggaggtcgcgcgccacggaggaatgttcataaagcacgatccgtttcccggccaggcagccgggcgggaagaacgcgagataacgttgctcgtacgcggcgacggcgtgcgggtccggcgcgccctggtccggcgggttttcaagccggaacatcccccgggcgtcgaacgtcccggccagcgcgtcgtcggacgcggcggcggcggagaattcggcgtagcgcgcggcgatcgccgcctcgtcggctttcaggatttcgccggacggcaggtagaacttgataccgttgcggtcgtcggggatgtgactgccggtgaccatcacggcggcctggcgtcgctccagggcccggccggccagcgccggggtgggaatgaagccacagaactcgggtgtgccaccctcctggcggatggcccaggccacggcgcggaggatgcgcggggtgctgcggcgcaaatcgccggccagcgacacgagcggaggcgcgccctggtcgcgcgcgtggcggtaaaaggcccgtgtgtacagcacgcattcgcggtcggtcagttcggtgaccaggccgcgcaacccgctggtgccaaaaccgagggccatgacggcatcgttcggagagcccggcgggtttgtcaacacaaacgccggaggcaggaggaacggggcaccgctgcgcctgtcacgaccggtgaaacggttgaaagcggccgagggtggcggcgagcccctcacaggtggggacagccggcggttgccgggtttcctttttcaggttaaccctgccggcgaacaatttggccacagggacaaaaatgaactcatcccgctcccccgttacccggttcagcaccgggttggtcttcggcttcgacgttggcaccggctccatcggctgggctgtgcgcaacggcaccgagtttctcgacgtcggcgtgctcgtctgcccggaggaaacggccaagctcgacagccggcgcggcttgcgccgccagcgccgtaccctgcgcagcaaaaaataccgccgtcaatggtttgcacgggaactggctgggttgctcggcttgacactgattcggcaaggacagtcagaactgcctttaccggaaaccgcgtgggagcaaaacgccaagggtggttgggtgcccaaacccggcttcgagtcgctgcgcgatccagtggccctgcgcgtggctgctgccgaaggcgagccgctgcgccccgaagaactgttcaccgcactggtgcacctgttccgcctacgcggttacctcgccgatgtgccgtgggcgaaccgcgaggtcgaagcgaaagagtccgacgccaaaaaggaagaaggcgaaatccgcgcccgcatgtcggccttgcaagccgaaatgcaggcggccggctgcgaactgccctgccaactgctggccttgcgcgcaaacaatggccagcgccagcgcaaggaagtttggccgcgcgagctggtcgaaaaggaattccgcgccatcgttgccgcccaggcgacgcgccaccccacactcgcggaaaaagcggactggctgctgtttggcgattgtcgcgaggttaaaagccatcgcgtctttttcaaaaccaccgaatcccgcaaccccggtgtcctcggtctcaagtggccgcgcttcgacaaccgcgggccggccctggacgctctgcgcccgattgacgagcttggccgccccctgcacgtcgtccgcaagaacaaggaagcgttctccaaagcacagtgggagctggctgtgatgaatttccgggtgattgaccgccagacgggcgcgctcgttccgccggacgccagagcattggcccgtctgcgtgagatgtgggaaagctctagccgcaagcgccgcgcgaagaaggaagccatgtccggcacgcctgccggctcgccggaaaccacgccccgcgtggaaatcaaggtggcgctgctggaaaagtgggcggcggaatttgccaaccgctacaagctggttgagggccagcaatcgctcacaccccagaccggcgcgggccgggcgcgttactcgacgcccactttggagctgattcgcgagcagttcgaacgcggaatccgcttcgacccgccccaacccgtgttgcgccgtccgggcgaaagcccacagcgcgctctggaccgttatctggccgacatcaagcacccgctggtgcggcaccggctgctgctgttctcgcggctgctggacaagctcgtgaagcaacacggcgagcccgatctgatcgtgctcgaagccgtccgcagcctcgctctgggcgagaagaacaaacgcgagttgctcaagcggaacaaggcaaaccgcgaccagcgcgagagcattcggcaggaactggccagccgcaacgccagtacctcccgcaacgccatcctccgctaccggctctggaaagaggccctgtccacctgtccattctgcggcgacaagatcacccaggagcaactccttcgcggcgaggccgacattgaacacctggtcccgcgctcggtcgtggactgcaatgaattttacaacctcaccgtcggtcacgtgcgctgcaaccgcgagttgaaaggtgaccgcacgcccttccaagcctttggccacaccgaaaaatggccgcagttgcgcgacaacgccgaaaaatgcttcaagggtcgcaagctggagattttcctcagcgacaatgccgagcagttgatcgagcaaaaggccgacctccaacacaccgcctacatcgcccgcatcgtgcggcacgtcgccctaatccgcctgggctggaccggcgacgacggccgcgacccgaccattatcaagggcaacaagccgtcatcctccttccaggtcaccaacggccagctcaccagccgcctgcgccaggcgtggggactcaaccacattctgcacccgctgcctgaaggcaaacgctgggatgacctgaccgacgccgaaaaggagcagatgcagcaaaagaaccgcggcgacctccggcatcatgcgttggacgcgatggtcattgcctgcacgctgccgtggctggcgcatcgcaccgtgggcgcgaccgaccccgaaactggagagcacggctggtggcaactcgatgagcgcacccgccgcagcctggccctcaacccggtatttcccaccgagggccagatgcgccgcgtcgccgaggaatggatgcagaaggtcgttgtgcggcatcatgtctcccgcagcccgcaccagagcgcctacgccacgacgatctacggcaagaaagcccccaacacctacgtcgcccgcgaggtgttcaccaccctgacgcccaagaacctcggcagcatctggccgccggacttcgcggcctattgcgaggcggcctgggcccgttacgtcgaggaatcgccggacatcgaggctgaattgaaacgctccaaaggctgcgtgccggagagcttcaccgcgcggctgtgcttcgcccacttccagcaatggcgcgaactcatgaaacgcggcgagaacgtcgagttcacctggccggaaacggtcaaaatccccatccgcagcgtgaggctcatctcggtcaaggacgacacggccgtgatgcgtttcgccccgggcacgccgggctacgttaaacgcaccggcttcaaggaggtccgcatccacgtcagcgccgatggcaatagcttcgtgccggtgtttgtgccgtattggaagggggatgcaatcccaccagaaacgccgatcaagacaggaacaagaccggtagctgtgattcgcaaaggccaagtggtggggttgaaaaaacccctggctgccggagccagcgctggccattaccgggtgattgttctcggccagagtcaggtcagcattttgccgccgcatgtagctaacaaagacgaagcaaaattggccttgggtatcccgcgcaccggaataaagccctattggccggaattcatccgggcgctcggctatgagctaccacatcctccatctgctcagtccccacctccgggtgcgctgccgacttgaccagttgcacgtcaccgactcggaaacaggcaccgaacgcaccgtgccgctggcggacgtggctgttatcgtagccgccgcgccggacctcaccgtcaccgcgggcgccctccggcgcatggccgagttgaacgtcttgctgatcgtctgcaacgagaagttcgagccgtgcgccctcactctgccctaccaccgcgccacccacaccgaattgctccgacgccaaatcgaatggacgcccgaatggaagcaggccatgtggcgacagatcgtcaccgccaaaatccgcaaccaggccgccaatctcgcccacctcaaacgcgcccacgccgtgctcaccgagatcgcggaccgctgcgcgaagaggagcgcaggcggcccgtcggacgcttctgacacgctcggcgagagttcgcggcgcgacgccgcgaacggcacgcgagacgcgcgcgctcccctaaacatttccctcgccaccatcactcccggccgccgcgccggactgcacgccgacacgcccgacgcctgcgaatcccgcgccgcccggcactactggaaacacctcctgccgcgcctgagcgaatggcagcagaccgacgaagcccgccgcgtcccgggcacacgcgccggcgtcaacggcatgttggactacggctatgccatcctgcgcaccgccgtgctgcgttccctggccgcccacggtttcatcgccgcgctcggcatcgcccacgcgcccaaggccggcagtttcgcgctggccgacgacctggtcgaaccgctgcgcccctggatggaccgcgaattgtgccgtatccttgagcacggcccgcgtccgatggaggagtggatgcgccgggcagtagcggtgctgcaggccgaggtggtcatgggcaaagccagggtacgcctcttgaacgcgattgacatctacgtgcaaagcttcgcccacgcggcgctggcccgcgcgccactgccgttgcgcttccccatgctcgcatgaacggcgtctgcgctggaaaagcgccaacgcgtgggcacagtccaaaagctggagtactggcccccgcccctgaagaaggcgcagtgttctgtagtgcggcgatgctccgccgctttgccccggggccgcaaggacgccgtgatccggctgagggacgatgaaccccgacgcaccgtggtggccggacgcgcgtccaagtggcgcgccacagcaagactccgcttctttctcccttgaatcggcaaccgctgccgccccgccgccccgccgccgctcgcgcggcaaacagggccgcgatctggtggccagcaaatatcgtatggcctgggtgctggttttcttcgatctccccgtgggcacggccgaggagcgcaaagccgccaccaacttccgcaaggatctggtgcgtgacggctacatcatggtccaatacagcgtttatgcccggccgtgcggcagcgccgaccgtgtggaaacgcaggtgcgccggctcaagccgaagattcccgccaaaggcgaagtgcgcagcctcatcatttctgatgcgcagtggggccggatgctcatcatgcgcagccagcagagggtggaagccgagccgcagccggagcagatgatgttcttttgaaatgaaagagggcgcggacttgcgtccgcgccctcaagacctcgcagcgtccgggtgcaacctcggaacctttcggctccgtgttctcagtgccggacgttggtcagcatatttgagatggtgcccccggtccaaggcggcccgaatctcggcaaactcaatacttcagcccagtttcccgcgtcaacccagtttgggccgccttggaccgggggcaatcccaaactgttttattcggaccagcaggaactggaaaagtttgggccgccttggaccgggggcaatcccaaaccttcccaacggcacggtggaagcggcgtgtagtttgggccgccttggaccgggggcaatcccaaacgcccgacacggtgcccataacgctgcatccagtttgggccgccttggaccgggggcaatcccaaacttgaccgattgctcagtcacgccgctggtgagtttgggccgccttggaccgggggcaatcccaaacccgacgacgcgcggctcgcgcgctggatccagtttgggccgccttggaccgggggcaatcccaaactgaggcatgtcagcgtcggcgcaggtacacagtttgggccgccttggaccgggggcaatcccaaacacatcggctgatacatcggttggtagtcggagtttgggccgccttggaccgggggcaatcccaaacactgcatgcaaatagcagtgcgtgagctgcagtttgggccgccttggaccgggggcaatcccaaacgagtgagagagttccaactcgattaaagccaaacaggttgctgccggagcgggggcgccgggcggtgtccaccgcccggcgcccccgctccggtaaagtccgctttagttacaacgccttcagcacggggtgttcagcctgttttgccgctcggtcttgaggcgcaactggccgcacgcggcgtcaatgtcgccgcccttttcgcggcgcagcgtggcttttacgccgccgcgcccgacttcggccaggaacgcctcgcacacggcgtcgtccggccgctgccagggcaggccctcgacgtggttgtacgggatgaggttgatcttggcgccgagcgggcgcgccagccgggccagggcgcgggcatcggccggtgaatcgttgactccggccagcaggatgtactcgaaggtgagcatccggcccttgtgggcgaggtagtgctcgcaggcggtcagcagttcgcggagcggataacgacggttcaccggcatgattcgatcgcggacctcgtctgtggcgccgtgcagcgagatggcgaggcggaactgctcgggttccccggccagccggcggatttgcggggcgaggccgctggtggagacagtgaacttgcgcgcgccgatgccgcccccccagggcgcgttaaggatgcgcagcgccttcaagaggtggtcgtagttggccaggggctcgcccatgcccatgatgacgacgttggtgaccagccggtcgccggtgggcggcggcgcgccggcggaggtggcgtgtgcggcgtgccagcgttccacggcgagcacctggttcacgatctcatcgggggtgaggttgcgtttccagccttcgaggccgctggcgcaaaagcggcagccgtaggcgcagcccacctgggtggagacgcagagcgtgtgacggtcgctcgcctcgccgtacagggcggggttggccgggatgagcacgctttcgatcaaggcgccgtcggtgagccgccagaggaacttggtggtggcgtcgggcgcgccttgcacggccagcaacgcgggtggctgcagcgcgaaggttgcctccagttgcgcgcgaagcgtcttgggcaggttggtcatcgcctcccaggtggtggcacggcgcgcgtagagccactcgagaacctgaccggcgcggtaggcgggctggccccaggccgcgaggcaggcccggagttcgtcccgcgtctgcgcgtggatggcaggcttcaggtacacacgtgtccgccggtccggcgaaccggcgtcaggccggcggcgaggggagataatagcgcgtggtgtattcctgcaccatgcgccaggtgttgaaccggggcacgagggtcacgagcgcgcgccggatgcgcttgatccactggcgcgggatgccctgggagtcgcggttgtagaagcacgggatcacgtcctcggtcagggtcttgaacaggttggcgctgtcctggcggtcctgttcctcgacgttggccggctgggcatcctcaccgatggcaaagccgttggtgcggtcgtagccctcacgccaccagccgtcgaggatgctgaagttcaggcagccgttgatggcggccttcatgccgctggtgccggaggcctcgagcgggcggcgcgggttgttcagccagacgtcgcagccggccagcatctgccgggcgacgtgcatgtcgtagttctcgatgaacaccaggctgccgtgcagttcgctgtgcttgctgaggtgaaggatctgctggatgagccgcttgccctcgtcgtcgcgcgggtgggccttgccggagaagatgaattgcaccggccggcggcggtcgcgcgcgagcgccacgatctggtcaaattgtttgaagatgaggttggctcgcttgtaggtggcgaaacgccgggcgaagccaatggtgagcgcgtccacgttgagcaggtggtcgtactcgatgaatgcactgcgggagagccgctcgccctggagcagcaggcgacggcgggtaaactcgatgagttcgcggcgcagctcgtagcgcagcgcccacaattcctcgtcgctcacggtcgcggggtccgccatcgcggaccagaactcggcgctgttggtctcgtcggcatagagatggccggcccgagccaggaggccggtggggttgctggcggcggcctgatgcagcttggcccgccagaatttccgcacccggcccttcatccagcccaggagatggatgccgttggtgatgtgtccgatgggcacctccgcgaccggctggtcggggtacaggccgtgccacatcttgcggctgacctcgccgtgcagttcgctgaccgcgttggcggcgcgggcgtgcttcaacgccaggacggtcatgcagaacggctcgttccggtcctccggccgcacgcgacccagggccatgagctcgtcgtgggtgagcttgagctgggcgcagaacttgtgcgcgacatattgcatcaggtcgctgctgaaccggtcgtggccggcctcgaccggcgtgtgggtggtgaaatggcactcggcgcgggtggcggtctgcgcctcggcaaaggtcatgcccgccgccagcttttcccggatgagctccagcgtcaggaaggccgggtgtccttcgttcatgtggaacagcgagggctggaggcccagcgcgcggagcaatcgcacgccacccacgccgagtaagatttcctgcatgatgcgcgtggtgctgtcgccgccgtacacccgcgtggtgagttcgcggtaatgcggctcgttttccggcaggttggtgtccagcaggtacaccgggcagcggcccacgttcacccgccaggcgcggaaggaaacggtgctggccgccatccgtaccgcgccgaccaggggttcgccgcgcggatcgagcaccggctcgagcgggagattgcgggggtccagcaacgagtagtactcggtctgccagttctccgcgttgaacgcctgcatgaaatagccctcgcggtaaaacaggctcacccccacaaagccgagcccgagatcactggcggacttggtgtggtcgccggcgaggacgcccagaccaccggcggagatgggcagggtttcgtgaaaaccgaactcggcgctgaaataggccaccggccgggtggccagcgagggcgcgtgcgtcgcggcccaggtatcggtccggcgcaggtaggcgtcgaaccgctcgagcacgcgctgcacgcgctcggcgaagtcgcggtcctggaggcgcacccgcaactcgtaatccgagacttcgtggaggatggcgacggcgttgtggtaaaggttctgccagccacggggcgagagttcctggaagatgtcctgggcgccctgatcccaggtccaccagagattgtgagcgagccggttgagcccggcggcaagttccgtgagttcggcggcagtcagcggtttggtagccatgatgcaagcagccgcggagacacccgttcgggcgtcgtccggccgccgggcccgcggctgcccgggcggagccgggaacgccggcccggtcggccggggcggctggttgcccgcccacccggctggttacctccggcgtcctgcccgcaagggcgggacggtagcaggcgagcgggacgccgcaacggaatttgcgcgggcggaaggcggacgggcgcatctcgcttcttcgggcccgcggccaggatcgcgtgttgcccggcacgagacagcagcccgcagggcggccgccgcgaatcaacggcccaagcaacgacgtcgagttgaaccgccgggccgagttcgggcttggccgcgggtggccgtggagttcccgggtgcctgttgccaagccgacaagcggtccgctaggctggccggacgcgacatgagtgaaattcccaaagcctacgagccgcaggcagtggaggcgaaatggtaccagttctggctggatcacggctgcttcaccgccgacccggcgcgcgtgagcgagcgacgaccggcctattccatcgtcatcccgccgcccaatgtcaccggcgtgctcacgatgggccacgtgctcaacaacaccatccaggacatcctcgcccgcaaggcgcgcatggacggccgggaggtgctctggctacccggcaccgaccacgccggtattgccaccgagaacatggtggccaaacaactgcgcaaagaggagaagaagaccaagcaagacctcggtcgtgaggagttcatcaagcgtgtctgggcgtggaaggaaaagcacggcggcatcatcatccagcagctcaagaaactcggctgctcgtgcgactggacccgcgagcgctttaccatggaccccgaatacgtgcgctgtgtccagcgggtctttgtggacctgtacaaaaaagggttgatctaccgcggcaagcggatggtcaactggtgtccggtgtcgctcaccgccctctcggacgaggaggtggtgatgaaagagcaaaaggggttcctgtattacttccgggtgcaggtggtcgagcgcgacggcacgccggttaggttccccaacggcccgctcacccgggtcccctcacccgtcgagaaagagaccggctccgggccgggtgagggggaggttccagttttcggtcccgaaaccgatgccgaaggccgcacctggctgaccatcgccacaacacgacccgagaccatcccggccgacaccgcggtggcggtgaatcccaaggatccgcgctacgcgcccttgatcggcaggcacgtccggcgcgcgctgccgccggagaatcaggtgctcattccgatcatcgccgacgagcacattgacatcgagttcggcacgggcgtgctcaaggtgaccccggcgcatgacgcggcggacttcgaaatcggcctgcggcaccacctgccggtcatagacgcgctgaaccccaacggcacgatgaacaagctggcgggcaaggacctcgtgggcctcgaccgcatggaggcccggaagaaggcggcggagttgctcgcggcggcggacgcgctggtgaaaaccgagccatacgttcacaacgttggtttcagcgagcgcgcggacgtgcccattgagccgcgcctgagcgagcagtggtttctgaagtatccgagcgtggacagggcaagggtctgtgtggcggcggcggggagcgccggcggcccgccggcagattccgccggcccggcggaatcctcgttgttaaatctgaagtctgaagagacgttgtcgggcgggccacccgacacgccacgcgggccgcgtgggctccccgggatgcgcttctttcccgaccgctgggccaaggtctatgatcactggatggcgaacctcaaggactggtgcatcagccgccagctttggtggggacatcggattccggtatggcacacggagatttccagggccgattttgccctatggccagaggaggttcgccgggccgtggaacagtcaaccgactggaccgagcgacacacggtttgcctcacgaagtcgggccgggctgaagactccaccaccttggcctgcgaggtgaaaggcgagtcactccaggttttcgcggcgacgatttcaccgggtgaaatcgaacgacttgagcaactcggcttcacccaggaccccgacgtgctcgacacctggttcagttcctggctctggccttttgcgacgatgggctggacgggcgatccggccaaggacgcccagaatcgcacactccagacgttctaccccacgaccgacctcgtcaccgggccggacatcatctttttctgggtggcccgcatgatcatggcgggttacgagtacatgggtgaactgccgtttcggaacgtgtatttcaccggcatcatccgcgacaagcagggccgtaaaatgtcgaaatccctcggcaactcgcccgacccgctcgacctcattgtgaagtacggcgcggacgccctgcgcttcggcaccatgcgcagcgcgccgctgggccaggacatcctcttcgacgagcagaacgtcgaactgggtcgcaacttctgcaacaagctctggaacgcctgccgctttcggcagatgcaagggggcgagcccgagggcgagatcaaccccgcgctcctgaccagcgacgacaagtggatcctgttacggttggaccaggccatccgagaagtcagccaggccttcgccgagtacaagttcagcgacgccacggccacgctctaccgttttttctggagcgagtactgcgattggtacgtggaggcgtcgaaggcggcgttcttcggggacgacgcccgcctgaaggcaaacaagcttgcggtgattgatttcgtcctcggccacctgctgcggctgttccacccgttcctgccgttcatcacggaggagctctggcacggactgggtttctccgcagatatgccggtcggccagggcggacgcacgatcatgttcgcgccgtggcccaagccgctcggcgacgacgaaaaggcttacttcgccctggacgacgttgcagaccgggtggcgcaggccaagtacgacctggtcacactcggtcgcaatctcagggcccagttcaacgtcccggccggcaagcgggtgaagttcatcctcaaacccgccggagtgttgccgccggccgaggccgaggtcatcaaaatcctgctcaacgcggagccgctggagctggtcaattccgactggacgcccccgaaaggcctgcccgtggcggccaacgccctgggcgcgctttacctgccactcgaaggattggtggactttgcggccgagcgggcgcggcttgccagggagttggagcgcgcacgcgccgaggcggccaaggtgcaggacaagctggccaacccgcactttgtgcaaaaggtgccgacccgggtgctggaagaacaccagaagcgcttggaggactggcagggcaaggtcgcccaggtggaacaggccctggcgaacctgccgggctgaaccggccgcacaggcctcggttggtgttcatggtgaggattcaaaccgaaagccaaagtcggctgtagcgcagcgcgtcccgcctgcccaactgcggttttcggttcaagcgcttcccactggtttattgatcccggcgtaatcgagtgagagatggaggcggtgtaaggcgcgcggtcttcagcccgcttcaaccgccgaaaggtccgggcgggccacagtttttcatcgttcggcctctccggacgccgcagcggcatatatgccgcgcgcccatcactcaattccgcgaatctgagtagggcacggccagcacgcgataaaactgctgcaccccgacgccggtggccacggtcaaactcgcggtggcgccgctggccatgaccgtgcccggcagcgtaagccaggtgccgacggtcaccatggaccgggtttgcaccacgtagcgccggccaggctccgacttccacaacaccgtcaacatgtctgcccccagcggctggagcgtgagcacgcgcaacacagacccatcattcgtcggtcgggtgccggcccggaactcggccaggtcgctggcgccgtcttgatcgtggtcgccggtgccgtcgtgctctagcgtgctgaagt

SEQ ID NO: 3935 - DNA, 14986 bp, synthetic construct
  misc_feature 1..14986: note = Synthetic
  source 1..14986: mol_type = other DNA
gccagcgccgatgattttgccaaaacaactcaagtcgggtgtgatcccaaacctcgtttgagcgccgcccaaggcaaggcggaaaccggtcatcacttcatcaaaaatcagcagcgcgccatccgcctgtgtgatttcgcgcaacgcctccaggtaaccgggacgaggcagataaagccccgcattgcccggcactggttcgacaatgattccggcgatctggcccgggtttgccgcaaacgcggcacgtacggcctcggcatcgttgtaaggcagaacaatcgtgtgctgcgtaaacgcggctgggacgccagcgctgtcaggtgtgccaaacgtcaatgcgcccgatcccgccttgaccagcagggaatcggcgtgcccgtggtagcagccgtcaaatttgatgatcttgtcgcgtttggtaaagccacgcgcgagccggatggctgacatgcaggcttcggttcccgagttgcacatccgcaccttcttgacacttgacaccgctgaacagaccagcttcgccatcttgacttccagtgggtttggcaccccgaaactggtgcccaactcggcagcggctttgaccgcctggatgatggccgggtgcgcgtgccccagaatagccggaccccaagtgccgacataatcaatgtaatcgtttccatcgacatcataaatgcgcgagcctgcggctctgttgacgaaaaacggctgccccccgaccgcgcgaaatgcccgcacgggtgagttcaccccgccgggaatatatttcaacgcttcgcaaaaaagttcctgtgatttagcgcgcataccgcatcattgtagcaacgtctgcgcaaaaaaactactactcccggtggcgttgcagcaattgctcattatgtggggctactcatcactccaacatcatcaatcatgcttctgttttgctcttttctaaacagactggtatgccaaacccaatcctctttgtgcctttgtgtcttcgtgtgagccttcccatcctcagttcgccacacgttttaacccgtttttgagcagcgcttcccaaagattgatcacggaagatggccatatcacgaatcgaccggggaaggctcacacaaagacacaaaggcacgaagagttaggaaaggaactctcttttttcgagcctgtttagcgaacacaaactgtggagtggcaagaaatccacagcaattctcattatggcaggcaagcaagaacacccaatatgcagaggaaggtttctgtctgaatatccaatatcgaacaaggaattcccaataatgaagtagggaaacgcagcagttctcgagttttggtaaaacttcaaatttgaaatttgaaatttgaaatttaaaagccaaaaactgcaaatgaaccgcggaatacgcggaacacgcggaagaagaactccttgcgaagaatgtattcttaatctgacggatggcaccttcaaaacctcattctgcctcttctttccgcgtatttcgcgtgttctgcggttaagccaactgcggtttccaagctaaaacaaatcgattcactgacttgcgcctgatacccatctgtgactttcaagataagcctttcacttctatttgatttgttacgacatgaataatgcatgacctttccagagcaaaaacccgatcaattcaacaccctagccagagatcgctccaatcgctcgcgccggtttgccatcaaaacccggcccaagtagtaaatgatcgccaggttagctcccagaattccaaatccaaacaagtcgggtttgacccagatgtggtgaatctcaaatggcaggtaaacaccggaggcaataaacgtcaaccattccgcccagtgcattgccagccaaagtccaattgcctcggtaaatcgaagcatcgacaaaaacaaagcccccacagcaaaccagaaaagtcctccgtcaccgacttgtgaaaggtgttcgataaacaatcgcggataatgcgcctctgggttaactccaaaccgggacaagagggtgtccgccacggcgtggacatccgtatgccgcagcgccaggaagccgaaacccagtccaaggatcaatagacctttgactgcttcaaacagcgcgaccaaccgcagaccgacactgccttgtcccgtatgcactttttttgccattgtggttctattgtagcaaccaaacgcgcaaagcgaaagcactgtgtggctgcctgatgacaggttcaatccggcgctgaattcaattagaagaaattgcgaatgaacaacttaatcaatgtgtaaagcaactgttcaatcgcaacggaaaattggcgtctcgctgacgctcgccggaaagataggcacaggcaaggatgcctatgctacctgaagttaatctatcccaatgtcggattttccaagcgggctatccgttcttccaacgggggatgcgtggaaaaaagcagcgccactcgattagtcgagccggaaatcatgagggcttgaaaagcaggttgagggtgtccatcttgcgaggtctgttccgcctgcatggggtgttcgtggaggttcttgagcgccttgagagcggcaatcatgttttgccgcccggcaaactgcgcgccaccggcatcagcacggaactcgcgccacctggagaaccaagccacaaccatgaaacccagaagcgagaagacaaattggaatagctggatcagcatccattgaacaaaccaactggtgccgccgccgcgattctcttcgtcccgcgacgacatagcctgcgataccgcaaatgccaggatgtacgccaaaaacatcacaaacgcgttgatcacgccttggatcagtgtcatcgtgaccatgtcgccattggcaatatgggcgatttcgtgccccaagacgccttcaacttcgctgcggcgcatattgcgaagcagcccagaggagaccgccaccaatgcttgcgatttgctcggacccgtcgcaaaggcgttgacctcgggcgactcatagacgccaacctccggcatcggaaccccagccgagcgcgtcagattctccaccatcccaagcagggcgcgttcatccgggtcaaccgtatttgcgtcgatcacctgaactcccatcatgaccttggccatccagcgagagatcaagagcgaaataaatgccccgcccatgccccagattgtgcaaaagaaaagtaattggtcataactgcgcggaatccgaccgccaaaaaatagagacagaacaatgttgatcgtggcgatcaccaaaaagttaaccgccaagaataataagattcgtttgctgatctgcaaaaacttcataaatcaaatacttgtttgtttgacgccaatggacaaaaaacgttcatcgctcatttacgtagcacaggcatccttgcctgtgccccactctccggcgagcgtcagcgagccgctaacttctccttctcccataaacgggtaaaatatcgacgtagctcaggcatccttgcctgtgcccctctctcgggcgagcgtcagcgagccgctaatttctccttctgacaaacagttacaataggatagttattattgctcaaaacagttgagattggcgccgacattaatccagaaccatcggagtaatataatacatgtggccggcttgcaagcgggttgagttaaatccgagatcaaccttgatcgatttgatatcggatttcccaaagagccccaagagagaacctaggttgaaaggttcacggtaggcgacgaggctggcatcgggcacatcggcgatttcgcgggtgcgcctgacggcatcctcaaaatttcccagttcatccacaaaccccaaattcagcgcttgtttgcccgagaaaacacgcccgtccgcgtaggattcccaatcttcggcgagctgctgtccctcgggagaattcctggtgtaagactccttgcgcccggttcgaacgaccatcttgaaacggtcaaacgtctcagcaatcaagctcttgaccattttgcgttcttccaagcggatgtcccgatcttcaggcgagagcttgtcgatgtccggttccttgtcgccgctgagcatgtccttgaacttgccgctcttgtacgtttcaggccggacgcccaccttgtccatcaacccccggtagttgtagccgtgcatgatcacgccgatgcttccagtaatcgtcaattcattggcgacaatccaacgacagggggctgagacgtaataccctcccgaagccgccagcgagcccattgaggccacgaccggacgccctgtttccttctggaacttggtgatggcgcggttgatttcgtcagcggccaatacttcgccgcccggtgaattgactttgagcagtaccgctttgatgtcgttgtccttggcggccgtcttcaactgctcggaaataaaatcaaccattcccatggtgccaccgtccaggttggcgctcgtaataatcccttccacatcaatcaccagtattttgttcggcgaactcttgcgctcgatgaacacctcttcgagattcttgttacgctcgtaagagcggctctcggagtggagcaggaatcgggcgagataggaaagattggcgaacaggctgaaggccaaaaccaccagcgcgatcaacgccaccaagcgccagcccgatcctgagctgcgtttgggcttcgggggaaccaggattggcggtggcgctgactgaaagggcggcggtggtggtggtggtggcggcgctgaaaaaagcggaggaggcgaacccgtcggaggtccggcgatgccttgcggcggcactggcctggcctgtgtttcagggggcggcgtaccgatggtcttggattcctcttgcggaaactggtcatccatatagtgccaagctactccaaccgaatggcagcggcaagcaaacaagggagtttgctagttttcagttttcagctcggagtcggcgggaactgaaagatgcggagcattcgaatgtattgctgaatgtcttgccgaacgtcttgctgaaaactgaaaactagcaaactctctctctaactgtcccacccttgttttttggcgcagtcggagcaaataccgtgggtgagttcggctttgctatggttcacaatataggcttcgaacgaatgccaattaccggacttatcgcggattcgcttgcaccaggcgcatgtgagcaaaaggccctcgagggtctcgaccttggctagcgtctcttttaattggcagagaagccgttccttctccaacagaagctcatttcgctgaattgcatatcgaatcgaccgccggagcaatccagcgtcgaaacggcctttgaccagatagtcctgagcgcctgctgccaaggtccgaagggctgtttcgtcgtcgtcgagcacagtttccatgatgatcggaggcagttgccgacctttggcattgagttctttgagcaggtcgatcccttccccgtcgggaaggcgataatcgagcagaacacagtcaaactgccgttcgcaaatggctgccatgccggaggctttgtccacggctacttcgacctccacctgccactcgggaatctggcgaagcatgcgcgcgacacgcatccgatccacttcatcgtcatcaatgaccaacatacgcagcaccgacgctctcgcgctggcgccatccgcaggactattcaattcggtgttcatggaaattcaacgacactccaaaagtggtacagcatttcaactatcgcaagaaaactctcagcaattctcattatgtggggcagacctctggtctgccggttcgagggggctccgccccctcgaaacatcttcctccagagcaagtcagcaattctcattttgaggaaatatctgatctgcctgcgcaggtggtttccaattctctacggagccagaggcaccgtagcccgtagaaaactgtcctgttttccgcttcaagaaattcccactttttggaaccatcagccttactgaatttgagaggataagaaaccacggaatacacggaaacgaatttccaatgatgaagtaggagggttcgggatataagctggttttgggtctaaattgattattgcgtttttcgtcacaaaattctttccagtatggtttttggccagttgaagcggaagagggttccccttggctgccggcattcaactgtaatgcgtccaccgtaatgggttataatcctgcgaacaaccgccagaccgatcccgctgccttcgacctcgtcacgaggcctcagcgtttggaacattccgaaaatgtgttcgtgaaacttgggagcaatcccgggaccgtcgtctgcgaccgagaagatcatccagtcgccctcatcctcaacagaaatctcgacgcgtccctgattgcgatcatgatgcttgatggcattggagatgagattggtcaatacctggcgcaacggagtgacggctgtgaaaaaagacggggcagcagactggagatggacggaaaacgcagtcggcgggctgaggaactcggtaatctcggcaaccaagtcggctacattgatcagaataatatcggatgccacacggccggcgcgcgaataggtcagcagatcgtccagaagctgttccatgcgtccgaccctttggcggagcaattggagatgcttgcgattctctcctttcagaacggtttccaagtcctcctgcaaccaaccggccaagctgtcaatggcccgtaatggcgatttgagatcgtgcgaggcgacatacgcaaactgctccagatcggtgtttgatcgggaaagttcagccagcagtttctgccgctgggtcatatccagattggctccaacaacgcgtaccgggtgacctccagaatcgaccagacttatttccgccgcgtgcaagtgcctgaccagcccgtctgtggcccgacggattcgaaaatcgcgcgcgctgtggccgccatctcttgccatctcgcgcagaattcgctcctgctccggcaaatcctccggcagcacggcgtccgcccacgcttggtagggcacgatcatattcgcagtaggttccaacccataaagccggaacatttgacgatcccacgagaccgtgtttgtagccaggtcccaatcccaaattccaatttccgccgtctccgcagccagccgcagtcgctgttcacttgacgcaagcgcgttctcggtccgtttacgttcgatgatttcccaggaaaagtcgcccagcaatattgccacatcgacatctgcttggacgtaatcgattgacttgttgccaactccgacaacggcgacgatctggtcgttgcgaagaatcggaaagacaagctcgcgaacgatggcggcgtgcctgtcgggaagccccttcttgtgtgtcagagacgcatagtcattctgaatcacgggcgcgcgcgtgcgtatgcaatcgcaccaaactcctgcctgcgaaaccgggtagtgacttcctttgccctgtgccgcgcacatgcggaggatcgtgttcgaagaccaagcctgcaaggtgagggtctcctggtcggtatccacgaaatgaaaaaagccgatgcagcttccggtctgcgcttcgatttcgtccagcgccgattgaagatacttgtccagagtggtgcccgaggccgcctgcaacaatcgaatgcgggctttgagaatatcttcgtttctcttgcgctcggaaatatcgcgcgccaccgtagagatcatcgtcaattcaccgctggggttcttgtgggctgtgattacttgggtatgcagaatctcagtgcctgcgtgatccaggaatgccgtttcaccctgccatacgccattccggattgcggatggaataccctcttccagaacgagtctggcagcccatgccgggtgtgatttttcgatgctgtgcagagacggggagtcattatctcccaagccgaacattcgccgagccgttcggttaagataggtgatcttcatctccggtgacgccatcgcgacaaaatccgacgtcaactccataatggccgaaagttgggatcgcaacgcctcggctcgccttcggtctgtgacatccgagaacgcaagcagcagatgcagccgtccaccgctctcgaaacagcttaacgagcaatccagaacagcttcgcgtttgaagctggtcagaatgtctatttcgattcgctcaggctcgccgctggccagaacccgctccgccgctttcaaaaggccgcttcttttccatgatgccagttggcggaagttccccgccagaagttgttctctcttcgcgccggtagctctggctgccgcttcgttggcaatcacacaggctccggtcgcgtcgaaaaccacaatgcccacagtggcggcgttgatgagttcctggttcagggccagcgcatctttgagactgttttcgatttgcctgcgctctgtgatatcgcgccagacgacgtgcagcaattgtcggccccgatgctggatgcttgtcaagacaacatcagccagaaacacctcaccgtcggcccgcagatgttcccattcaaaggtatgggaactgttcttcaacgccagggcgatcaccttgccgaccttttctttagaactcatcccatcggactgaactttgggtgaaatctggctgggatgcagaccgcagatctggctgcgagatgtcattcgaagtgattccagtgcggctcggttgcaatcgataaagcgatcttcctcaatcagcagagtcgcttctgcagaatcctcgaacaatttgcgaaattgttcttcgctctccgccaacagccgctcacgatcccgccgttcctctcccgttcggcttaacgtctgcgctaattcctccacgatcaggtattttccatactgcagccagacgattccgattgctgaagacattaccatcattagcatggcgattgcggcaataatgagttttcccctggccttccagtccgcgaacgcctcggaggtgtcgatcttggcgaccatgaaccagggcgactccggaatcggctgcacggctgccagcacctcgacattgcggtagtcaaaaccgatgaacacacctctctgaccattggctgccatcacggctggcacgttggtgcgggccaagggaatccgcagtttcatcgctgttccgtgctggaaccgcagctcattgagatacagaatgttatccccatcgcgccgaacaaatagaacctcgccgctgcgagagggcgtgggccaggactgagttaccgggtagagaaactgattcgcgtcaatttcaaataccacggcaccgatgggttgggctccgaacccatcggggcgcaatagcggagcaatcagttgcgaatggggcgaattgcagcctgagttgaggcgcagatcggtaagcattgggcgctgctgcagaaaggccatctgaatgtcagtccagatttctgaatgaatctgcccggtctttccactgaggctcaacagaatctccccttgggcatcagtcaggagaacatcgtgaaaatcgtaattctttttaagcgagtcgaaataagtcagcagaagtgggtcattggtttcaaacggcgtcagccgaagctgctgtcggctgcgatgccaaatggggctatccatcaggacatctgcatcagccagacgctcggttcgccactcgatgatttgatgcgccttgaacttggcaatggcttcaatgttagcctcggcgctgcggcgaaccagtagtttttgcgtctgatagaaccagatgccgccagcaaaaatgaagagcatgatcaccgtcaggatggcggtgattaatgttatgcgtagttgcttccgaacgggcacaaaagcagtttacgttgcgcgcaacaatggcgcaaacttattcgacagcattgtcattactcaacaaattcgacacaatcaacggaaaacggcaagatttgttttgacaaagtcaaaatagttacaacatacaaagtatatgcatggaacaaattcaattcaagttttcaaaaccggtcttgttttcggcttcgatgttggcactggttcgcttggctatgctgtccgcaaaggagcaaagtttcttgatgttggcgtaatcatttgtgacagcgaaggcagcgacttaagcaatcgacggaatttgcgccgccagcgtcgtaccctgcgcagccgcaaattccggcgacaatggttcgccaatgaactggagaaactcgacattcccaaaccgacgcaatcatttcatgatcccattaccctccgcctgcgcgccatcaagggcgaagagattgtcccagaagaactgcatgtcgcgctattgcatctattcaaacgtcgcggctacagcaaggtgccttgggcaaatatagaatcggcagcaaaggacgcgaccaagcccaaaaaagaggacgacgagggtaaaatcaaagaggaggttaagaagaataaagaaaaactatctggcaaacatccgtgtcaatttctcgcagaagaacgtgcaaaggctggcaagagtccaacaacaaactgggcgcgcaaaatccattggcctcgcgaagttcttcgggacgaatttctagctattgtcgaagctcaaaaaagtcgcttccccaagcttgcggagaaggccgactggttgctttacggtgattcccagataaagacaaaaggcgaagacgcataccacgttttcttcaaaaccaccgaagcgcgcaatcccggcgttcttggcttgcgctggccgcgcttcgacaatcgcagtccggccttggactctttgcagccagtagatcaactcggacgcccgctccatgtcgctcgcaaaaccaaagaggcgtttattaaagcgcagtggccacttgccttgatcaactttcgcgtcatcgacctggcaaccggaaaattaaccgccccggacgacaaaagccttatccgtttgcgggaaatctgggaaaacagcaaacgcaaaaagaagacgtcatattccgatgccaagcatgaacccgagagcttgaagatatcggaaaaggtaatggaacgatgggcaaaggattttgctcatcagtataaactcgtagaaggtcagcaacctcttacccctcaaactggcgctggtcgtgcaagatattcatctttgacgctgaataggatttccgctggagagcattttgatccaccacaacccactttacgccgccaaggcgaaaacgcggaacaggcgttgaatcgttatctggcagacatcaaacacccacttgtccgacatcggctgattttgttccgacgtttgctctcgcagcttgttttgcgttttggtgagccggacatgattgtcttggaagccgtccgcagcctggcaatgggcgaaaagaaaaagcgcgaatacattcaacgaatcaaagaaaaccgggatgagcgtgaaaacattcgtacagaattgaaaaaagacaattttagcagttcaaagaattcaattcttcgttaccgtttgtttaaagaagccaaaggccgctgcccgttttgtctgtgcccattctgcctgcaagaagtcgtgttcaacgaggcggagattgagcacatcgtgccccgcagccgggttgattgtaacgaattctacaatttgacagttgcacacgagcgttgtaataaagagaaaaacaaccgaaccccttgggaggcttttggtgggaccagtaactgggaatcactccgcaaaaacgcggaagactgttttggccctggaagcctgaaatatcgactattcataaatccagatgcgcagaatctcgttgaagaaaagtctgatctccaacacacggcatacattgcccgagtcatccgtcatatttccctgattcatcttggctggctgaacgacgaaggccgcgacccaacgcctgaaaaacagaatgccgcgctcgcgtttcaagtcaccaacggccaacttaccagtcggttgcgcaaagcgtggggtctgaaccaaattcttcatccactcccgccaggcaaacgctggaacgaactgacagacgatgaacaaaaacagttcaccgaaaagaatcgcggcgacctccgacaccacgctctcgatgccatggtaatcgcctgcacactgccttggctggcacaccgcacccacggagcaacggatgagttcggacaacacggttggtggacacaagatgaaaagcaacgcagcaaagccgccaatccaattttctcatgcgatggccagatgcacgatattgtcaagactgagattcaaaaggttgtggtgcggcatcacgtctcacaaagcaatcaccaacaggcgtatgcaaccaccctctacgctaagaaagacaaagacacctatgttgcacgagaaattttcagcacgctaacacccaagaacctcgccgacatctggccaagggagtttgcggcttattgccaagcggcatggtcatgttatgttgaggaatcaccaaacattgagactgaactaaaacaaaacaggggctgtgttccggaaagtttcaccaacaaactttgcttctcgcattatcagcattggtgtgccaacaacactccaccatttgcatggccaaagaagatcaaaattccaatccgtagcgttcgactgatttccgtcaaagatgatacggctgttgttccattcagtttgggcactcatgcctacgtcaaacgaactagattcaaagaagtcagaattcacatggctgaagacggcaaacgctttgtgccagtttttattccttattggaaagaggataagccactctgcgaagaaccaattcgaacaaacaggagaccgcttgccgtcattaggcgagggatggtcattgaaacaaaaaatccattttcaaccgggcaaccgccgggaaaatatcgtgtgctaacaacaggacagaagcaactgcgcctcttgccgcaccacgttgcaaacaaagtagaagctatactttcgttcggtttaggcaaaaagggactccaaccttattggcctgattttattcgcgctctcggctatgagctaccacatcctccatctgctcagtcacaatctgcgggtccggctgaagcttgaccaacttcacattgccgacaccgagaaaggcacagataaaactgtgcctctggcggatgttgccgtcatcgtctgtgcatcgccaaacgcggagtttactgccagttcactgcgtcgcatggcggaattaaatgttctgctgcttctctgcaacgaaaagtttgagccgtgtgccattaccctgccttactaccgtcccacaaacacagaattgctgcgccgccagattgaatggctaccggaatggaaaacgggaatgtggcggcaaatcatcaccgcaaaagttcgcaatcaggcggcaaaccttgcacacctcaaacgagcacattcactcctgaatgaaatcgcaaaccgatgcaacaagggagggataccaacctcgcctgcacccgacgaagcgccttcgccagactctcttgctctggagattaacgccatgcccaacagcccttgcggacatgacgcacgcgctgtccaagacaaaacatcccttgccacgctcacggcgtccaaacgcgcggcgtttctttccaactccccggatgcctgcgagtctcgcgccgcgcgacactactggaaatacttgcttccgcgcttgagcgaatggcaacaaaccaatgaaagacgccgcattcctggcacacgcgaaggcgtcaacggaatgctggactacggctatgccatcctgcgaacagccgtgctgcgctcgctggctgcgcatggattcattgcagccatcggcatcgctcatacccccaaagcgggaagttttgcactcgctgatgatctaatggaaccgttgcgtccgtggattgaccgcgagctacgccttttcatacaaggcggacctcgtccaatggaagaatggatgaggcaagcggtttccgtattgcaacgggaagtggcaattaataacagcaaggtgcgtcttctcaatgccatcgacctctatgtgcaaagttttgccgacgcgtcactggctcgcgctcaccctcctctcaaaacaccaatgctaccgtgagtaaacacacaggcaaaggtgacaggagcgtcattacggatacgaattgcaactccagcaatttgcaacctaacacagcgaacgctgcgcaagaggcttggctttctaaaccgcttccttgtgaaccttcaagagaaccgcatccgacgtcaataacgcaacttccatttgaaccctcaacagcatcggattcaccgccccgccgccgctcccacggacgctctgggcgcaatccgatttgcagtaaatatcgtatggcatgggtgcttgtcttctttgacctccccgttggaacgacggaggaacgtaaagccgccagcaacttccgtaagaacttgctgagggacggctatatgatggtgcaattcagtgtttacgcccggccctgcggcaccgcagatcgtgtggatacccagatacgccgtctcaaatcaaagataccgtccaaaggcgaagtgcgcggcttgctgatttccgatgcgcaatggggccggatgatcattatacgcagccagcaaaaggtggattctgaaaaaatgccagagcagatgatgttcttttgaaaaaggaaagactggcgcggaatttcttccgcgccaatcaagacctcgtatcctgcgggtgctcgccgtgttgccacgactacttcagtgccgcaggtcggtcaacatatttgagatggtgccccccgtccaaaggatgcaatcaactcactacacaactattccacccatattccgccgtcaatcaaaattagcatcccttggacggggggcaatcctagggtgttgaattgattgggattttgcctcataaagttcatgcagaagaagttcctgattgcacgtcat

SEQ ID NO: 3936 - DNA, 14961 bp, synthetic construct
  misc_feature 1..14961: note = Synthetic
  source 1..14961: mol_type = other DNA
tccaccacctcaatgcgcggacgcaagtgcgcggggatggcatcagcggaccaggcatccgcgggaatttccacaccgtaacgctggcggataaaccgggccaaatcctgcttcaaggaatcgccggtgggcgagaggccggcgacgatttcggcaaccttggggggaaagggcatcagctcgcggcggatggatttgggcagggagcggaggagttcgttgacgagtccctcgcgcaggcccggcacggaccattcgacgctggcttgcgaaatggtttgggcgaggctgaagccgagttttacagtgacgccgtccgactcctcgcccggggcgtaggcataggagagggccacgggctggccgcccaacgggacagcgtcggggaaggcggcggagtcgtaatttaatgactgcccgccggtgaggtccgcttcctggaggcacagccgggaccggttggcatcctcgcgcaaccagcggtttaattctggcaccgaggagacattctgcaaatgctgggagtagaatttgaacagcacgtcgtcgagccccatgaggtcgtgccggcggacgcgggtctgccaggtttcgattttgtggcggacctggcggttgtgctcgatgaaggcatactgcggcgggagggatggccgctgggcctcggcgcggaccagcacgcgcacttcgtcctcaccatcgtcatcctcctcgcgggcgcggcgggtgttcgggagcaggtcctcttccacgagggcggagcgaataaatatctccgtggcggcagacgggtcgatattgccaaaggccactttgcgctggcgcagttccatgccgttgaaggtggtcttttcctccaccaacacattgccggccttcacgtcccagcgggggttttggtggcttaccttgcagaggtgcggagcgagttcgatgatccacagaggatcgatcccagccacggtgcgggcgaagagctgcgaggtctcgaccatttcgcccgccacgatccacgggggttgttgcactgatactggacgcccggtcacggggccggccggagcggcgggctttttgggtttctcctgcttatcgtagagcgccgagccggggaagatggtcacggggcggttgccagcggtgtggtaggtgttgcgttccttgcgaatggcgacgtggccgagcaaaccggcgaggatggaacggtggatggccgcgtaggcggcgttgctttcgttcaatttcaccgaacgcaaatcctccagcgcgccgtgcaactgagcgtagaggtcctgccattctttgaagcgcagataggacaggaagttcgctttgcagaatttgcggcgctggccctggctgcggagggtttcccactggtcgtgcacggcgttccagattttcaggagggtgagaaaatccgaggagggatcgctccagcgcttgtgcgcggcctcggccgcggctttttggtcgaggggccgttcgcgggggtcctggatgctgaggccggaggcgatgatgagcagttcgcgggtggcatgctcctgctgtgactggagtaacatgcggccaagcgtgggatcaatcggcaggcgcgcgaggtcgcgccccatgggggtgagcgcgcggcgctcgtccaaagcacccagttcctgcaacaaagcgtagccggcggaaattgccgcgggcagcgggggattcacgaacggaaacgtctcgatttcccccaggcgaaaggccttcatccgcagaatcacctcggcaaggttggcccgctggatttcgggctgcgtgaagggcggacgctcgtgaaaattctcctcggcatacagacggatgcagacgccgtcctgcacgcggccactgcggcccttgcgctggttggcgctgctctgggaaatctcctcgaccggcaggcgcttggtgcggttgcgagggttgtagcggctgatgcgcgccagcccggtgtcgatcacataacggatgcccgggagggtcagggaggtttccgcgatgttggtggcgacgatgagtttgcgccggcgggaaggcgaaaacacccgctgctgatcggcggcgctcagacggccgaagaggggaatgacctccgcgtcgttgcggaaacggccctccagcaggtcgctggtctcgcgaatgtccctttcgccgggcataaagatgagcacatcgccgttgcccggctcgcacaggacctgctcggcggcgcggactgcggcatccacatacgtcatgtcgccacgctcctcggagtccatgtccagcggcgcatagaccacagccaccggaaaaatgcgtccggagacttcgatgatgggcgcatcattgaagtgggcggaaaaggccttggtgtcaatcgtggccgaagtgatgatgagcttgaggtcgggccgtttcgcgaggagtcccttcagataacccaggaggaaatcgatgttaaggctgcgctcgtgcgcctcgtcgatgatgatggcattgtattcggacaatagcgggtcgccctgggtttcggccagcaggatgccgtcggtcatcagcttgatgtaagtgtgctcgctggaatggtcgtcgaaccggattttgcaacccacttcacgcccccagaccacgcccagttcatcggcaatgcgttgcgaaatggaaagcgccgccacgcgccggggttgcgtgcagccgatttttgcttcaatccccaggccggcttcaaggcacatcttggggatttgggtggtcttgccggagccagtttccccggcaatcaccaccacctgatgggcgcggatggcggcgatgatgtcatccttgcggctggtgatgggcagctcgggcggatgggtgatgcgcggcaattgcgcgaggcgctgcgcgcgtaattccacggaagcgcgagcctgagccagtaaccggtccaagagggcatcatgggtggcctcatgacgccggtcacgcagcaaccggaccagccgcgagcccagccgcacccagtcgggcagcattccctggggcagcaaggctttgatttcctgaattcgcgcgtcgtgcatgcgtgagttgacaattatagcaagttagggagcgcggggaaacctgataaacgcccgcgcttgcaatcagcggccaatgcgatagcttgggccgcgaattcaaacccctagcggcggcgagcgccagtgatcgcggccaaactgattgccaaaatgctaaagccaccgatctgtttatgtggactggccgcagccagcctgctggtttccgcgcgcgcccaagtcgtggcgtttaattcctttggcgcgggcaacagctacagccatgccacggtctgggcggtaagcggggcctcccttgcgggaggctaccggggacaggcggaatttttcacccccagcgtcacgggctatctctcgagttttgagctggccacgtaccgcgtgagcggctcggcgctgtcgaacttttatatagcccaggacaacggcagcggggtgccgggcacgaacattgaatcgtttatcaatgtggccaatatcacgggggttttgaccatcaattccatcgtgaagccgttgttgcaagccggcacccaatactggctctgcgatgaacccgccaccagcacttcctacaatggctggtattacaacaatcagggctacgattatggttttgcgttcgagcgttctgaatggagctgggcggccattccgggcccgacggtcagcagcggagtgtttgaagtccaagtgacgccagtgcccgaagccggggtggttagtttaagcttgctagggtcggtttgcctttggaagttccgcggccggtcacgaaaccgtcgcgccggataacggaacggcggcagcgccgcgccgttgacgcctttaaccgtgctttttcatccaggcggcaatggtgtccaccgcgaccagatactcgttaaaaatggctatcgacatggaccgcttgccgtgctcgtaataagaaatggtggacggatcaaagcgcatttcccgcgcgacggcattgccgggcacgccaagagcaagccgatagcgtttggccgccgccccgttggcaaccttgtccggtttgccaatgcgaatgaatttgaaatcgggctttttcatataaccatttgaagagaatggttttgcggtgacgagtcaatcctttttgcaattccggcggcggacggcgaccgaagttcatggctgcttgcagacggcaggcggcaggcggtgctgaacgaggagagagtcggcagattttaaaaaacgaagattgcgctgcctggcaaaatccggcacaacttgccgcccattttatatgagccggaaaacgacccaaaaagttaataacgaaattcaactattgcaattgctgaagcaggtcctgcccaaggcgacgcacgacccgcaactggctggtaaaatttatgaggcggtcgaagccgaactcaaaaccaagtcccgcaccgtggcctttgagaaattctgcacgcaggtggaattgccagatttggagccaaaaaccttgaaggatgtgaagctgcagctcgcctcggcgtttggcagcaacggcgacgtcaccatcaaaccggacaccaaggaaaaccgcctggcggtggaaattctgctgccggatgggacgcagttgcagagcgaaattccggtgcgcacggtggcgccggaagccagtgaggagcaggaaatcgcgctgaagtttgtcccctgccccgtgagcctgcccggcgatcccgaactggtctggctgctggccaagcgggaaaacatgaccgccgaggaggcgggcatcgcgctggccaaattggaggatgatttctgggcctcgaagaccggccagaaacttctgcgtgaccgggtggagcggagctttccagaatttatcaatcgggcgcccgcaggcatgctgaccgaactgggtttgaagcggcattacaaaacacccgaggcggtaaaagtgctgcgtccgctcaccccgcaaaagcggtcctaggtgcgcggaggtttgccaaaagcccggcggcaggtttaactaagcccgtgttactggacctgatatttggccgccggccgaatcaagcgaacccgtccgcgccggaaaccatttccgtgagcggacgaccggtggcgctccagttcacgcggcatccgcgcgcgcggcggtatttgctccgactgctggcggatggcacggcccgagtaaccattccccggggcggctcggtgcaggaagcccggcggtttgccgagcgccagaccgcctggctggaaacacagtggcaacgcctccagaaccttccccgggtaaaaagcgagtgggtggcgggcagccagatactgttccggggcgagcggtttactttggaatgccccgcaccgggcatgattcaatggggctcggaactggttcggatcaaggaggcaactgatttgcgcccggcgattcaaaaacatctctggcgcctggcccaacgggaactgccgccacgggtgcgggaactggccaaagtccatgaggtggaggtaaaccgcatttccatccgcaaccagcgttcccgctggggttcctgctcccggcacggaaacatctcgctgaattggcgcttgattcaattgcccgcggaggtgagcgactacatcattctccacgaactcatgcaccggcggcagttgaaccactcagcccggttttggcaggaagtcgaagcagcatgccccggatacgaagctgccgaacggtggttgaaacaaaatgcgggcttgctggggtcctaggaaccaacggatcccggctgttgcttgtacttggcccaacgaagcttttgggcggccttgatgcgggcgatgccagccgcgctgattttcttttttttcctcaagccggaaaccggcttcccgtttcccccgggtgccgcgccgatcaaatcaaccagggatttttccaatttactgattttttccttgaggaccgccgcttttcttagttgttcactagtcagattagagaaaacgctcatcaaaggggaaactaccaaaagtgccagttgtgtcaagtaaacttatagttaaaaccgggcaggaataacatccacgtggcaatggccgcagcttccagaagttaaacacaataattgcaggcggatggcgagccaattgatttcgtacggttttagattacgccaattcccaaattgccccgcccggaaattttcgcatcaagattcggcttattaatagacgcggcgtccattatcaattagatggcatcgcccccgccaacggggcaccaagcaatgaacgttcaccatgccaaaaagagacttgcactccgcccggccggcaccaaagctctggccatgcgcaccaacgtattgggcggggaattgaagagttgctgttacgagccgctcacgggtttttaccgagacggctactgccgcaccgggccgggcgatcatggccagcacacagtgtgtgtgcaggtaaccgccgaatttctggctttttcgcaagctcatggcaacgatctctccacgccgcgaccggaatatcattttccggggctgcaggacggcgatcgctggtgcctgtgcgtggaacgctgggccgaggcattccgggcgggctgcgcgccgcaagttattctggaatcctgccacattgcggccttggaatttgtagacttggccgaccttaaatcgctggcgatcgacaaggaataagggccggcggaaaggggttagagcaaatgccccatcttctcgcgcttggtttttaaatatttcgcattgtgcgggttggggctgatcttaatcggcacttgctgggtgattttcaggccgtaaccttccagtcccaccagtttcttgggattattcgtcagcaaccggatggttttgatgcccaagtccacgagaatttgggcacccatgccatattcgcgcaggtccatgctgtagcccaatttttcattggcttcgacggtgtcgtagccctcctcctgcaatttgtaggccttgattttgggggccaggccaatgccccggccttcctgccgcatataaacaatgacaccgcagccggcctcggcgacctgccgcatggcctgatgcaattgcggaccgcagtcgcagcggcgcgagccaaacacatcaccggtgagacattcgctatggacgcggacgagcacgtttttctggccggccacgtcgccacggatcagggccagatgatgctggccatcaagtttggatcgataaagcgcgaggtcgaaatcgccataatcggtcggcattttgacggtttcgacgcgttccacgagtttctcgcgggtacggcggtactcgatcaaatccgcgatagtggcgatgcgcaatttatgtttgcgggcgaatttcagcaactcgggcaaccgggccatggtgccgtcgtcgttcatgatctcacagatgacgccgacggggcggcagccggcgaggacgatcaaatccacggcggcctcggtgtggccggagcgctgcaacacgcccccggggcgggcgcgcaggggaaagacatggcccggggcgacgaggtcctcgggtttggcggaggggctggccatgacttgaatggtgcgggcgcggtcgggcgcgctgataccgctggagatgcctttggtggcatccacacttacttgaaagtcggtgcgaaagctttcgcggttttctttcaccatgcggccgatgcccaattgctccaggcgctcgccggtggtggggacgcagatgaggccgcggccgagtttggccatgaaattcacggcggcgggtttcacgaactgggcggccatgacgaggtcgccctcattttcgcggtcttcgtcatcgacaacgatgaccatttttcccaagcggaggtcggcaatgacggactcaatagtatcaaacgtttttttcatcgaacgggtacaagctaaactggggcggcgtaaatgtcactggggaaggatgtccaaagtccaaagtccaaggtccaaggtctaaagtccgtcaacttgggcaccccttgaagaaacttgacggatggggtggatttttatttttaagatgctctctattaatgctttgtttcaattttaggcggtttaatgggggttgacggagggacatagcatttaggagccggaagcccggaggcagaagttcgcagcccgggcaccccttcgccgaaaaaattttcaccttgaatcaccttgaatcaccttgaatagccttgaatgaccttgaataggcggggggcgcggggcttgagccgcgaggcagcgtaaacaccatgggtctggccgccgggcgggcgggttatgtcaaagatctttcgtaattgccaccatacgccaatagcgctgcggatgggatggcggacggttttgctggaggcccaagccattatggacctgggcgcaaaggcctgagctactcacatattgtatcatcgggcgatgagttgtcaaatgagaaaaagtagcaaaacgccaaacacgcgggtgtgaataagcctaaaaacgaaatatcccagtgaaagaggggaatttgaatggaaatgaaagatctccgatgttcaaggtctaagccggaaccatgcaatagaaacgcagtgtttgcttggtctttttgcgtaaggactgcgtcgcgaggcgcttccagatccataaaggatatgctacgcgcctcactccttgccttacccaaaaatccgctgcgcaaccacttgcatttctattgcatggttccggctaaggttcaaagtctagtgggtaatgcaaaccgtcgccttcgccacagcctcgccaaaacctaaaaatcatcgctccgtacggcgacattatttgttaatacgctccgggggtgacgatgaggagccggggtcgttgggtatagtcgttttggatggatgcaatgtgccagttatgtggttcgaacaccttgcgaagcgcgggggcctggccgtcgccgaattcgagcatgagctggccgccggggcggaggtggcgggcggcctggcgggcgagcagttcgtagaagcgcaggccgtcggggccgccatcgagggcgctggcggggtcgaaatcacggacttcggggtcgagggtggggatttcggcggaggggatgtagggagggttgctgatgatcaggtcgaaggtggcggccggcggcaagggcgcaaaggcgtcgccatggaggaattggaggcggtcggagacctggtggcgggcggcgttggcgctggcgacttcgagggcggctgcggaaatatcgagggcggtgagccgggcggcgggacatttcagggcgagggcgatggcgaggcagccggtgccggtaccgaagtcgagggcggaggcgggcgcggggcgggtggcgaggaaggtccagccggcctcggcgagaagttcggtttcgggccgggggacgaggacgtggcggttgacggtcatttcgtagccgcaaaagctggtggagccggtgatgtgctggaggggttcgcggaggctgcggcgcttgatgagttcacgaaactggccggtttcgccggcggtgagaacgcgctcgaagttgaggtacaatttcatgcgggggagctgcaggagatgggcgaggagcagctcggtttgcaggcgcggggactcgacgccttttttggcgaggaaatcggtgcttttttggatggcttcgaggacggtcacgggagcaggctaaggggggagggcgaaaggggaaagcaccaaactccaacctccaagctccagagccgggcaccccccggcgggggctggtactatagcatcaggcgctgagttttcaaggggagtttgttgccgccccaaaactgggggagccaatggcaccaaataatttaaaaggttgcgcgtgtatagtttaggcctagtatgctaatgtaaaagactcgtaaggaatactatgaatggagaaattgcggggcaaaaggattctttcactgaaggactggtttttggttttgatgtgggcaccgggtcgattggctatgccgtccggcgcggctcagaatttctggatgtgggagtgttgatttgcgacagcgaaggcagcgatctaagcaaacgccgggatctccgccgacaacgccgcacgctgcgcagtcgccaaggccgccgtcgctggttcgctggggaattggtcaagctcggactgccaaaaccgcccatcccccccaacgacccgatttcgctccgacttcgggccctcaagggagaggtattgaaaccggaggaacttcatgccgctctgactcatctattcaagcggcgcggttacagcaaagtgccttgggcgaatgcggaaagagccgcacgggatgcaaataagcccaagaaagacgacgaagagggggtgattaagcaagctgttgaaggaatccgtaaagagctggacgaaacgaagtgccagtttccctgccaacttctggatgtgcgacgcaagaaggctggtcaaagcccgacgaaagaatgggggcgcaaaatatactggccgcgcgaattgctggaaaaagaattgcgtggaattgcagcagcccaaaaggaaagatttccagaattagccgataaaactgactggttgctctacggagactctcaagcgcaactcaagggtgaggaaacttaccacgtctttttcaaggcctcccaagccagaaatcccggcgtactggggctgcgttggcctcgttttgacaatcgcggtccagccttggattctctgcaaccagtggatgaacaaggccgccccttgcatgtggtgcgtaaaaacaaagaagcctttacaaaggcacagtgggaactggcgctgatgaatttccgcgtgctggatgccagcacaaggcagaagcgcgacccgcgcattgatttccccgttttcattgaaaatcttcgcaatgagtggaacaaaaaggggaaaatcacggaagcccggttgaaaaaactggccgagccattcaaggcgaaattcttgctgattgaggatcaaaaaccgctgacccctgagactggcgccggtcgagccagatattcgtcgccaaccctggagcttatccgaaaagagataggcgaaggccggcgagttgacccgccccagccgattttgcggcgcaaaggcgaaagtgccgagcaagccttgaaccgttacctggccgacatcaaacatccattggtacgacatcgcctggttttgttccggagactgctaatgcaactcgttgcacgtttcggccaaccagacatgattgtgcttgagtcggtgcgcacacttgcccttggccagaaggccaaaaatgaactcaatcaccgcaacgaattattccgcaaggagcgtgaaaatgcgcgcgaacaacttgcttcaaataatgaatccttttcccggaaagccattcagcgctaccggctctggcaggaagccaaaggccgttgtcccttttgcctgcaaaccattgagcagacggatttgggccatggagcggacattgaacacctagttccccgctctgcggtggattgcaacgagttttacaacctcaccgtggcgcatataaaatgcaaccgcgaactgaaaggtgaccgcactccgcttgcggcctttcgaggcacgtcacaatgggaaggtttaaaagccaacgccgaactttgttttcgcggacgcaaattggaaatcttcttgagtccaaatgccgaagaattgattgagcagaaatccgatcttcagcacacggcatacattgcccgggtcatccgccatatttcattaattcaactcggctggctgagcagcgagggacgcgatccaacgcccgaaaagcagaatcctgctttgagcttccaagtcacgaatggccagcttacgagccggcttcgcaaatcttggggtttgaaccaaattttgcatccgcttcccccaggcaagcgctgggatgatttaaccgaggcagaacaacaacaattcacggaaaagaaccgaggcgatttgcgacaccacgctctcgatgcgatggtgattgcctgtactcttccctggctggcacatcgaacccatggcgcgaaggatattttcgggcggcatggctggtggactcaggacgagaagcaacgcagcaaggccgcgaatccacttttcccgaaagaaggccagatgcatgaggtggtcaaaaatgaaatcgaaaaggtcaccgtgaggcatcacgtctcacggagcaatcatcagcggacttatgacacgaccatttatggtcggccaaaattaaacggcgctcaaattccagattgctatgtttcacgcgagcccatcaccgcattgaaaccagctgatttgaaatcgcaaaaaacaggtaaatcaaaaatttttccgccacttctcggagattatttggccatggcctgggccacatattgcgattcagagccgaattgggaagagcaacttaaagctaataaaggccgccttccagaagcgtttcaagaaaaactctgtttttctgattttcaacggtggcgggctgatgaagcaccgtcatttcgttggcccgaaaaaattgtaatccccatcaaaagggttggatatataggtgtggaagatgatagcgccgttgcgccagccagtcccggcacacacggatatgtcgctcgtggaagctttcgcgaagtgcggttacacccggctgaggacggcaaggcactcgtgccggtcttcgtaccgatgtggcgattggacaaaccgattccaaaggctccaatcaatcctcattccgaaccaatagtaacaatacgacgcggacaaattgtagaaattaaaaattcgcctggtcgcaacacccctttaggcaagtatcgtgtagcttctacgatgcagcaaaacatcaaactcctgccagtgcatttggcggaccaaaaggcctcattgaaggcctccggatatttagaaaacggtgtgaatatcagttgggatactttcatcaaatcagcgggttatgagctaccacatcctccatctgttaagccacaacctgcgggtgcggctgaagcttgaccagcttcatatcagcgacctggacagcggcgcggataaatccgtgccgctggcggatgtcgcggcaatcgtttgcgctgcgcgggacacggagttttccgccagctcgctgcggcgcatggcggaattgaatgtgctgctgctcatttgcaatgagaagtttgaaccctgcgccatcaccctgccctactaccgccccaccaacaccgaattgctccgccgccagatcgagtggacgcccgaatggaaaacggcgatgtggcggcagatcatcacggccaaggttcgcaaccaggccgccaatctagcccatttgaaacgggcgcatgcggtgctgacggagattgccaaccggtgcgagaagccagcctccacgggagacgacgtgaagaatctcacttcaaatccgggaattgatcagagactcgtcacctcgtctcctaccataataaaacccagcctggccacgctcactgcgtccaagcgcgcggcgtttctttccgatgcaccggatgccagtgagtcgcgggcggcgcgacattattggaaacatttgctgccgcggctgagtgaatggcagcagacggacgagaaaaaccgggtgccgggcacgcgggagggggtcaatggcatgctggattatggctatgccattttgcggacggccgtcctgcgctcactcgccgcgcatggtttcatcgccgccatcggcatcgcccacacggccaaagctggcagctttgcgctggcggatgatgtcatggaacccttgcgtccgtggattgaccgcgagttgcggttgtttctgcaaggtggccctcgtcccatgcaggaatggatgcgccagtcggtcagcgtgttgcaactggaggtttccatgaaccggagcaagctgcggctgctgaatgccgtggatgtttacgtgcaaagctttgcggatgccgcgctggcccgcaccccgttcccgctcaaaattccaatgctgccgtgagcgaagcccccaacaacccggatgcgttgcctgacgaggaagagttattgcccgatgaacgtccccggcggcgcctgaccgagccggacacaccgctgcaacttcaaccctcaaccgctgcggatcccccgccccgccgccgctcgcgcggacgtgccggacgcgacccggtatgcagcaaatatcgcatggcctgggtactggttttctttgatctgccggtcggctcaccggaggagcgccgcaacgccaccaacttccgcaaagatttgatcaaggacggttatttcatggtgcaattcagcgtctatgcgcggccgtgcggcacggcagaccgggtggaaacgcaagtgcggcggctcaaatccaaaattccggccaagggtgaagtgcgtggattaatgatttcggacgcgcaatggggacggatgatcatcctgagaagccagcaaacagcggaagcggagaaaatgcccgcccagatgcaatttttttaatagagagatcggcgcaaaattgcttttgcgccgatcaagacctcgtgtcctgtgggtgcaagctctggttttacccagtcttctcagtgccacaagttggtcaacatatttgagatggtgccccccgtccaaaggatcgcaacaactctaagttcactctacttaggccatctttgcccgtcaagccagtttacaatccctgccgcgaggatttcaaaggcgaacaaaagtgtgcgagcaaaggcggacagatttattgggcgcggacggcgaggaggatgacgggtttttcttgggggttgggctggtgggcgaggaaggtgatattgccattggggtgc

SEQ ID NO: 3937 - DNA, 14710 bp, synthetic construct
  source 1..14710: mol_type = other DNA
  misc_feature 1..14710: note = Synthetic
cgtcatcgggcgggacaagaccggcgtggtggccggggtcaccaacctgttgttcaagtccagggccaacatcgaggcgctggaggaacaggtcacgcgcggccagttcagcatgaccctgcaggccagttggaaagcggcctcgtttgacgagaacgcgcttggccaagggctgcgcgcactcggccgcgagctggggatggagatcaagtggtggttcaccgacccgaaacgcccgcagcgcatggcgctgatggttacccgtgaaccgcactgtcttgacgccgtcatcgaggcggtcaacgccaggcggctgaaggcggagattgtggcggtcatcggcaaccaccgtgacctgcaggccacggccgagaaagtcggcctgccttttcattatgtctcatggacgaaccgggccaaggcggaggagaagaccctaaagattctcgagaaggcgcaggcggatttcgtggtgctggcccggttcatgaaaatcttgtcgccgaacttcgtttggcggttcaagaacaagatcatcaacatccatccatcgctgcttcccggcttccccgggccgcagccgtaccggcaggcgtacgagcacggcgtgaagattgccggcgtgagcgcgcacttcgtgagcatgcacctggacgaggggccgatcatcgcgcaggaaagtttccgtatcaagccgggcatgacgctcaggcagatcgtggccgccggccagccgctcgaggccaaggcattggtgaacggcatccgcctctacctcaccaggcagctcgacgtgcactggggcgtggtcaatcaggtctgaccgtcgggtcactcttcctcgtcgaggaaattgatcttgaggccgccgccggactgcgcttggccttcgttcaggctgtcctgcagggtgggggaaagggcgctgccgggctggggtgccggttcctccgcttggccaagcacttggtcttccggggaaagcgcggaacgaagcgccccctgcaccagctcagcgcagtgaatcttcatcggcggcagcgggccgagttcgccggagagttcctccggtttcatttccaacgcttcgtctgcggttttaccccggatcaactcggtggcgaggctggccacggcgatcgccgtctcgcagccgaagctctggaaactcgccttgtcgatgaccttttcgccatcctgctccttgtacttcacccacatgcggagcatctcgccacattcggagttgccgaccgtgccgacggaatcggcgtccggcatctcgccgatattctggggatcgcggatagcctcggccactttcttctgaagttcgtcgttcatttaactgagcgtgtagcggcgaatggaggggtcgatgtcgagtgaccagacatcgatgccaccccggagtgcgtggacgttcggcatgccgtgcccgagataataggcggcggcgtcaaggccctttttgccctgatgatcgatcatcacaaaccgttgatcgttgtcccaactgccgaggatttcctgcatcagcggctgggtaagcagcaccgagccgtcgatgtggatcgcctcaaattcctcgcgtgaacggatgtccacaaggcggatgtcctcgcccttggccaagcgcttggccaagtcggtcggctcgatcaggatgcgcgcatcctcctcgtggcttcgtttgatttgctcgaggacttcgtcaaccggtagttcgccgttgcgttcgcaaaccccggccaacgtttcgtccggctgaaacccacaactgctgcaccccccgatgtgatacttgcgaaacaacgcccgctgtgcccccggatatacctgcagcacctcccgcatcatcgattcgattgtgatggtgttcgattcgttcaaacgtcgtctggtgtgagtcctgttttacgggcgattcgagccatcattttcgggccgatctcatcgctgtcgtggaaggcgaacacataatctggccaaccttcccgcgccaaaactttatgggatgagccgctttggcgtttgatcttccgaccgatacgcagcaacgctgccaacacccgcttggcttttttggaaccccaaaggctcatgcgccaacggtgaatacttccgtcaactcaggaaccggttccccgtgctccagtcgatccgctaggacgcgcaacgccaaggccttggttctcgagatggcttctttgcgggagttcccgtaggccattaccccgggtagcaactcaatctcacccagccagcggccgtcattttcgcattctgtttcaacgacgtagttcattctgttggcaagctaatcccgatttccttcgttgtcgagcaaggttacgcgaacagttttcgcacgtcgtgcacgacctcgatgaagcggtcgacctcggcctcggtgttgtaaaaatagaaactcgcccgggcggtggccgggacgccgagcttggccaggagcggctggttgcaatggtgcccggcgcggagagcgacgcccttttggtcggccatcgtggcgaggtcgagcgcgtgggcgtccggcagcacgaagctcaccacaccggagcggccctcgcttggcccgaataggcggatgccgtcgatcccggacagtcgctcgaaggcccgcttggccaagcgctggtcgtgatcgaagatcgcctcgcggccgatggcgtccaggtagtccagcgccgcgtgcaggccaacggccccggcgacgttcggcgtgccagcctcgaacttgtgcggcacgacgttgaacgtcacgtcccggtactcgacctttgcgatcatctcgccaccgccctggtacggcggcatcgcctcgagcagttcgcgccggccgtacagcacgccgatgccggttggcccgcaggttttgtggccggaaaaggcgagaaaatcgcagccgatcgcctgcacgtcgaccggggcgtggccggcgctctgggcggcatccaccacggtgaccaccccggcggcacgggcgcgggcgcagatctcgctgattggattgaccgtgcccatggtgttggaaatatgcgtcagcgagagcagccgggcgcgggcgagctgctcgtcgagccactgcaggtcgagctgcccatcgtcgccggtgacttcaatgaagtccagttgcgccccgatgcgccgggccagcatctgccacggcacgaggttgctgtggtgctccatctcggtgaggaggatggtgtcgccttcgcgcaggttttgcagcgcccacgtgttggcgacgaggttcagcccctcggtggtgccccgggtgaaaatgatctcgtcgcgcgagccggcgttgaggtaatcggcgacccgctgccgggcaccctcgtacgcctcggtggcgcgattgctcaactcatggatgccgcggtggacgttggcgttgtcgtgctcgtaataacggcgtatggcgtcgatgacctggcgcggtttctggctgctggcggcgttgtcgaggtagaccagcgggtggccgttcactgtttcccgcaggatcgggaagtcgtctcgcttggccaagctgtcgatgaccgcaggggcactcatcacatcatgccgagttccagctttgccgcctcactcatcatggtctggctccagggcggatcccagacgagttgaacgtccacctcgttgacgccctcaatgcagagcagccggttctgtgcgtcctgttgcattaccggccccatgccgcaaccgggcgcggtgagcgtcatcttcacgtcgacccgccagccgtcgtcgatctggctcggtgtgctgtcgtatacaaggccaagatcgacgatgttcactgggatctccgggtcgtaaaccgtcttgagttgcgtctcgatctgctgctgcagttcgttggcggtttccgggcgcttggcctcctcggccggggtcttgactggctcgaggcccagcgcgtcggcgtcgcgaccctcgatgcgaaacatgtttccgttgacgatgacggtgaaggtgccgccgagtgtctgtgtgatctgcgccgtctcgcctttttgcagcgtcaccttgtcgcccgacgggacgatcgaggcttcgatgtcacggctgagcgcgatggggccgtcggggttcatttcaagcgttcagtgcgaccgtctcagcggcgagggcctggatgcggctcaccatcgagtgcagtccattgcggcgggtcgggctgaggtgtttgtcgaggccaagccgggcaaacgtcccggtgcagtcggtggccaagatctgctcggcggttctgccgctgtaaaccagcagcaacacggcgatcaaccccttgacaatgaaggcatccgcgtcggcgcgaatctcaaaggccggcggctcgccgttgcggggcagcatccgcagccagacggtcgcctggcagccgtgcacgcggttttcctcgaccatctccgactcgtcgagtggcggcagttttttgcccagctcgatgaggtaggcaaagcgctcctcccagtcgccgagaaactcgaagttcccggtcaactcgtcgatcgtcatgtccaaaaagtctgccacggttcagtccagttgatgctccgtctcgagccggttccacaccaacgcatcgagttcctcccgcacggcgtcgtgccggatgcgctcgacaatctcaccgacgaacccgtgcatcagcatccggcgtgccgtgcaggcatcgagcccgcgggcgcgcaggtaaaagatcgcgtcgtcatccatctcgccgatcgtcgcgccgtgggtgcacttcacgtcatcggcataaatctcgagctgcggcttggtgttggccgtggcgtcgtcgctgaggatcaggtttttgttggtctgcttggcgtccgttttttgggcgccgggccgcacgaggatgcgcccgtgaaagacgccgcgtgactggccgtccaggatgccgttgaaatattcgtggctgtcgcagtgcggcgcggcgtggtcgacgatcatgtgatgatcggccaactgctggccgcgcgtcatggtcagcccgttgagcacgcactcgatgcccggcccggccagccgcatgcgcaggttgttgcgcgacagccgcgagccaagcgcgattgagtggaacgcgtagcgtgcatcacgccccagctccgagtggagcgacgccagatgaaacgccctggccgattgatcctgaaacttgatgtgctccacgttggccccgtcgccgacgcgcgtctcggtgacgacgttggtcacggttgccgcttggccaagcgacaggtgcgactcgatgatcgtgccgtgcgaattggccccggcggtgatccagttgcggatatgcgccgcctcgccttccgcgttcgccgttgtgacgaagagcagctgaaccggcttggccaagcgctggccgtcaccgatttggatcaacgcaccgtcggtgaaaaaggcgtcgttgagcgcgacgaacgggttgtcatcaccgccggaaagcgagcccagttcgccttcaaaacgccccaggttggagactgtcacgccgcttggctggtcggcgatttgcgacaggtcggcgttgaaatggccatcgacaaagaccagccggtcggcgtccagccgcccgaatgtcaaactgtcaagttgttctggcccaggcgcttggccaagcggcgccgtgacggggcaaaacgggagttcggtgagcggtttgaggttggtgaatcgccaatcctcgtcgttcaacgacggataacccgactcggagaaccgggccaagccggctttgcgcagtggcatcagggccgcgccattctgctccatcgcggcaaacgcctccaccggagtggcggccggatctgtggcggcagcttggctcatgcggcttccttggccagccagtcgtagcctttctcctccagttcaatcgccagcgacttgtcgccggacttgatgatgcggccgtcgtgcagcacgtgcacgaagtccggcacgatgtagtcgagcagtcgctggtaatgcgtgatgacgacttgcgcgttgtcgcggcccctgagccggttgacgccgtcggcgacgatgcgcagcgcgtcgatgtcgaggccggagtcggtctcgtcgagcacggccagccgcgggttgagcatggccatctgcaaaatctcgtttcgcttcttttcgccgccggagaatccggcattgaccgggcgcttgaggaattcctcgctcaggccaagctccttcattttttccttcaccgccttgaggaaactcatcgcgtcgagttccgcctcgccgcggtgggtgcgaaccgcgttgacggccgagcgcaaaaagtaggcgctgttcacgccgggaatctccaccggatattggaatgcgatgaagaccccctcgcgggcgcgttcctccggcgcgaggtcgagcaggtcgctgccgttgtaaatcgcctcaccgccggtgacgtcgtagccgtcgcgaccggcaagcaccgaggcgagcgtgcttttgccgctgccgttcggtcccatgatggcgtgcacctcgccggcgttcaccgagaggtcaattcccttgaggatccgcttatcctcgatcccggcctgtagtttttttatctgtaacatctacttttcttccttcaaaatcatgggttcggtgccacgcttaacgtctgcataggagaccaccttgtggctggattccgcttcacgcttgcgcatcgcttttgccagcgcctccaaggaaccatgctccctcatcagttcttcgcgagtacgccgcacttcatcaacaatggggtcattcatttccagttctccaataaatccatcggggtgcaaatcaccggctccaccagcccgctctcccgcaatgcatcgttgatggcattgcgcatggaggcgttggccaaatgacggcaattccaagtaagcagataatccatcttgtggaccgccgccaatgcgaggtgcatagcatctgcttgggccttctctgggataggcccactctgaaccaatctatgagcgatttccgtcacgatatccttcgtggccagcactgtgaacgaacgcaaagcatccgttcgtttggcggcagccaaggcatctcaagcggtggcctcttcactaaccagttccgagataaaaacctcaaattcatttattcgctcctcccaccattcgtttgtcatttgctgccgcgcagccagaatcacatcgctgctcggctgtgcggtgagggaactcaacaccgttgtctccagatacaacttcggcttgttcgccatggtaagtcatcatcagccgacgctgccctcgaggctgacgtcgaggagcttttgggcctccacggcgaactccatcgggagttcgcgaaagacctccttgcagaatccgttaacgatcatgttgacggcgtcttgcgtctcgaggccgcgctggttgcagtaaaaaatctgatcctcgccgatcttcgaggtggtcgcctcgtgctcgatgttggcagaagggtttttcgcctcaatgtaggggaaggtgtgcgcgccgcaccggtcaccgatgagcagcgagtcgcattgcgaaaagttgcgggcgttcgtcgcttttttgcccacctgcaccaggccacgataactgttctgtcccttgccggcggagatgccctttgaaatgatcgtgctgcgggtgtttttgccgagatgcaccatcttcgtgccggtgtcggcctgctgcctgttgttggtcagcgcgacggaataaaattcaccgattgaattgtcgccctgcaaaatcacgctgggatatttccaggtgatcgccgagccggtctcgacctgcgtccacgaaatcttggcgttggttttgcaaatgccgcgcttggtcacgaagttgtaaatgccgccgcgcccttcctcgtcgccggggtaccagttttgcacggttgaatacttgatctcggcgttgtcgagcgcgaccaattccacgacggcggcgtgcaactggttctcgtcccgcatcggcgccgtgcacccctcgaggtagctcacgtggctgccctcctcggcgacgatcagggtccgctcaaactgccccgtgttggcggcgttgatccggaagtaggtactcaactccattgggcagcgcgtgcccttggggatgtaaacaaacgacccgtcgctgaagacggcggagttgagcgtggcgtaaaagttgtccgtatacggcacgacggtgcccagatatttgcggacaagttccgggtgttcctgcaccgcctcggagatggagcagaagattacccccgccttggccaagtccgccttgaacgtggtgccaatcgactcgctgtcaaacaccgcgtcgaccgcgaccccggccagccgcgcccgctcgtgcagcggcacgccgagtttctcgtacgtctcgagaagcttgggatcgacctcgtcgagactcttcgggccgtcgccttttttcttcggggcgctgtaataggagatgtcctgaaaatcgaccggcggatagttcacgtgcggccaggtcgggcacttcagtttttcaaaatggcgaagagccttcagcctccagtcgagcagccactccggctcgttctttttggcggagatgaaccgtactgcctcctcgccgaggcccggcgggagcgactcactctcaatgtccgtgacaaagccgtacttgtagtcgctggcgacaaattgatcaatcgtgtccgtttgggcgctcatgtgttggcctccatgcggccgcagtcctcgcatataccggtgcagcggccgtgcagggcaatgtcgattttcctcacctgaaactcgcttgggacgtccacctccggcaccctcggcgagtctttcaggtcgacgtcgaacaccttgccacagtcgtcgcagcagaagtgcgcgtgctcgttcatgtttgagcaaaacagcgtcgcgccacggtccacgttcacctgtcgcacgacgccgcacttcacgagcgcatcgagacagttgtacactgtggccatggagatttccggtttcgactgcttggcccgcatgaacacctcctcggcggagggatgatcgcgctggccaagcagcacctcgaaaacgtgctgccgctgggaagtggatcgaagccccttctcggctaaacgttcgttgagggattcaccggacgcaggaagatggtccgttgccatgcccaaaaaactgccattggccaagcgctgtgtcaatacttggaataattctaaattgcaaaacccccgcttggccaagcggggcttggtttttttaccaaaaacatttggcaaaatgatacttgcatacgtatagccgatggctatacttccgaaatgaagaccacattgcaaaagtgggggaacagccaaggcgtccgaattccgaagtcaatcatcgacacgctggggatcgacgtcggctgcgaagtgaaactggaactctctggcgatcaatccaaaatcaccatctcgccgacggttgacgccaggccggtccgcggtcggcatcgaatcgagaatctcctcgaatcgagcccgaccgatgcgttcaagggcgaagttgattggggcaaaccggagggtcaggaggcttggtgatggattcacacgtcccggcgcagggagaattcgtggcattgacctttgatccgcaggccggccacgagcagatgggtcgtcgccccgccttggtcatcagcgttgatgcgttcaaccggggaaccggcctcgccttctgctgcccgatcacaaacaccgatcggaagacaccgttccacgtgccggtgccgcccggcttggggctgagcggattcgtgatgtgcgagcaaatgaagtccgtcgattaccgcgcccggaaagccaagccgatcgccgccgccccgcccgatttcctcgaagaagtcctttccgtaatcgacgcctgcatctataatccatctcgctaatcaacccctaaaacggaagaaatatgaaaataacatacaaggacttcgtaaaaggcttggttttcggattcgacatgggcaccgcttccattggctgggcagtgcgccatggtgatcgttttctggatgtgggcgtcctaatctgccctgaaagcacggaagaccttaaagaacgaaactcacttcgtcgccaacggcgcacggttggcaatcggcgttatcgccgccgctggctcaaggcagagttagaaaaactagggttgccttgcccgcagattgcgataccagagcatccggccacgttgcgttgccgtgccttgaatggtgagccgctagctcccaaggaattgcacgctgccattagccatttgtggaaacgccgtggatacacggatgtgccttgggcggataatccggaccgggaagaagacaaggaggcaaaaaaggagaaaggtgtggtgaaacaagccatgggccatcttcggcaggaaatggatgacaacgattgccagcacccctgccaactcttggagcgccgccgagaaaagggccaccgattgcgcaaggaatactggccgcgcgaattgctcatcgaagaacatcgcgctatctgtgaggcgcagaaacaccatcagccggaactgcatgctaaaatggaatggctgctcttcggcgaccttaccaaagtggtggatggttttcgggtttatgattcactggccgaagggcgaaatcccggtgtggtgggattgcgttggccgcgcttcgaaaatcgtggcccagcgctggatgcgttggcacctttggatgagaccggtcggccgcgccatgtcgtccgcaaaaacaaacccgcctatctcgaggcgcaatgggaattggcgctcatgaattttcgtgtggtggatgtccgcacccgtagcaaggtggatccacttcaggcttatccgaagtttatcgaggcattgcgggaggagtgggataaaaaaggcaaaatcactctagctcggctaaagcgattagcggccccatttgaatctgaatttgttttgaatgaggatcaaactcctttgaccccacaactctccacggggcgcgcccgctacgcctcccccaccttgaaacagatccaagccgccatagccaaaggggatcgagtggatccaccacaacccgtgctccgtcgcgaaggggagtcccgaatcaaagcgttgcaccgttatcttcgtgaaatccgccatcctttggttcggcaccggctgattctattccaacaactgttagaaaaactggaaaaagaatttggcatcccggacttggttgttatggaagctgttcgcagccttgccttgagcccgaagaaaaaacgcgaactcagcaaacgcaacgaagagcaccgaaagaatcgcgagcaggcgcatgaggcgctgaaaaatgaaaaacattccacttcaggaaaatccatccaacgctatcgattgtggaaagaggtcaaaggcatctgccctttctgccacgaaaccattgaccaagccgacctattcaacggcaatgcggatattgagcacatggttccgcgccatcgcgtggacagtagcgaatggattaacctcacagttggccatctcaagtgcaatcgaacgatcaaaggagaacgtacgcctttcgaagctttcggtcgtgcctcaaactggccggaactgaaagatcatgcagaacaatgttttcggggacgcaaattggaaatctttctcagtccggatgctgaatcgttattggaaagcaaggcggacctgcaacacactgcctacatcgcccgcgtgtcccgccatattgcactgctgcaatacaactggctgggcaacgacggacgcgaccccactcccgaaaaacaaaatcctgccctcagtttccaagtcaccaatggccatctcaccagccgattgcgtcgcgcgtgggggctcaaccaaatccttcaccccatgattgacggccgtcgttgggaggatttatccgaggaggaacaggaacaattcaaacagaaaaaccgcggcgaccaccgacaccatgcactggacgccatggtcatcgcctgcaccctaccgtggatggctcatcgaggcgcccaagcccgggattctcacaccggcgaagatggctggtggcatcttgacgaagccacccagcggatcaaggccatcaaccccgtgtttcccaaggaaggcgaaatgcgccgcgtagccgtggtccagatggaaaaactcgtggtccagcaccacacctctcgtagcaaccacaagcaagcctactacaccaccctctacggcaaaaaaggcgccaacacctacgtcgcccgcgaaccccttggcaaacgcatgcccaaaaatctgaacaacatttacccgaccgaactggctgagtattgccaagccgcatggatgcgctacgaggatgaatcccccgacctcgccgccgagttaaaacaagccaaacgcgaactgcgcggcctgcctgccgcctttgaggccaaactctgcttctcccacttccagcgctggcgcgaacaagtcaaaaaaggtgaggcccactttgattggcccgaaaaaatcaaaacccccattcgcaacatcaaggtcatcggcgtccacgacgacaccgccgtggcccccgctgcccctggaactcatgccttcgttaagcgcggcgcattcaaggaagtgcgcgtttttcctagccaagatggcaagcgatgggtgcctgtgttcgtccccttcggcaaacacgaccaacccatcgccgccgaggaatgggatggcaccgccaatcctgtcaaaatcatccgcaagggagacaccattaacctcaaaaacggcagcggccccagcaacccaccggggctttatcgcgttgcatccactatgcaaaataacatcaagttgctccccatcaatatcgcaaatataaaagaagctctgttggcctctggattcttggcgaatggagcaaatatcatttggcctacttttttcacagccatggctcatgagttaccacatcctccatctgctgagcccccagcttcaggttcggattgagctggaccagctaaaaatcaaggaccgcgactccggcgaggaacgctctgtaccgttggctgacgtggccgtcattgttgcggccgcgccggatacgcgcgtgaccaccgctgccctacgccgcatggccgagctcaatgtgctgctgctggtttgcaaccaaaaattcgagcccgcgtgcgtcaccctgccctattaccgccccaccaataccgacctgctgcgccgacaggtcaagtggacgcagaaatggaaaaccgcccaatggcgcaaagttatcgccgccaaggtggccaaccaagccgccttgctgcaacaccccaagcgcgtccaacggttgctgctccaaattgccaaccactgcgccgacccgccgcccacggcacccccggcggatttgtcccgcatcaccgagacccaacgcgatgcccaccgctcgtggacccctgacgcctgcgaatcccgcgccgcgcgccattactggaaacattacttcgccgccctcaacactggcgaacaacggcgtatcccccgcactcgtgagggtgtcaacggcctgctcgactacggctacgccatcctccgcaccgccgtgctgcgcagcctcgctgcccacggcttcatcgccgccctcggcattgcccacgtccccaaagccggcagcttcgccctcgccgatgaccttatggaacccctgcgtccttggattgatcgccaactgattcaatacctgcaaaccaccgatgaaccagacatcaaggagtggatgccccaagccgtgcaaattctcacccaagaggtgctcatgggaggctcacgcattcgactgctcaatgccatcgacatttacgtgcggagctttgccagcactgccacggaaaaaaaatctcctcctctcaatattcccctgctcgaccagcctgccaccaatcatgaaccggtcacgcaatccggcttgtagccaatttcgcatggcttgggtactcgtcttattcgatctgccggtgcaaacccgcgaacagaagaaatacgccgccaagttccggaaggacctcattcacgacggctacttcatggtgcaatacagtgtctacgcccggccctgcggcagtgccgaccgggtagacacccaggtgcgccgcatcaagtctcatatccctcccggtggtgaagtgcgaagcatggtcataaccgatgcccaatgggggcgcatgaaaatctaccgcaacaacgcccctgcaaatccggaagacatgcctgagcaattgcttttcttttgatagagacaaaaaaggcacccaccgaagtgggtgccaaatgacctcgtccgcttccctgaggaagctcacccgtgggtgacaacgcagtgccacgggctggtcaacatatttgagatggtgccccccgttcaaggatcgccaagtcaaaaaaccactctaaacactccctcctagccgtcaaccaagtttagcgacccttgaacggggggcaatcccaaactggacatctccccaccatatgtcgtcgcgaagtttagcgacccttgaacggggggcaatcccaaacctggcaggctggcctacgcgcgtgttgactcataaaaaaggacaccgaagggttggaaagggttgagaggagagt

SEQ ID NO: 3938 - DNA, 7926 bp, synthetic construct
  misc_feature 1..7926: note = Synthetic
  source 1..7926: mol_type = other DNA
gcgtgaagggttgctcgtcgatgaggccgaccttgatcgattcctggtaggccttgcagaccttggtgaggagcgagccgctggccatcggcaccacggtgtggcgcggggtcttccagccgagttgctcgacgatttcgaagcccatgctcttggagccctctgcgtagtaggggcggaggttgacgttgacgaagccccagccgtatttgccggcgatctcggagcagaggcggttgacctggtcgtacgcgccgtggatgccgatgacctgcgtgccgtagacgaggctgttgaggactttgctttgctcaagatcggcggggatgaggacgtagcttttgaggccggccccggcggcgtgggcggcgacgctgttggcgaggttgccggtggaggcgcaggcgacgaccttgaagccgagttccttggcgcgggtgagcgcgacggagacgacgcggtccttaaaggaaagggtggggtgattgaaggcgtcgttcttgatgtagagttccttgacgccgagggcgcgggcgaggcggttggctttaaccaggggggtgaagccggtttcgaggccgacggtgggctcgccatcgatggggaggagttcccggtagcgccacatgttgtgcttgcgcgattcgatgaccgcgcgggagatggaatgcttgatctcctcgtagttgtaatcggcttcgaggggaccgaaatcgaattcgcagacgtggacggcttcctttttgtagaggcgcccgcactcgcgacacttgagattgctgaaaaattccttgcccataattcctgacccttatcgaggatcgacctcttacgattgggacgaggggggctagcgccttgaagacgagaaggcactcgctccttatcctccccggcattatccgcatcaggcggaccgcaccgagctgggtttggcacctggacgatgaatcggtttccacaaggggatcgacgcacccggttgccgcggtttcatagggccagcccctccaccgctctcgataagttacgtggaatgtaggggatgggagtgggaatgtcaagtggggagggtggagaggaaacgagcaaaaaatttgaaaattgatctctgctgtatcgactatgccttaagggttgaatgcttttttcgagtttcaagaaaataggccgctatttggttaaaaaaaccaagaacggacattattcctgagagcaaatttaggtagaaggttagtctggccgattgatggagagaaatttctaatttagaaacttcttgattgtgtgcgtctattacgttgtccatcacggcgcttacatcctggccattaaagttaattctcctttgcacagagtcatccaaagatgcggtcgcttgaagtgagctgatcgacatggtctcgtaagaatcagatgcggcaaaaaagaatgcgaaggcggccacaatccaaattagagcaaatacaaaatgaatgtgatgtacgctgggcatctcgagatttttgacttttaaactaatagtgcaatcacttcctacaagctcataacctgattggaatgtccctttggggcgtttttaccttcggtttaattaggagctccgtcatcttgagaggagcgcagcggagtcgaaagatcagctcccgttgagttgcgaaaatcctttgggggctgatccttcgacaagggattaatagccgccatctcctttcataagtttatgaaggataacatcttattacatatcaagcaagtccttttcggtaattttttgcaaagaaaagtaccttcttgctatgcgtgccgaaggcaggttgttatgcggcttccacgcttccgttagcttacttaagtcgagggtcttgaccacgctggcgggcaagaatctcctcccggtgtttcacgatttctgtttcgaggtcctggtcaaacatcggaggcggaagcttgatttgcgtgggcgcgatatgcggctggccaacgacggtaaggatatgattggtcaatggcgcaatttcgcctcggtaggcctgcgccaatttttgtttgtaatcgtcgggacgctgcgggaggagttggccaatttgaaagatggccttgatctgtgattggaggagcacggctaatgtgcgcgtattgccatccagaaacggatgcaccgggcggtaacgggcgtgatagcaggcgatggcaaccgcctgttcctggggagtgtgagcctgcgttagggcctgagcggtttcctcttgaatgcgctgcaagtctggtgtgacccggtgggcgtcggtgccgagaacgccttggtcaaaacgaacggtttgccccaactgccgaaaggttccggcccagggatggactccgtcaaaaatgattttatggatcgctgccactcgggctggcgtaggcgcaatctgcggatcggccatcgaagcatcaaaggcgcgttgcaactggatcaatgtcttggcctcgtattcggcaaagttcttgatctcagggcatagaccggcatcgacgatgcgttgccactggcggtcttgattaggctggagaatcacggagaaaaggttatattagcgaagccatgttgaccaagccgcaaaccaaggaattcgattatcgcgtcgaaaagctaagggaactttcggcgatggggggctttcctgtcacgcgggaagcggccgagcaggccgtgaagaaagcagatgaagctcctctgcccgatctcgcagcgctcacaaaagaagccgagcaacgaattgcagcgggcacgtatcgcatcgcgcgctaatggcataaggtagccgagggcaacccggacgacacgccgcacgcagacggcgaccaacggaagccgcacttctccgcgttttgagcccggcccccttctccttctgggccgggatcgaaacgcggcacgccaaccgcagtaaaaagcaggcgacgtgacgcgagcacgcggcgcggcgactgctcggcctccacggtcaccacaagggccgggtaaaacattttccaccgaagaaaacaaacgtccgttgcttgcggcacgtttccttacaggcaagcgggaaagtttgcccaacccaaaaactggtagcgggggagaccgcaaaagcttgcgaggcattacctaccaagagtatggatagataaacaaataggctgaccttgaaataccttgaatcaaattatcagcagttcctcaacgggacggcctttggtattgatctgggaaccgcttccatcggatacgccgttcgtaaaaagcgcgattttccacaagtaggctcgttactttgttcggaagctattaacgacctagccaaacggcgggagctccgtcgtcagcggcgcacgttgcgtaaccgcacctatcgacgaaagtggtttgcgcgtgagttgagtcaacttttgggcttaatacagcccacaaatttaccagacgatcctatttcgctccgctgccgtgctgtgcagggagatgaaatgacttcgctcgaactttttaccgggttagtccacctcttcaagagacgaggctatgcaaaagttccctgggcaagtggtgaaactcgaaagactgatccagataagaaaaaggaagaaggatttattcaaagcgccatctccgaactcgaacgggaaatggattcgacgcgctgcacttatccctgtcagcttctttcccatcgcagggaggaaaaaggaacgagcccgcaagaccattgggctcgcaaaatttattggccgcgcgatctgctcgaaaaagaatttcgcgccattatcgaagctcaaaagtcacgctatcctcagctctgcgaaaaggctgactggctgttgtttggaaataccgaagaacgccgtggcttccatgtttatttcaagtcaacggaggggcgtaatcccggcattcttggattacgctggccacgtttcgacaatcgttcgcctggcctggatgcgcttcggcctgtcgatgacctgggccggcccttgcatgtggtacgccggaataaaaaggccttcttggatgcgcagtggcaggttgccttgcaaaatttccgcgttattgaaattgccacgggtgcaaagcttcgtcccgattccataagtctggcacggttgaaacagctttatgatctaaagaaaaaatcggcctcgataaaaattccggtcaaattattggaaacttgggaaaaagaacatgcgaccaagtataagcttatcgaggggcaaacggatctaacacccggcggttcgggcggtcgtgcccgcttcagcacaccaacgcttctgactcttggacaggatgacactcctgccaatgcccaacccattctccgtcgatcgggtgaatcaaaggaagctgcacttgatcggtatcttcgcgaaattcgccatccgttagtacgtcatcgattgattttatttcgccagctattggccaagttggtcaaggatcatggtgaaccggatttcatgatcgttgaagcagcgcgaagtttagccgacagcaaggagcaacgattggccagagtgaaacggaatcgcgagtttcaacaagatcgcgaagacgcagtcgataagctgactcatttcgatcactctacctcccgcaaggcgatcttaagatacaggctatggaaagagattggatcaacgtgtcccttttgcctcgaaaagaatatcgaggtttccaatctttttagtacagcggacatcgaacatctggtgccgcagtcgcgggtggactgcaatgagttttataatctcacaatcgcacacgccaaatgtaaccgggaactgaaaggcaataggacgccttacgaagcttttcatgacaagccgaattggcctgcaattcaggaaaacgcacgacagtgttttaagggcaaaaagcttgaacttttcctaagtcccgaagctgaaaccaaaatcgaggaaaaatcggatttacagcatactgcctacatcgccagggcagcccggcatgtggcccttattcagttgggttggctgggcgaggatgggcgcgaccccacgccggaaaagcaaaatcccgccctgcgctttcaagtaaccaccggccaattgacgcatcggttacgccaggcttgggggctaaatcagattcttcatcccttacctgcacgcgaggcctgggacgccatgacgccagaacagcagcaggaggagaaagacaaagctgcacaaaaaaatcgtggcgatttgcgacatcatgctttggatgctgcggtcattgcttccactctcccctggctggcgcataggactcacggcgctgtggatgaaaatggcaatcatggttggtggacccaggacgaaaaaatgcgctcgaaagccgttaatcccgtgggtctggattttcttacagttaagcggctcatggaagctgctgatattaaacaacacgtttcccgcagtccccatcaacaagcttataacaccaccctttacgcaaagaaggggcaggattgctatgcggcacgggaggtcttcacttctttaacaccgaaaaatctggaggacatctatcctgaaacattcagggaatactgccgtgcggcttggaatcgttacaaggaagaggcggtcgatttggacaaagagttaaaagcgtcaaaaaaatgtctgccctccgctttcaccgcaaagctttgtttttcccatttccaaaaatggagagctaatgacgctccggaattcagttggcctcgggaaatcaaaatccccattcgtaatgtgcgcttaatcagcgttaaagacaatagggctgtcatgcgcgcaagcctcggaactcatggttacgtcaagcgcaccagttttaaggaggttcgcattcatctttcggctgacggcaaggcacttgtgcctgtttttgtcccgttctggagaaaggatcagcccttctctgattatgaaggcgatttgaacccaactccattacgagtggttcgccggggtatgatcgtgcagaccattaagccgttttccaatggccagcccgctggcaaatatcgcattctcgttaccggacaggtccaacttagattggttccgcatcacttggcagatacggaagaggcctgtttagcaattggtcttccgaaaaaagggttgcagccctattggcccgattttatccgcgcacttggctatgagcttccacatcctacatctgctcagccccaatcttcggattcgggtcaagcttgaccagcttcagattgaagattcggaatcggggcagacgcgctccgttccgttggaagatattgccgtcattatttctgccgcccccgattttatcatcaccgcaggagcactccggcgcatggcggaaatgaatgttctcctgatgatttgtaatcaaaaatttgaaccggtatccctaacgcttccccatttttgtgccacgagcaccgaggtactacgtcgccaagtagagtggacttcgatctggaagcaggctctttggcaacaggtcatcacggcaaaaattcgcaatcaagcggaggtgctcaagggaattccacgatcctatgaattattgaaatccattgccgataattgtcttatcccgcctcgatcaagcccatcctcggggcaaaataccgcgcaggttacggcttcaaagcgcgatttagtgcgtcagtggcatccggctgcctgcgaatcccgcgcagctcgtctttactggcacaagcttctgccccagctaagtcccgacgctgtgcgccgagagccgggcacccgggcaggtgtcaatggcatgttggattacgggtacgccgttctccgaaccgctgtccttcgcagccttgcggctcacggttttatcgcggctctcggtattcatcacaaggctaaggcaggaagttttgccttggccgatgatctcatggaaccattgcgcccatttatagatggccgtttgcggaaataccttaatgacggcggggcggtgggtgatatgaaaaaatgggcaccccacgccgctggaattttgatcgaagacgttcctatgcccaaaggcaagatgaggctcttgaacgccatcgacgattatatccaaagctttcaacataccagcaattcgggaatctctaaacctcttcaatttcccatgctctcagtttcgtgaagaaagctcgttcatccatttgcagtaaatatcgcatggcctgggtactcgttttttttgatttgcccgtaggcactgacgaagagcgtcgggatgccaatcatttccgaaaggaccttctcaaggatggttatttgatggtgcagttcagcgtttatgcccgcccctgtggcagcgccgaccgcgttgatacgcaagttcgtcggctcaaaagtaagattccacccaaaggcgaggtccgtgcgcttacggtttcggatgctcaatggggacgcatgataatcatgcggagccaaaaaatcagcgcgtccgaagtcatgccggaacaaatgctttttttttaaaaagaacggcggccgcctgctttcgcagacagccgccgaaacttttaatgacctcgtaacctcagggtgacaacgcagtgcctgaggctggtcaacatatttgagatggtgccccccgtctaagagaaaccgaactctgcactatcctatcgctacccaaacccgcgtcaacctagtttggcgtcccttagacggggggcaatcccaaaccagttaccacgattcggggaacgtattactagtttggcgtcccttagacggggggcaatcccaaactcgacggtgtgctttggcttgccgacaagtagtttggcgtcccttagacggggggcaatcccaaacaggcagcgtcgtggggcatcgcagtgtcccagtttggcgtcccttagacggggggcaatcccaagatcg

SEQ ID NO: 3939 - DNA, 7871 bp, synthetic construct
  misc_feature 1..7871: note = Synthetic
  variation 6488..6686: note = note, n is a, c, g, or t
  source 1..7871: mol_type = other DNA
  variation 7465..7596: note = note, n is a, c, g, or t
cttcccgcatgaacttcttcaccgaactgcgcgaaggtttgagcatctcatggagcgccatccgcgcgaacaagctgcgttcggtgctgaccacgctgggcatcgtcatcggcatcgtcacggtcacgctcatgggcacggccatccaaggcattaaccgcgcgtttgtggaaagcatttcctccttcggcacggatgtgctgttcgtggagcgcaacagttggttcatcatgtcggagaagcaatggctcgaggaaagaaaacgtccccagattaccctcgccgacgccgaggaactggaaaaaaagatgcggctggcccaggcggtcgcgcccatcgcgcagacgaccgagccggtgaaatacggacgccgcagcgccagcaatgtttccatcctcggcacgaccgaccagtatcagttcaccagcggcttgaacctcacggacggacgatttatctcgcaggccgagtgcgacggcggacggcccgtgtgcgtcatcggctacgaggtggccaccaatctttttctaaacgggcagcccgtcggccaggatgtttttatcaaccagcgcgcgtttgcagtggtcggcgttctcgccaaacatggcggctttgccggcgacagcggagcggacaatcaaatcatcgtgccgcttgcggagttcacctatgcgttccggcaaaatcccgactactccatccaggtcaaagtgcaagacctcggccagctcgacgatgcgaatgaagagttgcgcgccgtgctccggcgcttccgccacctgccgccgggcgagccggataatttttccgtcggccagcaggaacagtttctggaaatgtttcacaaggtggccggcaccatcgcggcgatcggcctgttcatcacggggctgtcgctgtttgtcggcggcatcggcatcatgaacatcatgttcgtctccgtcgcggaacggacgcgcgaaatcggcgtgcgcaaggccatcggcgcgaaacggcggaccatcctgctgcaatttctcatcgaggcggcgtgcatctgcctcatcggcggcgtcatcgccctgctcatcgcgtggccggtgacgtggttgatgcaaaaggcgatgcccgcagaactgtcgcccaccgtcatcggcctcgcgctgctggtggcggtgctgaccgggctgctctccggttttttccccgcctggcgcgcggcgcgcatgaaccccgtggatgcgctgcgaaatgaatgatgccctgaacaactggatgaatggattgctggattattggattattggatggtttgcgcgcgagtccgcaccaatctattcatccattcatccaataatccagcaatccattgccccaccccaatgaaacgccaccgcagctccatcttcgccgaggcccgcgagagcttctcgatggccatcggcgccatcgcggcgcacaagttgcgctcggcgctgacgctgctcggcgtcctcgtgggcgtgttttccatcatcgtcgtgatgacggcgatgcgcgtgatgcagagcgacatcgaaagcaagttgagttcgctcggcagccagaccttcatggtgcgcaagtggccggggctgtttttcggcgggaacagcggcgactgggaaaaatactggcgtcgcaaagacatcacgctggcgcagggaaaacaattgcaggaacgcgcgacactgccgctgaacatcgggctggaatccatgttctggtcgggcgaaatcaagacgcgctacaaaaccagcgcgccaacggtgcggctttacggtgaaacgcccggcagttttcccgcgcacaactggaacctcgccgagggacgtttgtttttcgacgccgatgtggacaacgcccgcgctgtttgtgtgctgggcagcggcctggcgacgaatatttttccgaacagttcggcggtgggcgagcaggtgaaagttgacggcatcaattacaccgtcagcggcgtgctggaatccaaaggcagcgcgctcggcggcgatcaggataattttgcggtcgtgccgctcaagacgggcttgaaccgttacggccactggggccgcagcttgaacctcctcgtgcaggcgcgcgaccgggcgagttatgccgcgacactcgaagaagtgcgcggcgtgatgcgcgtcatccgcaaagtgccgccgggcaaggaagatgattttgaaatttcctcgaacgattcgatgattgaacaatttaattctttcacgcgcacggtgcgcatcggtatggcggtggtcagttccatcgcgctgctcgcggccggcatcggcatcatgaacatcatgctggtttccgtcacggaacggacgcgcgaaatcggcatccgccgcgccattggcgcgaagaagcggaacatcatggtgcaattcatcatggaagcggtggtgctgtgcgaagtcggtggcgcagtcggcgtggtgttcggaatcctcggcggcaatgtgctggcgctggttttgaaattgccgccggtcgttcccgttgactgggtcgtcatgggactggcaatctgttccgtcgtgggaattattttcggaacctaccccgcgtggaaggcggcgaacctcgacccgattgaatcgctgcgttacgagtgaaccttccggcggataacccgcttggggctgttccaaacgcggaaaatccatggcttaaatctgtaggagacgacgtgaggagtctcaaattttttcggactttatttagaaacccgacggacagcgacctgaccctcaccggcctgccgcacgcggccacggtgaaaatctgcgtcagttccgtcaacgccgccggtgaaagccagcgcagcgacgccgcgcaaatcgtcgtgccgtaaaaaacccgaaacatcacgggcgcgtccgcaagggcacgccctttttgttttcaaaggcttgccgccgccgggatgcgggcgtagcatcgccccacaatctgccatcaggaaaaatggatatgaaaacttacattctaaaagatgccaaccagtcccctgccagcaaggattccttcctcaccggcctcgtctttggcttcgatgtcggcaccggctccattggctatgccgtgcgccaaggcagcgagttcaaatatgtcggtgtgctgatttgcgacagcgaaggcagcgacttgagcaaacgccgcgacctgcgccgtcaacgccgcacgcttcgtagtaaaaaattccggcggcaatggtttgccaaagaattgatcaaactcggtctgccaaaatctgaaacggcgctggacgatccaatctcgctccgtctccgtgcgctcaatggcgaagttttgaagccggaagaacttcacgccgcgctaacgcatcttttcaagcggcgcggttacagcaaagtgccgtgggcaaatgctgagaaggcggcgaaggaaaccgccaagccaaagaaggacgatgacgaaggcataatcaaagaagccgtcaaagagatgaaagtgaaactcggcgataaacatccctgccagtttcttgccgaagaaaaaatcagggttggcaatagtccaacaactaattgggcgcgcaaaatttactggccgcgcgaagtattgcgggatgaatttctcgccatcgttgccgcccaagataaaaacttcccgcaactggcagagaaaaccgactggttgctttacggagattcgcagtcgaaggaaaagaacggagaaactttccatgtctttttcaaagcgaccgaggcgcgcaatcccggcgtgcttggtttgcgctggccgcgttttgacaatcgcggcccggccttggattctttgcagccggtggacacgcaaggtcgcccgctgcatgtcgtccgcaaaaacaaggaagcctttgggctggcacagtgggaattggccttgatgaatttccgcgtgctggatttcaagacgcggcagaagcgcgatccgcgaactgactttcccatcttcatcgaaaatcttcgcaacgaatggaataagaaaggcaaggtcacggaagcaaggctcaaaaagttggccgagccgttcaaagaaaagtttttgctaattgaagaccagaagccactcgcgccggaaactggcgctggtcgggcgcggtattcttcacctacgttggaactcatccgcaaagaaatcggcgaaggtcgcagagttgacccgccacagccgattttgcggcgcaaaggtgaaaatgccgaacaagctctgaaccgttatctggcggacatcaaacatccagttgtgcgacatcgcttggctttgttccgtgggattttgacgcaattagttaaggactacggccagccgaacatgattgttctcgaagctgtgcgcagtcttgccctcggccagaaggcgaagaatgaattgaataagcgcaacgaacaatttcgcaaggaacgggaaaacgcgcgtgaaaatctttcttcaaacaacgaatccttttcgcgcaaagccatccaacgctaccggctctggcaggaagccaaaggccgctgcccgttctgcttgcaaaccatcgagcgcacggatttgggtcacggcgcagatattgagcatttagttccgcgttcgattgtggattgcaacgaattttacaaccttaccgtcgcccacattaaatgtaatcgtgaattaaaaggcgaccggactccactgacggcttttggcggcacgtcgcaatgggaaggaatcaaagccaatgcggaaacctgttttaccgggcgcaaactggaaatctttttaagcccagaggccgagcaattgattgagcagaaatccgacctgcagcacacggcttatatcgcgcgggtcattcgccacatatctttggtgcaacttggctggctgaatgacgaaggccgcgacccgacgccagaaaagcaaaaccccgcgttgagctttcaagtcaccaacggccaactcacgagccgcctacgcaaagcgtggggcttgaaccagattttacatccgctcccgccgggcaaacggtgggatgaattgaccgacgaggaacagaaacaatttactgaaaaaaatcgcggcgacctgcgccatcactcactcgacgcaatggtgatttgttgcacgctcccgtggttggcacaccgcacacatggcgcgacggatcaattcggacatcatggctggtggacgcaagacgagaagcaaaggagcaaagccgccaatccgctttttccgaacgaaggccagatgcacgaggtggtgcaaaaggaaattgaaaaggtcgtcgtgcggcatcacgtctcgcggagcaatcatcagcaggcttacgcgacgacgctttacgccaagaaagccaaagacacctacgttgcgcgcgaagttttcacatcacttacgccaaaaaatctcggccacatttggccggagcggttggctgattattgtgtcgctgcgtggaaacgctacgccgatgaatcgccggacattgaaggcgaattgaagcggacaaaaaactgtgtgccggaaagcttcacgcgtaaactctgcttctcccatttccaaaaatggcggcaagatgattgtccggagttttactggccgaaagaaatcaaaattcccatccgcaatgtccggctgatttccgtgaaagacgatacagcggttgttccgttcagccccggcactcatgcgtatgtcaaacgaactggcttcaaagaagtgcaggtctttttggcggaagatgaaaagtcattcgtgccggtatttattcctcactggaagggagacaaactggtttgcgaaaaaccgatcaaacagaacacaaagcccgttgtagtcatcaggcgtggaatggttgtggaagccaaaaaagctttttctgcaggtcagccgccggggaaatatcgcgtgttggtaacagggcaaatgcagataaaattattaccccatcacgtcgccaataaagaagatgccattgtatcatttggctttgggaaaaaagggttgcaacccatgtgggcagatttcatgcgagttctcggttatgagctaccacatcctccatctgttaagccacaatcttaaagtccgcatcaagcttgaccagcttcacatcacggacttggatagcggcaccgataaatctgtgccgctcgcggatgttgcggtcattgtctgcgcggcgcgggacacggaattttccagcagttcgctccggcgcatggcggagttgaatgtcctgctgctcatctgcaatgagaagtttgagccgtgcgccatcaccctgccctattatcgcgccacgaacacggaattgctccgccgccagattgaatggacgccggaatggaaaaccgccatgtggcggcagatcatcaccgccaaagtccgcaaccaggccgccaatctcgcgcacttgaaacgggcgcatacattattaaccaccatcgcggagcgatgtgaacaggggagcacacgcgcctcgcgtgtcctgtttgacgccnnnnnnnnnnnnnnnnnnnnnnnnnnnnnnnnnnnnnnnnnnnnnnnnnnnnnnnnnnnnnnnnnnnnnnnnnnnnnnnnnnnnnnnnnnnnnnnnnnnnnnnnnnnnnnnnnnnnnnnnnnnnnnnnnnnnnnnnnnnnnnnnnnnnnnnnnnnnnnnnnnnnnnnnnnnnnnnnnnnnnnnnnnnnnnnnnnnnnnngagcacacgcgcctcgcgtgtccccgacgacgccccgtcgtcggaatcccccgtcccgaatgttgtccgcgagggcgcagacaacgacgcgcgaggcgcgcgtgctccccagaaaatttctctcgccaccctcacggcttccaagcgcgccgcgtttctttctgattcaccggaggcttccgaatcccgtgcggcgcggcattattggaaacatcttttaccgcgtttgagtgaatggcagcagacggaagaaaaaaatcgcgttcccggcacgcgcgaaggcgtgaatggaatgctggattacggctacgccattttgcggacggcagttttgcgctcactcgccgcgcacggattcatcgccgccatcggcatcgcgcacaccgccaaagccggaagttttgcgctggcggatgatgtgatggaacccctgcgcccgtggattgaccgggagttgaaagtatttcttcaaggcggcaaacgtccaatgcaagaatggatgcgacaagccgtgagcgtgttgcaactggaagttcccatgaatcggaacaaaatgcggctgctcaatgcgattgacgtttacgtccgaagttttgccgatgccgcgatgtcccacacaccctcgctgctaaaaattccgatgctgccatgagtgatgaacccaacaatttacccgacgaggatgaattgctgcccgatgaacgcccgcgccgttccagatacgaaaagtctgacccggcaggcaaagcgtgggaaaaatcttcgcttcaattaaaccnnnnnnnnnnnnnnnnnnnnnnnnnnnnnnnnnnnnnnnnnnnnnnnnnnnnnnnnnnnnnnnnnnnnnnnnnnnnnnnnnnnnnnnnnnnnnnnnnnnnnnnnnnnnnnnnnnnnnnnnnnnnnnnnnnnncttcaaccctcacccgctgctgatcccccgccccgccgccgctcacgcggacgcgccggacgcgacccggtatgcagcaaatatcgtatggcctgggtgcttgtattttttgacctccccgttggctcgccggaggaacgccgcgacgccaccaacttccgcaaagatttaatcaaggatggttacttcatggtgcagttcagcgtttatgcccggccttgcggaaccgccgaccgcgtggaaacacaggtgcgccgcctgaaatccaaaattcc

SEQ ID NO: 3940 - DNA, 3495 bp, synthetic construct
  source 1..3495: mol_type = other DNA
  misc_feature 1..3495: note = Synthetic
gagttcggtgatcggtcagcctggagtctgttcaacgcgttcacagaagtcctgaaagggaaccttcctgaattgccgaaacggacggaagtcctgcacgggttgttcgatgcccaggtcggattgccgcaggcgcacctgaactaaaactgaaggtgggtatgggctggatgctcatgcccgccttttcattttgaaggagaaacaatgaatccagaaatcggaagaatcatcgtggctgtcgctcggggtattgcctgggtgatcgagcaaatcatcaaaaagaaataatggaggggctatggcgttccattcaatcgaggaagctcccagtcgggggattgtggatatggtcaggagtgccagtcataagcggaatcgagtggccatggtggcgggattcatcctgggtggatgggttccgatagtcacttatctggtcagtcacattcacgtgcaggaactgcccatgttatggctgctggtggccggtggtctcacctactcggccatgacggtgttcagttgggccaagatcgcctttcgacatccgttaaaggcattggggtttgtggtccttttggaaggagccatgaccttcgtccctgacttgtggatcgggttgccaagtctggccatgctggtcgggatcaacggtctggcgactgggacaaacctcgtcaacgatagtcgagaaagtcgtctgctgttgcgtgggaagccacgtcgccgctgatgcgagaggaaagtgtgctacatcgcagtacacttttcttttagctcatagactcaaattttgattcgctgttaaatattcttgttttattcggcctgaacaggagtaagaaaaggagttaacggtctcattttttgaaaacacttctttcaagctacgagcggtttttaagcgggcgggtctttggcgtcgatgtggggactgcctcaattggccatgccgtccgagaggctcgcgattttcgcgaggctgcttcgctaatttgtgcggaagacaccagtgatctaaaaaagcgaaatgggttgcgccgacaacgccgcactttacggaaccgcaattttcgtcggaaatggttcgcgcgggaattagctcaattcttaaatctttccgcacccgctatgctgccggatgatccggtttctcttcgctgccgggcattgtcaggcgaagaactttcttccttggagctttttgccgcgttggttcatctttttaaacgccgaggttacagcaaagttccatgggcgaatgagtcttcattcgagcaggacccggataagaaaaaggagcaaggcgacatccagactgccataaccaaactggaaaaggagatggggaaagagggctgcatatttccttgccaacttctggcattacgtcacgagcaggcaggtgcaagtccaactgagaaatggggacgcaaactgtactggccacgagaacttttggagaaggaattccgggccattttagatgcacagacagtcaaatatccgcttctcaaagaaaaggccgactggctgttgtttggagacacgaaggcatacgagcatagtggccaagtctttcacgtttttcataaagccaccaaaggacgcaatccgggtattcttggcttgcgctgggctcgctttgacaaccgcgatcccagtttggatatgttccgtccttatgatgagcagggacgtcctcagcatgtggttagaaaaagcaaagacgcttttaaaaaagctcaatgggaagtggctattctcaatttccgcgttcttgatgtaaaaacaggaacaaaaattcgaccagatgcggccagtttagtgcgattgaaagagatttatgaaagtcgccataaaaagaaacccgtggaagtcaaagtctccgttgccgtcctgaatagatgggcggctgatttttcagcaaaatatcaattgcttgatggccagaccgaactcgtcgccgctagttccgccggtcgtgctcgtttcagttcacccgttctgttgactttgggccaacaagaagcaccccgcaatcctcaacccttattgcgacgccctggggaatcaacggaagacgctctcaatcggtatctgcgtgaaattcgccatcctttggtcaaacaccgtcttcttctttactccaacttattgaaaaacttggtgaagaaatatggcgaaccggattttgtggtggttgaagccgctcgcagcttggccgaaggcaagaaagcccgtctggagcgagagaaacgcaatcgggctaaccaacaggaacgagaaattgcccgtaatgatcttcacgaaaaccgcccttatgtttctcgtaatgccattctccggtatcgcttatggaaggaagcaaagacgatctgcccattttgcgttaagccaattgaccaaggcagtctatttaccgaagccgatatcgaacatctagttccccgctctcgggtcgattgcaacgaattttacaatctcacggtggcacacataaagtgcaatcgggagatcaaacaggacaggacaccttatgaggctttttcacgcttacctgaatgggagcatatcgagagtaatgctcgttcttgttttcaaggtaagaagcttgaactttttcttagtccagaggccgagtcaaaaatcgaagagaaggccgaccttcagcacaccgcttatatcgcccgcgcagttcggcatgtcactctaatccagcttaattggctgggtgccgacggacgagaccctgtcattgaaaagcaaagtccctcccttcgatttcaggttacgaatggacagcttacaagtcgtctgcgccaagcttgggtctcaatcagatattgcatcccctgccgtcccgcgaaaaatgggatgccgccacccccgagcagcaagaagagtggaaacaggaagcgggcaaaaagaaccggggtgatctccggcatcatgcccttgacgccatggttatcgcctcgacgctgccttggttggcgcaccgcacgcatggggcgaaagatgaagatggacatcacggctggtggacccaggacgaaaaaatgcgctccaaagccgccaaccctgtcggcctcgattatctcacggcaaaacgaatgatcgaaagcgcaaaggtccggcctcacgtttcgcgaagccaccatcgacaggcttacaatacgactctttatgctcgcaaggggccagatacatttgttgcacgaaaggttttcacggggcttaaaccaaaggatttggaagacatctaccccagggaatttagtcattactgccgtgctgcttggaatcgatatgaggaagagtccgatgatattgccaaggaattgaaagtcaccaaaggatgcctaccggatgcctttacccaaaagctctgtttctctcatttccagcattggcgggcaacaaatgaaacggaatttttctggcctaaaaaggttaaaattccaattcgccgcgtccgtctcgtcagcg

SEQ ID NO: 3941 - DNA, 23393 bp, synthetic construct
  misc_feature 1..23393: note = Synthetic
  source 1..23393: mol_type = other DNA
tgctgcaggtgctaccgggccgggtgagttgcagcatgtcaccagcatgaggtccctcggcctgtgacgacctcgaaggtgcgttggtattgcgccttataggcacatgtgcctaatatggtcgtgccgctctccttgcgctttccgtcgttcctatgcagaggtcaacatgggtgatacaaaaagtcggctctatttaccattgactgaagaacaagccgatgcctctgtgaagtcgaggagcttagaaggattaagaaattctagcgttgctgaactggctgcctgttcattgattcagaacgtccgctcctttacggggaaggcttccgctgtaagtcttgctgagaaagccttggcagaattgatcaaaattggcacatcgctagatgcggatgcccctggcagtttttatgcggccatcgcatctcgttttgatgctcgcgctttcaaggaagggatatcgttacttgatgatcttggaatctgttatttgcagcgagaggaaattgaggctggagccttccttattgctgatggtctttgggacttcggatttagcgaaaggcactaccacgacttggaccccttcaaggaagagataaaaggagtgggcggcaacattcgtgttactcagcaacaatatcgtgcgcttcaggtattcaaaacggaactcgatgaagacctagacgtacaagctttggctggaaccggtaaaacattcatgatcgagcagatggttgatacgctcaaccgcttcaatccgatcgtactcgctatgacatgggttcagcttgaggctctcaagaaacgtattaaatctatcaagggaatgacatttggcgctttcgcagaggactgtctttccagagacctaagcattccctaccgtaaatctgcgcagcgccgcaatatgcgcgatcaggtagacgaagctgagattgtcaagagattggacctgcgtcgggtgcctggatttactgatcgtcaattagggcaggtttgtcgtcaaactgttatgcgcttttgtatggggcctgatgcaagctttcaggaggtgcaccttcctaatttagggccaaacgtaacccggattgttaaagaaatcattctcgaaaatgcctgccgtctctggcaggaaacaattgctagtccagattcttctggctttcaacttccaattaggggctaccaccgtataaagcaaatgtccctttcttgcggtgctcgcatagcgtctgaagtaacacatgtgatcattgatgaggcgcacgacatgcctgcgccgctcgttcagtttttggatcgctgtaatgttccggttataacgcttggcgatgtgtgccagagacttgatggccacctcatcagaagatcaatgaatatccgtaaacgtgaggtcttccattccgtgcgctcggggcgagaggttgagcatgctatcaatgcgttgattgaccgcaatcctgttgtagatgttcatcctttggaggggagccgtcagcgacgtactaaaacggtattttacgacaaggctacaatcccgagtgagccaactgttattctcgtaggttctgagtggggtatgtttgagtggtttcaaaggctgagtagctctggcgctaaattttcacttttagatggttcaaagttaggcttccgtcaatttgttacagatgccataactttgtttaaagagcgtatccgtccgacccataatgccttgtttagatttcacaattgggaggagcttttccatgccttccatgaaaaggatctcgcatttgatcgtgtttgccgaatgcttgagcagggttacacaacgaatgatttcgagcgggcctactctgcagtttcggaagggtcggctccctacatgcttggtaaagttgaacacgccaagaactatgagtttgagtctgtaatgctttctcccgaccttcttcgccaacaaaaggccggagaccgcataggcgcggcgagtgcatttgctgcgctttatcttggtggcacacgcgccaaacacaggttgtatgttcctggtcagctcagtgaatgggcctccgagcagtcggctaaggcgagaatcaacgatgcagaggcgtgagatggcgttgatcgagatcgccctggagcgcgctctgtcggcttaccgcgggaagcgcgacaaggctggtcaggcgtatgtgctccatcctctgcgcctcatggcgaagatgcacgacgagatctcccaggtcgtatcgctccttcacgatgtcattgaggactcggatgtgacggccgaggatctgcgggcagacggctttccagagattgtgatcgaggcggtcgttgcgttgacgcggcaggccggcgagtcctacatggcattcatcgagcggctgaagccgaacgagctcgcgcggaaggtgaagcttgccgacatcgaggacaacctcaacgtgttgcgcctggtcgagctgaacgaacaggatctgcggcgcgtccagaaataccacaaggcctggcactacctgcaggctgcgtgaaccccggtggccgcgcctggttgcgcggctagttccagaaggccctggtgtcccagccagggaccagcccgagaatggctggggtcatcccggccttcgccagcgttgccgtgggcaacgtggccatcagccccttgaacttatccttccagtccgccgtcgggtcaacgacccgcagcagggcctgcacggctactgcccgggcgaacacgcggcctcggtcggcgtgagccgggaactcctgcttgatggccttcgcgaagaccggcgtgtccgaggtgatcgaggtgttccacagccggccgtggtgggcgctcaggttacgcagcagcgtcaggctcttcagccaggagcagacgaccgattcatcgtagccaaagcaggcggcgatgctcttgcgatgatccaggtgaagcccggccagtagccgagacaactggccaatgctcatggcctccagcacggcccagatcggagggaagggcgggctgttgtagttgtcgtagtagtgacggattggcgcattcttgatcctcaggccgagcacgttcttgaggaagtcacggtgctcatcgagcccctggaagtgaattgcgtcgaggtagaagtgcgggccgcagctgcggtcattggccagggtgttggcgatcgccgcgcggaaggcgacctcaatgcggtcgatcgcgtcgaggcagacgaggcgcaagcggcggtcgaagtcgtagagggccaggatgtcgtcaaatcgcacgcctgggtgaaactgcttggcagcgtcctgaagagggcgcatgtagatcagcaggcggaaatagccgatgaactccagggccttgatggccttgtcgctttggccgcgggtgttgaggcctttcgttcggaggtgacgcagcagggcgtgtggggttttcgcaggcttggagtaaagcgtgggggcatgcggcatgccgaagcttcctgctggcaatagaaaaaactaaccccctggtgcgcagtacgggacaggtcccgcccgaggcgtgggggttattcttgagcccgagtattgctcaaatttgagcatgacgcaaggtgaagtgcggttatctggcgtgaagtggcgtgagctgcgtcagtgggcctgttgcggtgcatagcgccatatcagaccagcgatgggcacgtagaggccaatcagcgcgaagaaagcagcctcgtgcactgcggctgacggcacatagggcgtgatcacggtaacggctgtgaaagccagcccgagccagctgaacagcttgaatgcggcgcgcttggacatgatagacctttcggttgtggcgatgcgccgaatatagcggcctgtgcggccggttcaatggctacgaaagatctcgtagccggcgccaattccggcgccgctcggcgccgtctactgcggcgcaggcttgaccgttcgtcggcgtgcattgttgagactgtcggcgccggtgcgcggcgccgcgaatcaggccggcgccggagggttttgcgatcaccagaaacgaaaaaaccggctttcgccggctttttccccctccaaccagatggtcgagccacgccggtcatgagggttagttgttggtggtgattatgttgcagttagcctttgcgcacaaggccgctatcagagctcgccgctgaaaagcgtggcggtggccggtcctggctcgacaccctccaccacatccagcgcctgcaggtcgaccagtagggctcggcgcggggtgttcgggttgtcggggttggtgttgtcctgggtagcggtgatcaggccgtagagccatatgccatggtcgttggccaggaatgcgtcctgcaggcggcgggcggtagcttcgtcttcgaccttcaggaagttggccgtcgggccgttttcaaagccgaggctgtagacccgattgtccgagaaggtgatataggccttctccggcggcattttgctgtacgcgtcccaacccacggttgccttgcgcttggcgttctccagctccggccggaacaggcggttctggatctcgaagcctttgcgctcgaagtcgtacggctggaattccatttcctgcgcggtgaagaacatcctcacgtagcggttatcgggtgcggcgaggatctgctgctcgatgaagggcttgatgccattcagggcatcgttcttgttgaacgggttgccggcgttctcggcctcttccagctgcttgagcagtggcttgaggccgggttcggcctgctcgatgttgatcgacttggcgatgaactcgatgctgtccatctgctcggcctgcttgttgtacatgaaggccagctggttgccggtggtgatctccaggtactggtcgaagctcggcgccggcccgggcgcgcccaggcggaatttcgagtcggcattcacttcgcgcgggttctccgcgacggccggctcggcaaccttggttgctgccggcgctgccggttgagccttggcctgcggtgctggcgacttgtcgtcgccgcatgcagagaggagcagggcagtgcagagcagtgcgccgatcgcgcggcgcgggtggtggtggatcatctgggagtcctgttgttggtcaaaaggggtgtttttggtcagagccagccgtattgcggctcgatctcgatgccttcgtggtcggtgagcgatatgcctgtgagcaggccttcgccgccggcgatgtgctggcaagcctgagcaatcgcggcgtcgttgtccgcggctgcgatttccacctcgcgttcgacgtgatcttccgtgaggaaactcaggagataggggcgatcagcctgggaggtgctggccagcggcaaaggtttcgcaacgctgcgttctgggtgagggtgtcgaatcatcggtgtaagttccttggtgtttcagcgaggcgattcggcggtgcccgacgacggcaggcaatggaacagctcaatagtgcctaccgtggcggctttgcaatgcgtgcggatcagctcggttactgcgttccgatattcgtcctgatagccgaagcggatgccgatgagcggcagcaccgagacgacagcgaagacgaccaggccagagatctccaggctgtgaatgatggcggtcgcgatctcgccgggaggcgctgcgttgaacgcggcgagcagcgctccggagtcttgggaaatggtggagatgaccaaccagaaagaggtgattgggaccgccaccaggaacatggcgagaaggatgagcgatacggtcagtaggttctttccttgagcgatcgcaacagccgggtcttgaaaggcgcggcgctggatggatgcaagctcctggtctggtatgtgcccgactggcacgccgttgagttgcacttcccaggcctgggtagcgtctgcgttgatacgcttttcgtagccggcatcgatgcggctgcgcatatagccgatggccacgccgaatacggctgtcatcaatagagcatgaatgatgccgtagccgttgttcagcgtgccgaagaggaaggtgaacagcagtgccgccgcggcggccatgccgatattgatcatgagcttctggatcgctgctttggtcatgcttgtgcctgctcttcagtgcttggggttaacggggtggcgaggctgtagccaccctcttggaggcgccggtggagcatctcttgggagccgccccagaacccggtgtccttggcccatttcacgcggtgcgagtaaacggtgcggcgcactgagatgcccggtgctccgccgtcgtactggggattgcctgggagcatgacgcgctcgatgcgcagcgcgtcaatggggcccattttgcgccagacctggccgacggccagcgggtgcggctcgaactcggcgacgtgttcccagccgcctggcagatcatcgggtagtcgatcgctcatggcgtgctcctggtgtcagtcgtgcttgatggggtcaacggcctctagctgcaggagcagggcgtactgttgaccgtcgtgttgccaggtgtaggtggcgtagtcgccggcgccgagcgtcttctggccgccgaccttataggtggctacgccacctttttcagccttgatgtagtggaagaagttgatatcggaggaaatcttcttggccgtggtggccactgcgggagcgatgttcatgacctcgccaatggtttcggagatctgccggccgcgcaggcctccagggatctcttcaggtacggtgcgagtatgggtaaccaggtccttatgcgttgccggctcgccgtcagtggtgtggagacgcttgttcctgaggatggtgtaaccatcggcgccggcgatcgcggcaggcgcttcatccaggggcgttccgctcttgacgcgcaattgctcctcggtaaccggcttcttgagcttgatcagcagggcgcggtattgcagcaggtacttcgaattcaggtgaggattgacgctcggcgggggctgatcagtagcgctggccggtccagcagccagtgctagcgaggcgaacaggacggcgcacaaggatgaaagggactttttcaagacgagctccatgttttcgggttgagtctcaataatataacgcgaaaggcgcccgcgcttctattcaactcgctgcactttgttcttgctcgctggccttgatcgcgtagcggtactggaggcgccattcaatggcgtcgtcagggctgcccagcgagccggtcacctgccggcgccttaccatcgatgcaacctgttgagcggtgatttcctgggcgccgcgcttcactgcaagcgcgcgcttggtcagggcgatgtcgaagtgcgatttgtaggtgccctggtactggtgatatctcagctgcacgccaatggcggccgccatggcacgcaactcgtcctcgtcgtcggcgatcatgtggcacatgacataggtgcggttgccgaccttcagcgaggcccgcatattgtcgacatagacagccattggttcacctcttggcaagactgcccggtgctacaaggctgccggactgtgtttatttgtgagtctcagtaatatagcattgcatgcatattaagacgatttgctaaaggcgcggcctttaggaaggacagcatgcaattccaaaccactgaacaattcagccaggtggccgctgagctactgcggcatcactacctcgcccaactggccggcacctacctggccaaccctgacgcccagctggcgtgcattcatcaaggcattcagccattcgaagcggtcaacgccgtggcccgtgagtacgggctgccgcgtatggagatcgggctttttggcctgtcgctagcgtcgcccgatcggcctctggtcgaggacgaccagttgaacgcctgcgagcggctcggtctgttcgagctgctgcaggatgtcgccccttatgcagagcgcgcttcggcgtaggaggtaaggcatgctgctggatggagcggtgtcggagctggttggtccaggtagttctccggcggtgtccgccggcggcgccgggaaagatgcagtcgtcgcggtggcgaacacctgggctgaccatttcaatgtcaagcctgggaagcgcgaacaattcatcgagcgctatgttcgccgggtgcgtgagcaccgtttctgggtttgttccggagatatcggcggtcagcgctacacggcgtgccgtctgggagaagttctcttcttctacgatggggtgactgttcaggcacgctggttggcaggaaccagattcatcaccaaagataacctgggctgctggggcggacctatccataccaagatgaaggcgcctacggtgacgccagtcgggactcaggtggctccgctaatccgccgtctcaagcctgtcttcgcgaagaagatcccctgcgccgccgtcttcgacagcatgacgaccttcagcaaggatttccgcaagctcgcctacgccgaggccgcgggcgatatcgactactggccgaacgacgagaagagtcgtgattgtcgctattcgcgcccgcgtgcggctttctacacccgcctgggtgccgggacgctcaagcgctttcttgctgagctcgatcctgagatcgttcgaaccgtgcgcagcatcgggtgcccgagcttcacgctgtacaactggatcgccgccggcgatgtgcagcggcgaatccaggctgtccgcgcgtatccgcttctgctgcccttcctgatcctacggtgcgagcatcgcgataaatgctacgaccgggcgccggtgactgcgccctttggcatggctccgctttcgatgagtgttggcgaactggttgaccgcggcgagcggatccaggcgctgttggcagagttttacgaatggccggagcggtcaatcaaggcggtgggctccttcgcgcttcaccaaactggcgctgtcctgaactttatcgggcgccagggttgggactgcatgctgtcgccggtgttgcatgcgacgctcttgggcaacaagcggcccaagagcaaagctgagtgggcagtctggtatcgcctctacagctacctgcctgatgcgctactgcgcccagttaacgcggagcgctggcctgctttccttgcggggtgcccggagtggaattcaccgcagtgggaagatctggtgtcgagggtatacgacctgcgcgacctcggcctccacgttcagcatgactatgacgatcctgattacgagtggctctacgatccggaaaggcggacgagtatcgcgattccggattggcctcttcggcgcttcctgaacctcagcgcgcagtggcacgaggcgcgggatcagctcgtgcgcgagctggccaaggccgacgaagaggccgcggcgaaaggtgatcgcgcatggactgcgatgctgcctgctggcctggtgcacgaggcgaccggtgtcgaagtcgtcgagttgaccctccccgaggagctgttcctggaggggcgtgcgctgcgccattgtgtggatggctacagcgacgcctgctactcgggtcggagccgaatcgtgtccttccgcaaggacgggcgatcgctggctaccgccgaattccgcctcaagccttggaagaacaagccttccatcgcgtacctgtactgcgctcagttgcgcggtaaccgcaatgcgcccattcctgagtccggcgatgccggccgagcctacgcctggctgatgaggcagatccgcggtcggaagatccagacaaaccccgtgtggccggatgtgccgtacagcctgcggccggtaaggatgcgcgatcgggatgcgcaggttcggagggagatgagggagtggctggctaagaaatgtgcggagttggggaactaaaaagggccaccgaagtggccctttgtatcggttggctttctgccgaggcagttagccttgttgccgatagtccccaccatcggaataactgatacgggacagatggtattgcgaaaatataacgaggtcaacgatgaaataccgccttgggattgacttgggtactgcttcattaggtgtcgtcgccgtcgaaatgcaaaatgatgaacctcggcaaattgcttggcatgcgctacgccttttcaaagagcccctggatgattctccaaaaggacttcaaccccgttccggcgaacgtcgcacggcgcgtttgcagcgtcgccaggtagagcgccgcgcccggcgcttgcgacgaattgcgcacttgctgaccctgcttgggccggagtggaaggatcgctgtcgcatgaatgtgcgtcacctgacggaaaagcgcgctcacgccgcgcgcctgcgcattgagccttgggagctcggatgcgttcttttacggatggcgaagcggcgtggttattccggtggctttcgtgcaagcgagagcgccgccggtatggttaaaactgcaagcgaacgtttgcagcaggccatgtctctgcttgcagctgagcgaggtcttgaccgtataacgctaggcgaatacctgtggtatcgacaggagaacggattacctgtccacttgaaagcatctcgtcccagccttgcggagagtgatcccctttatgccctgcgcgaaatgctggagcatgagtttcagcagatctgggaaacccaggcgaagtatcactcagcgctcaacggcgattatcttggccgaccgttgaaggcgtggttctatgacgcgctcttctaccagcgtccgctcaagtcgattgctggtatggtcggaaactgcctgctggagcctaacttgccaagggcgcccaaggcccatcccgctgctcagtggttccggatcgagaaatccctgcacgacctgcgctggggcggtgggcggcgggccccgcgcctgagcagggcgcaactggatctgcttcgcgagttgctgggccagccaggcaatgccgatgcccgcgtttccttcaagcagatgctggccgcgctcgatgaagcggggcttggcgatgcgctcggccgtagtctcaacctggaaaacggtgggcgagacggcctgatcggtcatcgcaccctgaccacctggcgcaagctcgggctgaaggaccagtggctcgcattggcgcctgggctgcagaccaccctcatcaaccttctggccgatttgggcagccccgaggtgctggatcaggagggctggcacttgaaggtgcccagagccaacaccaagcctggtgaccccaacccctatcgcaaattcgccccggagctggttcggttcgtcgatcagttgcgtgagcaatgcaacgacaaagggcagcgagtctatgaccgcttcactacgatgggcttcgaagccgggcgtagcagctattcgatcaaggcgctggagcggctcaatgcatggtttgccgatccttggtggcctgatgaggggccgggtgccgagcggcgtggtgaggtcgacgaggaagccgccctgcgagtgtgttatccgcacctgttccagccggctccggcccggctggacgaactcaaggccgcgccggaaactggcagcgctgtagtggacgtggctcttcggcagctgcgccgggtcatcaaccagtgcatcgcggcgctgggtagtcctccgcaggaggtcatcatcgagatgggacgcgaggtcgggcgtggcgtcgagtggcgcaacgagcaggcccgtcgcatgcgcgagaacgaaaaggtgcggcgcaagatcgccgacagcctggctgctcatgggctgagtgccagttccgggcgtgtcctgcgctaccagttgtggctggaacagggggagcagtggtgcccctactgcaatcacccgatcagcctggaggcggcgacctgcggcatgactcatgcggagcatatcctgccgcgtgcgctgacccaggtcggacgcaagcgcagcgagttggtgttggcacacgccagttgcaacgacctcaagggcgaacgcacgccctggcaggcgttcggtagcgatccgcagcgctgggccgccgtcgagcgcgcggcagcgcagtttgaggcccaagggcgcaagctgtatgcgcgggaccgcgccaaggcgcaggggctttatcgaaaggctcgcctgctgttgctcaaggactacgaacaggacgtgctgagcgacgaatccttggccggttttgccgaccggcagatgcaccagacctcctggatcgcccgggttgccgcacagtgggtcaagtccatcactccactggtttctgtctcgcgcggcgagatgacggccttgttgcgccaccagtggcgcctggaaaccgtgattcccgaagtccggctggatgaagggttctctgtactggacacagagcgtcaaccggttacggcagaggatttcgcccgcttccgccggcaatgggaggggcacccgtccagccatggtgacgagcgtaccgagcggcgtctggagaagcgcctcgatcaccggcatcacgtcatcgacgccctggtcgtggcgctgaccagtcgcagcctgtacatgaagctggcgcgccattaccgcgaggaaggcgagcggcgcgcacgtggcgagtcgcggcgccgggattggggcatcgcaccgcccatgccccacctgcgcgatcaggctttggcgatgattcgtggctgcaacctgagtcacaagcccgatcgcaacgcttccggtggcctgttcaaggacaaaccctatggggtgacgcggccatcggagggggccgtgcaacggctcacacggcgcaaaaatctgcttgaacttgctgatgaaaagtcagtcagcgcaacctacacggcaattgtcagcatcgccagtgaggaagttcgcaaactagtccttgacacattcgaagcgcgattgagcgctgggcagagcatcaaggaggcattgtcctgccctgtcgactatccgcgttaccgtactcaaatctggcgagttcgctgcctgactccctacaaggcggacaacgtgaagcgcattacacaccgtagccgagggggtgaacatcacaagtacctgttgcacgcggggtatgcctgtttggaaattgccccgatcgagcatgagattggatgtgatgccaaagtgaagcgtaagccggcattcagcacccgactgattactatggtggaagcgacgcagcctggtttcaacatgccggcgcccggagtgcgccgtcttttcaaaggtgacacagtgcgcaactcggaagatgggcggatctacgtggtcgcttacttccaagaaaatggtagaaaaatctccttagtgcctttttgcgaaacacgtaattacggcaacatgaaaaaagacggcgataaaaacaagcgcgagatagcgttcagcaaagctgtctgcttggagttactgcccgatggctgagcaccgagtgctgttgattgagagcccggccagactgagtgtcgatttggggcggctttgtattcgccggtcggcgcagccgccggtatatgtcctgcctgacgatattgacgtgctttgtttccatcatcctgccattaccctcacggggcaggccatgcaggtgcttagtgcggcgggtgcggttatcttactgaccgatgcccaacaccagccactggcgcaggtctatcccctcctggcaccgatgcgccagaccctgcgcttatggcagcagtggcagttgcagggctcgccctggcgcggcctgctctggcagcaactggtgcaggcgcgcctgcgggggcaggccgccgtgctgcgccgtcaccgacgccggggcgcgctctttctcgaacgcctggccgaccgggtgaagcccggtgattcgggacaatgcgagggacgtggcgctcggcactattggaaacacctgttcggcccgacctatgttcgctacaagcgggggggccagagaccctctgaacgcccggctcaactacggctatgcggtacttcgctcgatgatcgcgcgcagtctggccatggccggactcaatggcagcctcggtgtcggtcactgcaaccagcagaatcccttcaacctggccgatgacctgatcgagccctggcgctgcgtggttgaagatcgagtgctggccgagttcgaagcggatcccggcgccgatttcgacggccaggcgcggaagcggctgctgcaattcatcctggccgaggtgccgctgcgcaccggtgatttccgccttccggcggcgatcgtaaagatggtcaacgactgggttttcgcattggagcgccatgcgcagggcgcggcccagcctccgcaacttgacgtgctggagtttcgacaatgggcatccctgagggtgctcagctggcttttttcctagtcactgacaagcagtacgccatgactcgcgagttttttggcactcagcgcactcggtttcgtcccgacaatccgtcgcagatcgaacttttatgaaagaaaccgtaagtccatcaaggggttgcgggaaatcagagattatcagctattccgatggtggggtatcggaacttaaagccgtggggaacctgcggcgctacagagattatcagctattccgatggtggggtatcggaacaaatcagggtgtactgcaaggaaatgtattgagattatcagctattccgatggtggggtatcggaacggctggtagagcggagctgggtcaaggggtgagattatcagctattccgatggtggggtatcggaacctgtttcgagctggaggatgggccagagccgagattatcagttattccgatggcggggtatcggaacaggtgaatgggtcccgcgtggcaccgatgaccgatttagatgacctctaggctatcattcctccaatgcagtatgaatttgaagcggtgaccttatgaagtccaagagtcgcgagtccaagttgaagcgtgtcgctcagttcgaagccgaggcccgcgagcttgccggggcgccatcggcgaaccaggtgcggtttcttcgcgtggcgaaagagaagggggaggagctggagccggtggggcctttggctggctctcccgagagccgtggggcctgagtgggccccagaaacaagaaggcccgaacatagtgccggacatgccagcaccagaggatcgggcgcgattgccagcattttgctggatagcgatagagccggcaaccggtagccgggatcttcctcagggttcttgatccagggagatttgctgggcttcgtcgcgggatgacgcgaggagtatcagccggccgagcgctttgcaggtcggatcgctctctgcctcaatacacgcgcccttcatggcctgtggtgaagtcccactccaatcgatgctgtagccgtggtctctggccaccaggcgcagcagctcgcgctgcgtgcgtccgttgccttcacggaacgggtgggcatggttgagcaggccgaggaagatgcccgcggcgctgcagaagacacgctgatcttccatcggggcgccgcgcagaccacttacctgcaggtgctcgtcaatctgctcgaagtacgcctcgatcttggcctgttccaggaaaagcgtatcgcccttgtagatgtcgacttgacggatctcgcctgcccacggatagatgtcgccgaatatgtggcgatggatcgccttggcatgcgccaggtcgtattcgccctcaatggggctgatcgctagctgggtgatgcggagttcggtgagggtattttcggcggcgttcagatcctgggtgttctggatgcccaggttgttgatcaggacgccatttggatagacgtgggggtcgttctgggggccggatgtgccgtagtagccgtgttcgtcttcatcgcgcgaggccatagaagctccgcgcctctttgatggcatcgtcgattgaaatatcgccgtcgatgaacttctgggctagcgtgctgcccaggcggctttggcgtacgccttcaagcgcgcaagtagcccgcgcatactgcacggcttcaatccggctgcgatctggggcgttacggttcggcttgcgcatgctgagcctccagcgaaaggcttgtgtatggatcaggctacttggaggggcagggcctgtcaaagtttcaacagcaaggctgttgccgtggttacccggaatctttagctgataggcacctttggccgccctgggcgtgagtgatgtcacgttacctggaaggcgtaggcgtgcagacactggattggtaaacgtcacgcaataaaaaacccctgagcaatctcggcaccgaagtgcttcaaccgacaggggtcgtgttgcttccaattataggcaactgagccattacggcaaccgccgcagggcgtcattcagggctgcgcttgtccggaatctttagctgataagcccccaggctgctgggcgtgagtgatgtcacgttacctgaaagcgccgcaggcgcgcagttaccccgatgccagccggggattcctcagggtggggcggttgcccggaatctttagctgataggcccgccgggccgctgggtgtgagtgatgtcacgtagcgtggagcccatatccatagtgctggggatcgtttgagtatccggtatgctttaaactgttcgatagcacaacatgcgtctatggagcagtttcatgcgcaaggcgtcccgatacttaccgcttctgagtcctttcgaggcggtgcgtgatcagctcctgacagttcaaggctccgggaagtatgcagatgctgcaatccggctgtggcaggcgcgagccgaggccggtgttgccatctggaaccgcgagaatcccgacaacccgaccaccatcgaggcctgggcggcgcgctacccaatcgagattgtccgcgaaagctccaccgactcccaaccaggcgcccgggcgctgtcccagttcgccggcgcgcgagcccggaccgctgaccttgcccggctttcgctcgcgcaggaggcggaggcctcgggcgtgccggccgagcagattcgtctgcagaccggctggcaccggggtgtcgatcgcgcctggcgattcgagctcgatgactccgaggcctgcctggggccccaggtgctgcagcgtcagcagcaggcggccgccgaactgaaagccgcactggcggtgctcaacacccgtgccgatgagctgcgatcgcaggtgcgtgcgggcgagttgtcggcagaagccgccgaacaggcctatgagacggcgcgtgcaccggtgctcgtgttccaggatcgactgcaaccgttgctggcgatcgctccaggcgcaatgcgcggcctggccgccggcgcaacgcggcgtctggatgatgtgctcttccatccagcactgtttgcggcctatcccgagctggcggcgcttgaggtccgtggcttcgacgcggatccgttcgacgagacgcagggctatttcgacggccgcacgctgcacgttcgcgtgagcggcgcgacggccgatcatcagctcgacgtgatcatccacgagctacagcacgccatccagcacatagaggggttcgcccctggtgggatggtcgagtatttcaaggacatctccttggttgagcagctgacggcgccgatcaccaagcgcctgcatgaactgttggattctgatcctgaattcgggaggctcaagcgcctgcagcatcgaaccttttcgtcgatcatcggcgcctacggcaccgaccaagcgcgggggcgcgccctggactgggaccaggtgccggatgccgagcgggaggcctacttcgccctgggcgagcagctgcaggccttcgagcaatactgggagtacatggatctcgaagaccagcgcagccgcatcgagcgcgacaggccggtgctgagcgctgttgagcagtaccggcgactggcgggagaagtggaggcgcgcaacaccgtttcgcgccggcggctcgatgcggccacacggcaggtaaccccgccagagcagaccgaagacattgcgcgtgacctgcaggccgtcgatatccccgggcgtcgccagcgcctggcggccgaccaggccccagacggcgtgcgtgtgctgtcacagtctgcagcgctgcccgcggcgacgctgcgcgagatgaacctgcagcgctggagcacggagcgccccgcgctgcgcgcgtccgatggaagcctgcaggtgctgtatcacggcacgcaggcgggcgaagccctgacgcacttcatcccgggaggcgtcgatggcgttcagctgaccggtgatgcatacggcgtggccagctacttcacttccagcccgggcgaggccagcgcctacggcaccgacggcgcggtatttccggtctatatccgcggtgagctcctggacctggcggcgcccgagctgccagccgaagaagttgcccgtctgagcgcatttgccaacgaggtgctgctgccggccgatcgcgcccgcttcccggtgggccggcgcgagcgccgcttcaccgaggagcagctggaagacgcgaagacgttcttccagtcctgccgtgatagctggcagcgccttggcgatggcatggagcgggccaggcccgaggtggacaaggacggtgatgatttcatcgtccggttcatcgacttcgatgcccaggtcgagatccgcaccggtgagcaagcgcacacgctgttcaaggcgatcggctgggacaacttgccggccgccggttacgacggcatggtgatgacgcgcgaaggcgggcagaggtgggtcgtcatgcaccgtccaagcggcaacgtgaaaagcgcgatcggcaactctggcgagttcaacggcttcgatcaccatatcctccaccaggtggctggtggaggtgtcgagcgaggccagatccgcattggtcgagacctgtccttccagattgcgttgttcgagcatgccgacgcgagcaccttcatccatgaatcagcgcatgcctacctggagatcctccgcgatatggccgcgcgcacccgcgccgctgattcgcagctgcgaagggactggcagacggtcaaggaatggctcggcgttgcagcgcttggcgatgacgaacccattcccgaacaggctcacgagcagttcgcccgcggctgggaggcgtacatgcgggatggtatcgcgccgaatgatgacctgcagggtgtcttcgagcgcttcagcgagtggctgtgcgagatctaccgctcaatccgggatctgttcgtggagcttacgcccgaggtggtggaggtcatggatcgaatgcttgatgcgggtgatcagcgtatgtgcgacttggcctacatctataaatactaatgcccacaaatgtgggcattagtattcgcttatttgcatgtcacggtgttgactgggacgctgctgagtagtcatagccagctattgggggctcgtaatcattattgaatccccagcaggttgtttcaggttgttctgccagtttaccttcttcgatatcggtttgatcgaagagaggcagttgcttcagtgcgtcctggccgataaggatcaagtcacctgctgagaaataagtggggtaggtgatctgaaacggttcttgactatcggtccagctaacgccgtggcccatggcttccatagggatgtaatgcccgaacttcttcagcagctccgttttgtcatcatcaggattagctcctaatgctcggcgcaaaagatcaactacggtgcattgattttcgtgttccagctttcgaatgaggtagtcggcagcacgcattgcgggttcaggtgtttcagtcgtgactaggttgaaccaatctgcgccagatattccgggataccctacttcttcagctgtgtctgccagtgttacgacaaacagtgtgcgtgcaaattcctcctggattcgcgtacgggcctgttcctcgacggtgcgtggggtggcttggtgttcatcttgtgctgagttgggggatttcattgttcaactcctttctgtgatttcgtcgtgtttcgagcaaaaacttggcagcggttgatgccgccattatggggtagatatctcgtatgaataaggcatctgagtagcgcaaattacttcagcgatcgcctcgcacgtcacaaccctgccgtcctggtcggtgagctgtgtttgcaccgggacgcaatagcccttttgacgaaccgcttccagcagctcaatgccctgggtgcagtgcaggcggccagcagcatcgagcacgaacgtcgagttatgctccaggttgcctacctccaggccccagaccagcgtttcgacgcgcgcggggtctggcgcctccgccggcgcggagacctcgcccagggcgaggctgtccaacgtggtggccaccatgatcggtgcatcgccaggcaggccggcgatcgcctgatcaaagcgctcctggtgaaccgcgatgacctccgctggtacttcatggccaagggcgatggcgcgtacagtctcgctgaagtgccactggagcagatcctctgtgaggtactgctcagcggtgcggggccattccttcgaaaaatctcgttgcgttgccgcgatgatccggacggcgccggcttcatgcagggctttcatcgtgcttgccgagaacccgatcgatgcgtggccgacgttgcccatgatgggcgactggcagaagtcatggatgcgcaccgccttcttgtcgccctggaaggcctctcggaacgcgtcgaccaggtggtactgcggattggtcaggtctgggtcttcgccggtgctaaagtcgtgggatgccgcttcctctgggcgggggatcatcaccaggcgcccatacggtgtggccgccgcgggcaccgcgatatatcgcctgctgccgtccggcatctgctggaatgaggttttcacacgaaaattttcgttgccgtagccgtcaccgatgtagccgaggccttcaaggtagctcttgacctcttgaaaggtgaccttcttgccggaactccagctctgggcccggccgatgtggtccttcttgtgcaccgtcgccgtggcgcccagctgctgcgccacgtcccaggcgaagctctgctcatcaggcgggacgggagaatcaagctggtggctgctgatggtgaagctgatggtggagtaccagtttggaatgtagatctgcgcgatgagcggctgctcagctgtccagaacaccttgtcgtatccgccggggcgaggcacagggttttgccagggctcgcaactgccgtggaacagggccgtctcagcgaattggagtggggtcaacagccagggttgggagaaactcatcgaggcaccttggggctatcagaggccgtatgccggcgcgggatcgggctggtagtcttgctccgcttctgcctggcactgctcgaccagggcatcgaaggcgatctgcaggagcggcttgtgagcctcggccgactggtctgtgtccatctggtcgaaagcggtgacggtatcgaaccaggtgaagaaggcctcgaaattctggaatgcgagcagctggcggacaccttcgtcatggccatcggcatcgagcaaagcctgaagcgattcgatcatctcctcaaaggaggggagaggttcatcggcggggatctgtgcggccgcagcctcgtaggcttcgcggtagcgaacgtcagacatggcgactcctttggtcagaaagcacaggagcggcacatggccgcccctgaggttcgtggtggttagcgagaagggccggcaggctgatcccagttgtcagggatgaagtccttcggtcgattccagtcttccggaaccggttcgctcgccatcaaggtctcggcctggtggccgaacatcttgccctgctcgacgatcgcgtgccgcttgtccatggactcggaatggagatccagggcgcgttcggcgttctgcttggcgtcggccagtcggcgctcgatctcggcgttgcctggatcgttgcgcaggtcggtctgcagcatgtagacgatgttctgcgtctcacgcagttgacgctcggtatggccgaactcagcgcgcgaggctttctcgctgcgcgtccagtcttcgaaggcggcgtccacgttgctgtgggtctgggtgatcgggaccgaactgatttgcagcaggctcatcagatcggtgccggcccgagcaggctcggaagggttctggagcgcctgaagctcggtctgcttctgctgcagcttgcgggtgttgtcggcgatctgcgactcaaagtcggcgatgaggcccggatgaacgcccggggtgctcttggccttgtcgaggttggtttgaaggccgcggcccacgtccttggcgagttgaatctcccattcgagatccgaaattttctcgtcggccgggctgcgcggcgcggcagcggctggagtggcggtttcaccggccttgatcaggtcgccgagcggcgtctggttatgggttcgggcgctggcttctttcagcgccgaggtcagcttgccgagcacggtgatggccacggcgagggccggggccaccacgaatgcggctttcatcaggaagccagacttggcgttatcgttgctcagcaggctctgcacgaagcccgccttgctgccattgctcagctggtcctgcagcagcgtcagccccttccgcttgaagaggtcgaccagtgcattcgaggtggtggacttgtccgggccatccggagagatgatgtcggcgcccttggctaccaggccctggaggcgagggctgtctttgaaaagaccagacatccgattgaagatggcgcggctgccggtgttcatcagggatttcgtgatgcccatgctcaggcctcctgtgctgcggtctgttcaaccaggtcgcagaactcgtcgaggttgacgatggcagcgaccacatccggttcctcgtcagttgcgccgtcggcctcaacgcctttgagcagggcggtgtagccggcgatgtaactcaggctttcagccttcgattcatcggtctcgctgctgccctggatgagctcagcgcagcgctccaggcgctgaaggcgttttgcggtttcgatttgcatggttcactccttgaggtcgattacttaggcccggcttcgagatcgctgggagggtattgttgatctggcgcttcgaatagttgggctgccgcttccttgttctgatcagccggggtgggggcaatcagagaagcgagaggggttcccactgtgcttggtgatgacgagcgcagcgcatcggtaagctgctgcacttcgggagccaggagggcacgaacatgggaataggcagggtcttgaattagttgcgggatgatctgctgcaactcttgaggcgtcatcacgtcaaacataacgcggaaatgccccctgagatcttcgactgcctcttgacgcgatgggccgaaca

SEQ ID NO: 3942 - DNA, 23327 bp, synthetic construct
  source 1..23327: mol_type = other DNA
  misc_feature 1..23327: note = Synthetic
gactatgcaacctggatcacgaactatgagacctcaacagagactatggctcgtctttcaggtgtcttgggtaggtggggaaatggagctgaaaaagacttggtacttgatgctattcgagttttgacagcagaggcgctgaaaaatggatcagggctaaacgtatggcttgagctgaaaaaatatcctgctgtattgatatttgtggcctacggattaggcctcacgcgtgcaggaagacttaaggaactctacagcctacttgaatcgactattgctatcgattcccgcatcaccatgtccatgggtgagtcattcaatcttgggtatttcgagtcagttacccagaaatcaatctggcaatcacttccgggacaagatcaaatgaaaacaccacttagcaatcgccttgctgaagaggttaccccacgctgggcatcaagctttgcgggcctaggcgatccagtgatgctgtttgaccgcttcgaattttattgtgcactgtactttacaaaaacacgcaacgtcaccgaatcaagcatccaagagcatattgaaagaggacaggctaaacacattattaccggacgctcgggatggaaaagagaaaccattagcacgattgaagaagagatgtcccatgatgaattcaggactcctttgcttgaggcgggctttgcatacggaagtcaaaaatttctagaattattttttgcatgcctgcgtcaatctgcacagaggttttgatcaaccggtcgactcaacacaatggattgacttactacacacctcatctgctgcattgccagtggtaggaaaggtccagcacacaggcgaagaacaggaaatccgggaacatgggaaagaagcaacagaatgacaaaaagcgacatcacttcgtgcccaaagcctacctaaaggccttctgtaacgagagtggccgtgtgtgggtctatcgaaaggacaaccctcagcaacctcgccctgagagtccagactccacccagtttaggaactattactactcacagccgaagcccgatggtggccaagacaacaacgcacttgaggacttcttttccacaatcgagagtggttggccaaaaacggttgcgaaacttcgcgccaacagggatatgaatgatcagctatccaaccttttcgagttcatgtcacttcaacgggcgcgcgtaccagccgcaagagacctaaccgagggtatcgatgcgcacttcgtcaaaagtcagttgacatcgatgcatgccagaggggaactccctacgcctcctctaggctttgaagatctaccaaacatggcggaagtcgccattgacccgcatcgtagtatccacgcgatggtcgacatgttccaaggtatgggtgctttgtatgatgtgatcggactttccgtagtacacaacaaaaccagtcggcccttccttaccagcgataaccctgtcatctggttcgacccgtccatcaccttcgaacaacagttgccctacactgtgaatctaccccaaggtccagtagccttgatcttccccatcagccctcacctagcaatcgtcggcgacaccgcgctcgcccagagctatgctaagcagggattgttgcaagccgagatcgacgacgaagagctgatcaaagcaataaacgagcaaatctgccgtttcgcctacgagtccattctggcttcagcgctgggccaagaagatctgattctcaaacacgctgagtgttctcctgtcctggaaactaaggaaatccgcgggtggaacggatcgataacagtccatcagcaggtgttcggaaagagacacacgaagcctaagtggtagcaatcgcgtcagcgctatttatcagatacctatcacagcgcagccgagatagtgtataaaaattcaccacaaatgtgcgaaccacatggaagaagactgcatgagctatttcaacaactttgagagacttttcatgcagagaagtttagagcttattgatacatacgagggagagtatgaaaccacacaattgctgaacactctcatcggacttctgttttttccaaatgaaagaatgtcggatataattcctgaaaaatctcttttagatatagaagcttggggtttcagaccagactgcattgtgaatgccggagcacacaaaaccccacaagaaataaacctgcgagaattagtaagacgacttagaaacgccgtcgctcattgcaacgtttcacctttcccaaatgatcaccgaccgtgtgaaggctttttcttctcagatagaaattattttgaggcaaagatcccaacagatcaacttaaaaaccttttgagaggacttcttgccagcttacttaaccagtaaaacatgaatcccggctaaagttttttatcctaatcaaaataaagctatttttgtgatttgctattcaggtaatcatcaatcatcgcattaaagttaacgccaaccccagcaacatttggattaagggttatatatctgttaattttcgccaaaatcgaacctgcctgagccaccccattttcggcaggaagttcatacagcgcaaccatcagaccttgtatcaagtccttgaaaaaaggttctttagccaccaacttttttatcaaacccaaagcatttttaacgtctgatgaatccttcgtaaacaacgcaacattgcatctagcaatcgcataatcgaaacgattaggattactcattgtctcaggaacgagcgcatccaatatttcttttgcccgttctgggcgtcccatcgcaacctgcaagtccgccaagaatacattcgccaaaggcgtaggctcaattgagagcgaccgatgataaagtttttcagccatatagagttcgcgaagaatatgatagcactcgccaacttgcagccaaatatctgctatcgcatcacttttataatttttttcatcaacttcagcgaccaataaatcgatagcatttctcagcatagcctcatcgttcaggatccgcccaagctgcataactgccatgccgagcaaccgacgtccatggacacttctctcagcaacaggaatagcttcatatgccgctacggcctcacgagctaatatctcagctcgttcagactcattcaaaagaaaatactggatcgcaatcaagaatcgataatgaaacctcgaagattccgaatcagtcagctcaactactttggaggccaaagtaattatgtcgatataccccaatttatctgaatatgcatccagatagacctcaagcaactcagagctacgtatatcttgccatttatatttagccagcacagcccgagctgcagcataatcgtttttaatagctaaattaaaaagcgcttcctcgcaggagacagcccacctccaccttacatcatcaatggcggtcgttaactcaccaagcatctgaggatataactcaataattccgcactcaccataaagctcccgcgcgccttgcactagctcacacaaagcctttatatctacatctaaaagctcgccatcataatgcttcagctgtagcaggggaaccgtgtgagccatgtgacaaagccgataccacgttatgtgagctcgaagatatatcaatctttgcactggggagtcagatgagtttactttcttggtgtagtcatacttgcgccactcatccttgcaacaattcttaaaccgttctcctgaaccacagaggcagttttcccggcctttcggctctaagctttccagtggaatacgcatcaagctatctcagtgatttaggccgggtattccattacacctcaccacaatagtgaagctagctttcttgttcaagcgaccccgaggcatctgggggcgctcaaccataccacggctcgctcggggctaaatgctatcacccatcagctattcgattaaaaaagcagaccaaggccagcaggctgccagttcattatcacgagctcaccgctaatctctgccttgccctgccgttggttagtgttgctgtaacggatgtccagtgtctcgaagtggaagccctcgaacacgcggcggatatccgggtggtcgttgatgctgaccattactttgcccttgcaacggcgcatgaagtcggccatccgctcgtagttctcaaacggaaagtccacgccatggccgaccttgcccctgctacggccctaggaggaagactttcgtattgagaccctgaatcatctagacaggctcgcaagtaaaaaaggggacgcccattaggggcctcctgagacgcaaaattggcctggggttttcgacagagtcacgtatccagcctattcttcctgggtgtctcgcaccaccccattctacgtcagcgatactgtgaaatggacttgctgggctggtgctacaacgcttttgaccaggtacccgaagccgactctagaggtctcactgtgcccagcaagaaattttcatctaccaagggtgcatttaagcaaagcatttggtgcctagcagtaagccaccacgagggctgacacatgaagctccaggtaggaatcaccagtgaaggtcttagtctatgtttcggagagtgtcagcgacttgaaccatccgcagacgccaatcaagtctcgcccagaggcaactatgtctacgcgcactatgatgaaaaaggcacgccattctatatcggaaaggggaaagcgaaacgggcatgggacaactcgcgccatcagctctggcatcgatatgtagagcgtcacctaaaaaataagtacacgatccgcatacttgcagacaacctctctcctgcgcaggccgagagtctcgaaaatgaatggattgcccaagagtcagagactctagtcaactggatcaattttggacgaaagactgatttcgatgctctgaataagtaccacgcacttcgcgatgcaaaccgcgaactcattgtggcgacgcgctcattggaaaagtcggacccagaactcgccatttcgcgctactaccaagccatagctgacaccgaggcatacgcttcactgcaacttgagcgcggattgattggcctcctgctggatgaggaaagacaggagttcggctactcgggtgaactgcaagcccttgatcgtctcactctctgcctcacgtaccttggacgcgcccttgaagctcggtctgtgacagaggagtactttgcaaaatatcgggccgatcaggagcttcgtcttgccgagtcgatcaagaagcgtgttgccaaagcaactcggtcatagcaaccactatactggctgttgcgctgatgagtgatcacctaattggttgagtaaaagggccgctgctatgatttcttctccattacgcgggcggctgataggagaggagaaatggacgatggcggcaaggaaatcgaaaaggtactgggtcagtttcataaaaggtttctccagtccctgcaagcattgaatcaacgcatggcaaaagctataccgacaattgacctaggcgcccccaaatttcgctcactcgctgatcgaatagcttcaatcaactgggaagctgttcagacaaaaatggacgaattcccgcagcgttcgaaagaggctatggatattgcctcagcaaaaggttggtttttcgcttggacgggatccctccgagaagcatacgcagtcactgatcagctccgaagtattgataaagagcaggtcaatgagttcatggcagaacattaccgatccagagtggattgcttatctgaaaacctatcgaagcagttccctgctagagcgatagcgatcagcgcagcagtacgagcccacaagcgcgcagatacagacggctacacgttatcgatcccagtattcattgctcaagcggatggcatgatttcggagattcttggagcggtatctgccttacagaaagtaggcagcaagcttacgaagcaaggagcaaaggagggagaaaccagggcagcctatgctttgagaaacaaggttgccgacgaagaagacctaaactacgtaaaccctatattggctcttcacgacttggattttttgatgaaccagggggacagagctgcttctactcaatcctcaggaggtgagttttccgcgctgaatcgccaccaggtaatgcatggagaaatatctgactacggaaccgaactcaatagcttaagagctttttcttttctatgtttcgtcgggttacacctacctgcttttcttagctggaagggccaagataatgtctagctgaggcatcacaagcgtgactggagtgatccttgaatgcttggtcgaaaacgaacgcaaaatacaaaacctcactcagctccccgacaccttttcggcaaaatatgatcactggcaaggtacgcttgcaggagataaaagccgagttacaggaagtggctcatgtttaagattaaccctacccagaaccgtatcgcaccgctggaaatcaagcgctttggggaactgggcttcaccgaacgcaagcatttgcaagagtggctggaaaactgcccacaggctctggctcagggcgatggtgaggaactgctgatcattcagaaggagtttgatggtttcgatgatacccgtgaacgtctcgaccttttagcccttgataaggagggaaatctggtcattatcgaaaacaagctcgacgactctgggcgtgatgttatttggcaggcactaaaatacgccagctactgcgccaatctgagtaaggcccaggtgattgaaatataccaacgctatttaaatcagaaagcacatgaattcggccagcctgcggccagtgctgctgacaacctgatcgagtttctagagatcgacggactggaagccgcacagatcaaccgaataaagacacagcggttgattctagtcgccgctcgttaccgcaaagaaattactaatacggtactgtggctcagtcagtttggaatcgcctgccagtgtttcaaagtgacgccctatcagtctggtgacgaactgttcctcaactgtgagcagattatccccacgccggagtcttccgattttatgatcggaatggtagctaaggaagatgaggaaaaaagtgccgacagtgaacagaagcatcgtcacaccctgcgacaagacttttgggagcaagcgctggaagccttcagtcagagtaattgctccgtgtacaacaacatcagcccaacgaaggatcactggctcagcgccggttctggtctgagtggtatgccatatcagcttatcttcggtaaaaacgaaatacgggtcggtcttagcctgcaaaacagtcaggccgctgcgaacagctttgtgttcgagcgcttggcggcaaagagagacgggattgaagcggcgtttggacatagtctggtttggttgccgatgcccaacaaaaaagcctgtcgtatccagtacaccaaagacgttgatggatacgacagatcgaactggcctgagatgatccagtggatgattcagcacatgactcggctggagcaggcaatgcgcgaaccgctgaagttgattaacaagcagctgaagcagaagaacttatctgctgatgacatgctggaaagtgcggcagactgagtcgttcctgatttcgtagcgcttttggccgattctgttgaaaaagtcggttcggccaaacagcctggtcattgactggctaaaacgccttttttgcacactgctacgtgaaatccgagtccggaagcctctaccgaaagtaaagatttcaatctcggacgcatacttttctgctgcgcaaaccatggtcgactttttcaacagaatcggccgattactgcctgtcaccaccggcaaaaaccgctccatagttgccaggcaacgatgaggcttaatggttcgtatttcacgcatcatgaacaccaactgagtgtgatcgtagatttgtctgttgtcactcagcgcgtgttggattttctgggggggtatcgagatggtatttaaggatccgcagcactccctctgcctcgttccccttcaaagagaggctcgctatgagactggaacggcttgagatacttgcgtcaggccatgacgggattgggccgatcagcttatcatcagtcggttgcgttttttaattctgcgagtggtgtgggttatgctgttttatgtccagcaggtgaacaaggaaaaaggttctaacttccatcaagttgtgctcgatttcgcgacatcgtcagaccatgtgagttttgctcgactcctcaatgatcgagcagccttggatggttcggtgcaggagagtagctcctcgatgatccgcttttcatacgagccaaatggatacagcagttttcgagaggggtcttggtatgaaatcgatcccaaagcctttgatagtgctgagtatgttccagtcgagatgaatgctgccggcggtttgttcttgggcgcggaactcaacaacgtaccttggactaaggtttcacatgctaagaaacttgctccgcctcaagtcgctaccgtttccactgtacctattcaattccttaccgatccggacccaaccggcataatcaccctcacagttgtgaactgcggccatgcaaattggaacgagatcgaaacccccagcgacaggatcatttacgatgttggagcaagtcgccttttcaccaaagctgaggtcagagccatcattgatagccgcacgatcagcactgaaaaacggcctatatgtctattcatcagtcactgggatgttgaccattacttggctctgcttgaattcacgcccatcgaacttgccaaattacgcaatgtggtagtgccaagtcaggtccccaatacggctacttttgagcgtgttcgccgcctcttagctgacaacaatgtacctctgacagcaatcccaccggctgagagacctcctaagtcgtcccgcgtaatcgctcttgcacaacactggcgccaaggcgcgtttaccctatttcgtgccacatcgggacgtgctcgtaaccagacgggcattgtgctgggtgttcaaggatcgaatcaggtggcgctgctgacaggggaccaccattacgacaaagtactggccgcgtcaggagatgtaacaagctacagtaaaactgcttgtgtccttgtgacgcctcaccatggtggcgctgctggcaacgtgtcagctaaggactggcaaaactttttttcaacgttgactaccccgatttcgtgtggtgccaatagctacggccatccgataggtgaggtggaagctgcactgaactctatgcagtcaggagttccgctttggcgaactgaccaaaaagggacatggatcacgacactgtaactaccggagtctcgattcgagacagcactttagatggtcgaagtatatgggccaatcaaaaatgattttgaataggagcggcgatcggcattctttgaacttcagctggatcgctctcataggctttgtgcagtgctcattaccgtgcgagcatacctgtcatagtcatcaatctgtttgagctctgcaggatctgcaggatgagctgatgagggtagccctcgctgtgacgacgtagcgaatggatgccactgtagacttacgagttcatagcagaccaagacacgtctttgaactggaccagcatggccgacgcctcaaccggtgcttttttcacgattgcatcaaccatgtctgaaacctgagggagcttgttggcgacccgctcgctttccaccgttggtggtgcggtgagcttctggatggcctgatcggtcgccgcgtacagcgcatccacattactcgggagccagaaacagagacagtttcctggcacgacctacagaaaagaaaaacggtcaccgagatgaccgtttgtatcggttggcttcgtaccgaagtatttagccttgttgccgatagtccccaccatcggaatgactgatacgcgttagaagataggtgacttgtatcgacagggcaaggccatggcatacagattaggaatagacctgggcaccgcgtccattggtgctgtcgccatccgcattgaaaacaacgaaccgcacagcattgactggcatgcagtacgcattttcagagaaccagtagtaaacactccgaaagggctgcagcccaaaaaagcggcccgccgtgacgcacggcaattgcgcaaacagattgaaaggcgagcgcgacggttgcgccgcattgccaacctgatcccattgctggggttgcagaaagccgaagtgaagctggggcgcggtcaggatttgaccacattgcgcgccatcgcagcgcgccaaccggtcgagctacacgaatttgccctggtactgctgcgcctggccaaacgtcgtggttacgctggtggatttcgcgattccaaagacggcgtagtcaaacgctcctgcgacaaactgggcgaggaaatgagacttcttgccgaaactcagaacctgcaggaagtaactctgggcgaatacctgctgtatagacaggatcacgggctgcctgtctggctcaaagccgagcgtccaggtctggaaccgcgctatgccctgcgcgagatggtaatcgccgagttcgaacagctctggacaacccaggcccggcaccacccgatcctggcctccagtcatctcggcaagccactcaagcaatggttcaatgaagcactgttctaccagcggccactgaagtctcccgcccacatggtcggcaattgcctgcttgagcccaatctgccacgtgccccacgcgctcacatggcagcccaacacttcagaatcaataaaacgctccatgacatgcgctggggtagcggacgacgggctgaacgcctgtgcaaggcgcaactcgacgtgctgcgtcagattctgaatgatccagccaatgccgatggcaaggtcagcttcaaacacctgcatcaagccttgagcgagacggggttgagcgatgcgcgaagtcgcacattgaatctggagcgcagcagccgcgatcaacttcccggcaacagcacgattgctcgttggcgcacgctgggactgcacgatcaatggcagatgctggcccctcgcgaccagacatccgtcatcaacctgctggcggatctgggcgggccggaactgttgaacacggaagactggcaccagaatatccacaagagtagcgccaaggctggcggtaccaacctttatcgtcgattccgacccgaggtcgttgatttcatcaatgcgcttcgcgagtgcaaggacaacaatggacagccagctttcaatcgcctgacagctatgaagttcgagggcggacgcagcagctattcggtcaaggccttggaaaaactgaacacctggttcaatgatccttggtggcccgacgagggtccgggggccaagcgtggtaacgaaatagacgaagaagcagcactacgggtctgctatccacatcgttattcgcagccccaagagctgctccaacgactcgaggccgctccgaccacgggcaacgacgtggtcgacggagccttgcgcgaattacgcaagatcatcaaccaatgcattgatgctttgggtgagaggccagaggaaatcgtcgtcgaaatggcacgagagatcggcaagggcgtcgtttggcggaaagagcaggaaaaccgcatacggcagaatgaactcgcccgaaggaaaattgccagcgaactggaaaagcacggactgagcgccaacaacacccggatactgcgctatcaactctgggaagagcaggatttgcactggtgcccctactgcgcccatcccattaatctggaagcggccacctcgggcatgacgcacatagagcacgtcctgccacgctcgctcacccagatcgggcgtaaacgcagcgaactggtgttggcccacgccggttgcaacgacctgaaagccgatcagacaccttggcaagcattcggccatgatgccgagcgctggtctgccgtcgaacgtgctgccgcccgttttaaggagctgggtaataagtcttacgccaaggaccgcgccaaggcgctgggcttctaccgcaaggcggaacttctcctgctgaaggattacgaaagcgaagtactgagcgacgaatccatagccgacttcgccgaccgccagttacatcagacctcctggatcgccaaggctgcagcccagtggttgcgcaccatcaccccgctggtttccgtctctcgcggggaattcaccgccctactacgccatcaatggcgactcgacacagtgatcgcagaagcgcgtcttgatgaaaaacttcctgttctggatatcgatgcgtgccccgtatctccggaagcattccagcagttccggaaacaatgggaagggcatccaccggacaacctgaccgaacggaccgagcgcaaacttgaaaaacgcctcgaccatcgccaccacggcatagatgccttggtcatcgcgctcaccagccgaagcctctacatatctctggcccggcgctacgttgaagaaagcgaaaggcgcgcccgcggcgagagagtccggcatgattggtccatcgagccgactatgcacaatctgcgtaaccaagctctgggtatggtccgtacctgcaacctgacccacaagcctgaccgcaacccagccggccgactattcaaggacaccgcctatggcgtccactttccagaggagggcgatcgggcacagctgacgctgcgtaaacctttgaccagcctggccgacgaaaagtctgccgagaagactcgcaagaacctgcacagcattgccagcagtgaggtacgcctactcgttctggaagcattcgaagcacgcctcagtgccgggcagaatccgaaacaggcgctctccgaaccggtaccctaccccgcctatggcaccggaatctggcgagtccgctgcatgcaaggctacgcggacgatgccgtccgtattgtccataaaagccgtcagggcgaacacgaaaagcgcctgctcaacgatggctatgcctgcttggaaataaccgctggggaaaatggcaaacaccaggtacgccttgtcactcagcgtgaagcacaaggccgcggcttcatggagaaccggcagcaagcgaaacgcgtattcaagggagatacggtgatcaaccggcgcgacggccgtaaatacctagtgggctacttcaaggccgagggctatattttcctcatcccccacacggacacccgcaacttcgacaagatcaaggaggcgaactcgggcaagaaaagggtttccttcaaccacgctcaccaacttgagcgaatctagtccgagcaccgggtactgctcatcgaacatcaggcctatctgagcatcgaccctggggcgtctgtgcgtccgccgaccacagcaggagaacctgttcgtcctgcccgctgacattgccgtactctgcctgcaccacccggccatcacggtaacggcccacaccctgcagaacctgagccaggaaggcgcgatcgtcttggtgacggacgaccaacatctaccgctggcctaggtctaccccctgctcgctcccatgcgtcagacactgcggctgctccaacagttcgagctgcaggagtcgccgtggcgcggcaacgcctagtgcaagctcgcctgcggggcgaagccgccgttctgcgcagtttgggcatgaagggcacgcttttcctagagcgactggccaacaaagtgcaaccaggagacagcgaccgatgtgaaggccaaggcgcccgccactactgtaaacacctgctgcttgagggtttccagcgcagcaagcagagtgccaccgaccagctgaatgcccgcctcaacttcggttatgccatgctgcgctcgctgatcgcgcgcaatctggcttgtgccggccttaatggttgcttgggcatcggccgctgcaactagcagacccccttcaatctggccgatgacgtgatagagccttaccgctttctcgtcgaatggcgggtcgcgcggcaactcgaggagcatggggagcaacctttcgatgcggccacccgcaagagcctgttgcagttcatgtccgacaccatccccatactgcgaggggactaccgcctgcctgcagcgatagctgccacggtcgacagctgggtgcagacactcgacgcaattcatgcacaccggcatccaggtaagataacgctaccggagtatgaacgatggccattaacggatggcgggtcatgtgggtgatcgccgttacgactgcccgatgaccagcgctgaagcccggcacggctatgcgaaattccgaaagtcactgctgcgggccaacttcatccaactgcagaactcgcattacgtccgccactttccgagcatggcgacggcgaggcttgcattgctcgtttgcggtacgacattcccgaacgtgcgcaactggcgttctttcttgtcaccgacaagcagtacgccatgactcgggagtatttcggcgaatgcagcgtacggaaaaagccagaggccccggagtaaatcgagctgttctgaaaaaaagcgcaaccctaacaatgggttgcgtaatcaagagattatcagtcattccgatggtggggtatcggaacttagagcttcacgcagtccgcgccgggcacaggttatcagtcattccgatggtggggtatcggaacaggtgccaacgccgtggctgatgactttccaggttatcagtcattccgatggtgggtatcggaacttgacctgatcgctggtggcgccgaaggaagaaggagtacacacgaagcttagttcgcggaaaatgcagcaacaaaactcggatatcgactatgcgaccggatacctagttttgaaattttacgcttccgtactgactatttatcggttacctgaatgattatttgcttgctatttattcgtttgcttaaacgagcagctagagtagcactgatagcaataacttttctcaaaaacgataatcgactaaaatcatcaagctattgattaaattgaaaattatcttaaagcccgcgaacagatccgcgaagactttgcttgacaaacaagtcatcaagtcagtcaagaatacttagtgacttaatttttgaggggtttcgatacgagttattctcacttataaatctttcgcttttttagccttcctttctcatataaataaataattaataatatatataagaaagagtagctaaaagtagcgggcaaaggctctgccctgcgggagcagctgagcccttcctgtcggttcctttcaggcagccgtaaaccgtcggccagcttttcaaccggccgtagttcgttcgtacttcagtcctgcggctagggtttcgtcgcgtttatagttcacttcaagggttaggagcgtctggggggtcgctccttttcaggaggggctcccttttcgggtgggtgcaggagtggattaaggacggccaatcaacgccgcaaccacgcgctggatttgctccagttctgcggcggttaattggcctttgtactgcaccttgcgcgctacccagtcgactcttttgacttgatcggccagcgctgggttgggcttggccccggcagtcggcacctcgaacggatagcccttgatctgggtcgtcatgggcacacagatcatcatgccgcatgcccagcctgcgggctgaactgcaaccacactacgtcgcccgcgttgggcacatagccgcttttagccattaccagacctccttgcccaccggtggcccccagtcgaccagttcatggcggttctcgggggtcaccgtggctaacagggcggccagatcaatcggctcgcgcaccggttcgacgatcagccgggtgccttcgacgcgcacgtcgacctccaggtcaagctcaaacacggtgccgccgagcacggacgccggcagacgtagggccagactgttgccccacttcttgatattgcttttcatagtggtccctccggggtatttgcattcgtcgccacaccaccgcgtatctacagttgtatctacgtgagtgacacggggcaggtcgggctcagttgagcagcttggtcacccacacggtgagaccagccacggtgatgaacaggccaatggcgaaggcgagcggataccagaaggtctcgcgggtgaactgccgcgcttcgacgttcggcgttcgggtcgcgggaccgacaagcttcatggtctcggcccgtagccggacaatgtcagcgtggattttttcgagttcggcttgggtcaacatgcggttctccttctggcccccatgcttcaagttcgcggcctaccgacggcgcttccagccatgcggtctcttctgccgacctcggcaccttccagtcgcagcgggccagcagctcgtccaaggtgtagtggggtttctgcttcgtgcgcttcatcggggttgtctccttctcaggcaggtccggctcacacatgcagacggacggtcatgtgatgcccacggcgcgcatcaccgctagcatggtcttcagggtggggttgcccttctcgctgaaggagcggtacagctgttcgcgggccagttcggtcatgcctttcgcgcgggcgacgaacaccccgaagcagatcagtcccagcagcatctgccgggcaaagcgtagccgctcgccttcattgagtgacactcccgccccgcgaacaccgtggccaggcccataagtcgggcctgtccatcagagacccaccacgcggcccatggcctccagcgtgtggtcgtcgcgttccctaacgatgcccagcgagaagccgggcttgcggtcttccttgtcggcaatgaccagcagggcgaaggccttgcgcatcgcttcggccttggtgatgccgcgacggcgagaaatgtcgttgagggcttggtcgatctcgtcggacaggtcgagggtcatgcgcggcatgggactctccagataggtggaggcgtagttacgccggtttagtggagcagcctgtaaatcacggtcatgatcacggcgatgacacagtagagcccagtcaccacggccatcggataccagaaggtttcacgggtgaacttgcaggcctcgactgtcggtttcgggacctcggtactgaccttgcgcgactcttcattgcgctggatcgtctggtcgatcaactggctgatcgcggcatggatcttgtccagttcggcttggctcaggccgtgggtggtcatggtgttgactcctccttctcagaaggggttaagaacggccaaacctccttgccaactggcggcccccagtcgaccggcggatgccgattctcaggggtgatggccgcgatcagggcgtccagatcaatctccggtgtatccattacaggcccactacgcggccaaccgcttccagggtgtggtcctcacgttcacggacaatgcccagcgagaagccgggtttcttcttctcggcgtaggccaccgccagcagggcgaacgcccggcgcatggcttcggccttggtgatgccgctttgcttggcgatgtcggtcagcgcgccgtcgatctcgtccgacaggtcgagggtcattctgggcatgacgggtactccagtcgaaggaattgagtggaaatcttactgcatattgcagttactgccgctactccgtccgaccactggcctggtgcaccttacgcccgtctacctgcggctgtttggcgcttgccgcagttgtggtggaggcgcgtggtttcggctgaccttggcgtagccagtagacctcgcccagcgggtcgccgaggtcgaagctggtggtgccattcgtggtcgaagtcgccgaggtgcagccgggcgaagaccatcagatcgtccagcacggcgcggtccagccctctggtggtcgccgaccgtgccgttccagttcggcacaaaggctcaacgcgcctctgcgctgtgcgcgccctccccccggttcactcagcggctgtaggcggcgaggctggaccatgggcataagacctccaatagctgcgggatgcttgggcatggcagaaaaaaccgaattgaccccttcatagttcagaagtaagcgggacggctgaccgagtcacggcagcggtacggtaaagggccaattcgcggtaaaccgtggcctgcccgacgccaagctgcttggcaatctcgaccttagtcacgccctcgcccgccaggcgcagtatggccgcgcgtttttcctcatggattggcttacgtcccttgtatttgccggccttctgcgctttatcgattccttcgcgctgccgctccagcatcatctccctctcaaattgggcaatcccacctagcacggtcaggattagcttgccggtgggcgtgccggtgtccaatcctagattgagaatcttgacctcaaccttcttcagttccaatcggtgcagtgtctgcagcaggtcggtgatcgagcgagcgagccggtcgagcttagtgaccacaaaggtatcccccacacgggcaaactcaatggccgcttccagttggacgcgctgggccacggacgatacctgttctttaaatattttttcacagccacatcgttctaattctcgcaactgggcctcaaagccagcctcttgttcgatggttgaagtacgtgcatagcctatatccataggttttctcccacatatgtttaagactctgtgatagcgcacctcccaaataaattagcccacttatatgagaggtttaggtagggtttcgtctgctatcacaagggccggctctatttggaaattgcatagcgttttttgtcacacaggtggacttccgccaatgcttagaggatcagctcgcccaggctgatgcgttccttcgcgcctgttttcgccagtaaccgcacctcgataaacacaacaagcgaacggacatatctgccaccatccaaacgtggcgttgtcaattcttcgtggaagcgcataactaatgcagtacttgatcaatttggattactgccataggtactaataaaagtgactccctgatatagggtcgtgctatttatcaagggtgcaccttctcctcggcatgactgacacatcacacgaaaagccatccacataaatatgtaagcacaaccaacaacagcccaacatacatactgcaatacaacttagattatttagcgatacattaaacataagccgttatatgcagataaaaaatggcttaacataccaacaaaaccccacccacgatttttgctattgactttttataatcacgcagcaccagtccccctcagcatctttatccaatctgaaatcccaactgtgcactgtacagatttcaaaaaaatacaaaaaaaaatcaaaaaaaattttttcataccaacaacagcacatatcgaatcaatagaaagaattttaaaccttaaaaatcaataacttatataaattaaagcacatccacaactctgttacatattaaataccagcacatcacctcccaatacttccatattacaaatatccaccattacataatcacctcaaaactatcgactacacttaaatagtattaaccaacacacaaaacagcaataaacttggggaaaccaacatgactaccaataacaagatcactgccgagcccaactgggatgctaatgacatggtgattaaagtgataaagcccggcagcctagccttcgagaacctgacccaagaacccgcaacgcggggcacccatttccgcacagcttccctgatctacgattctctggccctgcgttacaacaaggtggagcccggcgatttgttattggtggcgctgccaaacaagccgagtgccagcaacttacgcaaaatcttcatggggcgcgggatgaaggtagacgactacctgttatttcgttcgatatacgatgagcgcggccaacgcatcccccaaaacaagcgtcctctggttttgcagcgcatcaccgacaaaatgatggagacggtacagccttgcccggccatcgctgcccagatagccgaagaagctgaagaacgaggggcctcgtacaacttcgcgcaagatgaaaaaccagtaaatccggggcctgcagaggagatttctgcagaaaatcaagacctggttaatacttgatgaggtaagggttgattacgggtgaccgccccgactgagagggcggcactcaagtttaatgacggattgtccggcaatttttcctcttcacttcggtactagagacggagccccttggttttcaagggtgcgaccaggaagccaaaatgacaaaaaaaccttccagaaccatcggggaacggatgactgctgacgaacgcttggcgttcatccgccgcatcgccagagcccacaacttatcccaccaagacctcacaaaatacaccgggtatctgcttgataccgtgtctggctggtttaccacatgcgactcccttcgccaccgacatgtctctgccagggctatcgatcgcctggtgttggaactgaaactgggccaagtcaaaggcagcaaggcgggggggcactagcatgtaccattactaccaacgctctgaacatgacgcttggttcctcctgtccagccaccccggcgaagacccggtggtgttggccaaggcgcaaggagcaaagaagctgactatcctcgcgctaaaccagaaggtcagcgatggaagcgagtcggagatcccgcgcaaccacgacaagatcggctaccgcggcccgctgtatttcggcatcgattgcaaggacgacctcggccaggcgatcagtagcagtcaggaactggttggcaaactggtgcgcatgggcgtgccaaaaggctgcatcgagatctacctgtccggcagcaagagcctgcacatcctggtcaacgaattgctgttcacgagcagccgatacaccctgcggttgccggaaatctacaaggaaatggctcgcgacctgttcgtcatcggccttgactactcggtgtacagcagcggtcggggcaacagcttccgcatcgtcaacctccaacgacatgacggtaactaccgggtcccggtgaccccggacgaactggccgagctgaccgtcgaccgctaccgcgagtgggtccaggcgcctcggcaggtgaaggttgatgcccaacagccgcggttggtgcacgagctgcgtgccctgttcgaggaagccaagaagcgcgtcaactccaagccgaagctggtgatcatcgcgtcatcagcggacctggaagcgatccgcgaaccggtgccgacctgcatccagatgctgtgcgacagcgactcgctgaaggccgacacctcgtacaaccaggcggcgacccagttggccacctacatcgtgcgcgccagggtgtcgcagaccgtggccgaaagcctggcgtcacgcctggccagcagtgctaagtcgagcacgtacaacacgcctaagctacgccgcgaccacatcgaagcgcagatccgctacgtcgagcacacgccgaccttcagctttggttgcaacgcgatccgctccctgctgagcaagcgaccctgcgaatgttgtgcgatagagggcggggccaacaaggacggcaaccccgatgccgacctgagcgcggtggccgaggcagacggctattacatccgcgctggcgacagcaagcggcgcatcagcaacttcaccctgcagccgctcgacgtgttcattaacgtgccgcaggacggcactagcccccgccgcgtcggcacgcggatgaacgtgatgaagaacggggtggcggtgggcaagatcattttcagggagtcggcgtttgccggtcgtgccgcttttcttcgggaacttgagggcatcacggacctggtgtttcagggtacggacctcgatattcagaaaatcaagatcgtggtgtttcgggaggaccaagacgtgggggaaatcttccaagtttacaccaccggggtccaccttgacttcgtcgacgacagtcccgtcttcacttacgtcgaacctgacatgtccgtgaactcggttaaggtacgcaacacccaccagttcctcggcaagctgctggcccgtccgtattttgcgcacaccagcatatgtgagaaggaggatcgggacgtggatcaggcattgtttcacctcctcaagatcaaccagaaatacgaagttggcctgctaatcggctggtgtgtcgcggcgcacttcaagacccactttatgcaccagttcagccagttcccgattctctgcctgtggggcagcgctggttccggcaagtcgaaaaccgctggtgtgatcacctgtcttaatggcacggactacatacagaaagattccggggtgagcgccccgtcaacctcgcactacgggatgcttgaatacctatccaacaccacgacggttcctcgcatcattgaagagttcaacaaaagcaagatgaccaataagtcttacaaggacgtgagcgaacgcatcaagcaggcatggaacggcgagtcaaccctaaaaggtcggttgggaggatacgtcttgggccgtaccaatgcagaagccatcgccatcccgctatcggcgccggtgattgtcatttcagagcaagagattgagatgccggcattacaggaacggtccatccgcgtgcacctgaccaagatgaaacgtaagtactgccgggaacacttccggcgggctaccgagggctgcgaacacctgcgcagactaggcaaagcgatcatggccaccagcttgaccacgtcaccggaggacatcaagcgcctgatggaaaaagcctcgcagctacttccggaagacatggacgaccgaccgcgctactcgcagcaagtggtcttggtgggtctgtggatgctcttggatatttgtgggcaactgcatctgttcaatgcgatgtttgtgttggatacagtaatcaaggcactaattgagcgatatgccgaggacggcgacggctatgtacaaagcgagatcgacctggtgatgcagaagatcgcagtcatcgtggctatctcgcgcagcgccgatgaggcggcctctggcacggcgtatttgttcgacggccaacactacgccataacttccgagtacctggttctcgacccggtcctttctcatgcctgctacacccgctattgcagcgtcgacgaacgcaccgcgccagtgatccagagcggcgcgcagttcctcaagctgatcaacgaagaaccctatttcgtcaagtacgcgccacacgccggcatgggtggggggcgtccgatgttgttcctgtcgctgcaggaaatgcag

SEQ ID NO: 3943 - DNA, 5151 bp, synthetic construct
  source 1..5151: mol_type = other DNA
  misc_feature 1..5151: note = Synthetic
ctatctagatttcagattatcgatagacccgaaagtgaagctgggttatgcgagctgttccctaattggaggcggtatgaacactgagagtgctaaaaactattctcaaggttcttgtggaaaatggctgaatttataagctgacacagcaattttacgtctttcattggataaagagcctggggaacaaccaagattcttgatcgagtatgttcaaaagccgaggctatgcgatcggcgagaaacgggctccaagaaacacgagtgttgtgtgaccctcttttgctcgctgttcagtgacaagaagagggtgcaggctgaactcgaacggctgcttgcgtccgctggggcttttcaatgttgataccaaaatgaaaagcggccgccgaagcagccgctttgtatcggtgacttcagcgccgaagcgctttgtcttgttgccgatagtccccaccatcggaatacctgatacgattcacatcatagcaatatccgtggggagggcaaggggaaatgcattatcgattgggaatcgatctgggcacagcctccatcggggctgtcgccctggagttggacgaacagggcagcccgttgggcgctccatggcacgctgtccgtatctttcaagagccactggaaaaaggtcaggctggcctaaaacctaaaaaagttgcccgccgcctggcacgtcaacaacgccgtcagatcgaccgccgcgcccgtcgccagcggcacatcgcccatctggcaccactgttgggtctcgaccccaaacagataccaccccaccccggacccggctttagcgccttgcgcgcgcgggccgcgcgcgagcgcgttgaactggacgatctgctgcgcgtgctcttgaggctggccaagcggcgcggttacaagggtgaattccgtacggtcaaaaaagacagcgaagccggtgtagtgaaaacaggctctggcaagctggcagaagccatggcggagttggctcgccaacgtcaggtggagcgggtcacgctcggcgaatatctgcatttcaggcacagggaattggggctaccgacccgaatgaagctggggcgagaagatgtcgatgacctctacgccttgcgctccatggtggaagacgagttcgaacaaatctggcagacccaggtacagcaccatccggtgctcaacgaaaggcacaagggacgcccgatcaaggaacacttccgcaaggcaatcttttttcagcgtccactcaaatcgcccgcgcccatggtcggcaactgcccgttggagcccaacctgcctcgggcgccacgggcacaaccggccgcgcaggcgtttcgcgtcgaaaagacccttggcgatctgcgctggggcatgggcaagcgtgccatcgggttgagcccagagcagaaggccgaaatcaggcgcctgctcaatgatccagatgaactgcgagccgatggcaccgttaccttcaaaaagatctacaaggccctggaagacgccggctgcccacgccccgacacgcgcgggctcaaccttgatcgcagcagccgcgaggaaatcaagggcaatacgaccttgaaagtctttcagaaactggggctgctgactcaatggcaggcactcgacgaacgcacgcagatacaggtaatcaactttctggctgatctggggtcgcccgaacagctcgacagtgacgactggcacaggcatatccgcaaagccaatgccaagggttataagcgggaggacatgcgtcgattcagccgcgagatgatcgactttatcgaccagctacgagcctgtgacaaattcgaccgcctcagcaaaatggggttcgatggtgggcgcagcgcgtactcgatcaaggcactcaaacggctagctggctggatgcgatcacccgaatgggcaacggatccaggtgacaatccacgtatcgatgaagatgccgctgcccgcaattgctaccccgaacatttcgaaaaaaccaacctcggacccacattacccgcggccccaaagaccggtaatgatgtggtcgatggcgcgctgcgtgagctgcgccgggtggtcaatcagtgcatcgagcaactgcgtgcgccgcctgatgaaatcatcatcgaaaccgcccgcgaactcggcgccggccccgagcgacgcaacgaatgggaaaaacgggctgcggccaaccagaagcggcgcaagcaggtggcgcaaaaaatcggcaaagccggtgccatccctaccggcaccaaaatcttgcggtatcaactttgggaagagcaggaggaaaactgcccttattgcgagcgcaagatcggtctacacgaagcgctcgacggcgccgcaacccacttcgagcacatcctgccgcgcagtctgacccaagtgggacgcaagcgcagcgaactggtgctggcgcatcgtgaatgcaacagcgccaagggcgatcgcacaccgtggcaggcctggggggatgacccgcagcgctgggtccaaatcgaaggacgtgcccgccgcttcgaggagctgggtaagaagtgctaccgaaaagaccgtccgctggcgatggcctatttccgcaaggcccgattgcttatcctgaaagaccacgccgaagaggtgatgaacgacgagtccattgcgggctttgccgaccggcagttgcaccagagttcctggatcgcaaaagcagccaccacctgggtgaacagcatctgcgccaatgttttcgcctcccgtggcgagatgacggctggcctgcgcgccgcctggcgactggagaccgtgatacccgaagtacgttacgaagagggctaccgggttttcgataccgatgggaaacccgtttcgaaagaagacttcgaccgcttccacaatcagtgggaaggcaggcttctcagtgaaaaggcagatcgtaccgaacggcgcatcgacaaacgtatcgaccaccgccaccacctgatcgatgcattgagcatcgcgctgacctcgcgcggcctctaccagaaaatggcacggcgttatatcgaagaaaccgaagcgatacgccggggcgaaaaaaagcgccgtgattggcgcgtcgaaccgccattgcgaaatgtccgggaggttgcgctggaactggtgcataactgcaatctgacccacaagcccgaccggctgcccaatgggcggttcttcaaagacaccgcatatggcgccgcccatgataaacaaagtgatcaatggcgccttacccttcgctgctggttgtctgacctggctgacagtaagaacaacgaagatagaacccgcgccaacctttcgaccatcgtcagtccggaagtccgtcagatcgtaatcgaagctttcaatctacgcatcgctgaagggaaaaacccgaaacaagcccttacagaacctgtggcataccccagatataggacgcgaatccacaaagtccgttgctttaagaaatcaggagataaaggttttcttaagctggacggcgcgaccattattactcactacagtcgacaaggcgaacataccaaacgtgtagttcacgatggttacgcctgtatcgatgtatacaccgaacatggcaagcttaaaaaggtgtgtttactaaaaattccggaattcctaaaacaaccacgacctggagatgcagcacgatacttcaaaggtgacacggtcatcgacgaaaaagatggcaagcgttacattgttaacagctttaaggcagaaagtaatggaatgatattcttggcatcgttttttgacactcaacccaaatcacttagaaaagtgagtggaaaagggttgctacgcctaagattggagacataaaaacatcatggcggagcatcacattctggtgatagagcacccggcacgcctaaagattgacacaggccggctgcgcatcgaacgcgatgagcatccacccgcttttgtgctgccggaagacatcgacgtgctctgcctccaccaccctgtcatcaacctcagcgtcagtgcgctgcaaaccctcgctgaagccggcgccgtggtgatattgaccgatgcccggcaccagcccagcgcccagctccatcccctcaagtcccatgctcgacagagccagcgcttgcgtcgccagatacggatggaggcgagcgatcaaccgcctcggttgtggtgccagatcattcgggcacgcatccgaagcgaagcggccaccttgcgggcgctgggtcgaaaaggcgcgctctatctggaacggctcagccagagggtcgagccaggagatgccggccatcttgaagggcaagcggcgcgccattactggaaacatctgttcgagggtcggttccggcgtgaaaaacagggcgcggacgacgacatcaacagtcgcctcaacttcggctatgccgtgctgagggccgtaatcgcccggcaactggcctgcatgggactcaaccttggtcttggcctgggtcatcgcagcagcgaaaaccctttcaatctggctgatgatttcattgagccttaccggtatctggtcgaatgccatgttgcggcaatgggagaagagactctggaacaaccattgaacggcaaggggaaacaggagttgctggcattcatcactcaccaggtgcccatgaatgacggcgaataccgcctgaacggcgcggtggaggcaacggtggatagtttctgtcgtatccttgatgggcgggctgacacactggcgttgccggccttctgaacatgggtgtcaacggatggcgaatcatgtggttgattaccgtttatgattgccccatgaccacgtccgaggcgcggcacgattacaccgtgttccgcaagtgcctgcttacccagaattttcaccagttgcagaattcgctttatgtgcgccactttcccaccaaggccgcggccgatgcctgtatccatcgcctgcgcccgcaaattcccaagggtgccgacgtcgcatttttcctcgtgaccgacaagcaatatgcaatgacgcgagagtatttcggtacccgcgaagtcaagaaaaaaccggatgaacctgaacagatacagctcttctagaaaaaatccccaacaaaatcaatttgttggggatttccgagtctatcaggcattccgatggtggggtatcggaacata

SEQ ID NO: 3944 - DNA, 23099 bp, synthetic construct
  misc_feature 1..23099: note = Synthetic
  source 1..23099: mol_type = other DNA
aatgccgccttcgagcgatttcgcgtcgacttgtttggcggactcgctacgaatgaagatcgtcgtgcgattcgatgcgtcgaagaggcgacaggaaatggacgccggtaatatgttggcgaccgaaatttcctgggccgaccagttcaatggcaacagggctacgggagcttggcatttcgcaagttcctcggcatcgactgcaaccggcgtattttcagtcgcgggcacaaagccgacccactcggttccggcatcctgcaccagttgtgaaatttcaccggcagtcagggtagtgaaatcggcttccagcggttttaccacccacggggcggaagcatcaccaaattccgcttcaggagatacgtacagtgtgcatgctgttggcattgctcagtttatccagtttcaggggaagttcgtgctgagtgatttcgaacaaatctcgaccatcagtgctcgaacttcaagtgggatggacaatcaggcactctttgatgcgttcttttttttcgatagtcctgagttcacaagggcttgcgtcattggcagtgagtgcgggaacgggtaacctaaatgagttgatctcagctgatttccaggcgccagatcagcagcagcattatcttcgtactctcatctttgccccgtttctgcattgaagacgttctactctgtcggatgagtacatggatacggtcctccccgaattcgatcttcgccccgcgacatggtgctacctgtcgtccgcgttgatcgtgaccgtttactttcggtttcagcgactcatctcgctgcgtaacctcgatttgtttctgctgttgatgatcacgccggggctgttgttgatccaggagtggccgtcgattgggtacttgtggctctttctcgcatctggcgtgttgttgctgcgactgctgattgatggtgccctgttaagacgcccgcgttcgccacagaatctgaacgaaccaggattggcgtttctgtgtaccttcacggtcctgatgttgctcatcaagatcgctgcgaccgattcgttgccgaccgaaacgatccagacgctgcaacaagctgaggatctggtcaaccgacatgatcggtccgctttggtcgactctgaagcgacgttcggtccaggcgcgaccatattggcggcaccggcggtcggtttgtctcgggtggtgctaccgccaaatgaggaaccgaacaaatcggtcatgctgcaggaagtggctgctcgaattgctgcggtgctgtcccacttggctgtggtctttgggctggtctatgcgggctatcggatctttggggatggcggactggggctggcgatggccaccctctacgtcctgatgccctgcaccgggttagatgccacctacgtcaatcgggttctaccggcgggtctgctgatttgggcgattgctttttccgaccgtccattgatcgctgggatatttctggggttggcgtccgggactctcttcttcccaatcttcctgctgccaatctggatcatgtattaccgtgggcgggacgccatttatttcgcagcggcctttttgctcaccggggcgatcctcgcgctgagctttgtcttcaccgctgccgatgctgattcattcgtgcggcaaatactcggctccgtcgactggaagctgctgcagttcgaaggtgtggaggcaggtggattttggacgggtcggcagaatgtctaccgcatccccgtctttgccaccttcgtgatcctggtgatttgtctcaccatgtggacgaaaaaacgttctgtagaacagttactcgcaagtaccactgcagtgatcgtcgccacccagttctggtatccccgtgaaggtggccagtatgtgttgtggtatctgccgctgctgattctcgtcgtctatcgcccaagtcatcttggtaaaaagcgtgagaacggcaacaagtacgcaagaacagacagcctgcaatcggtgagcactcttggcgaaggtcgtttgcattccagtgacgacaactggacgcctcctcgcccggtcacgaccagctcaacgaaaatccgctcctacaagtcggacgggtgatcacccacgtcgatgatgctacaagcctgaatgatcggcaggttcagtgcggtggctttctcgatcacttccggactttccgagcctgggttcaggtagatttcctcgaccgccaactctgcaagttccggaagcattggcaacaaaacagcgggggggagataaatactgacgcggttaaatgtctttcgcggcagatcaccgatcccggcaaatgccgctacgccttcaatttcctcggcgtgcggattgatcgggaaaacgtcgtacccgttgcgttggtgtgcacgcagcgacttgttcccgaatttcgtgcgatcccggctcgcaccgagaatcacaacagatggcttttcgcccataacaactccgatgtcgtcttcttttgaatttatttgcggttacgtcgatcgaggaatttcagttgctcgtacagcatgcgaatcatgcgcggagtgtatcccgccgcttccgccgctcgcaatggattgccgaagatcgattcaacttccatttctcgcttcagctgatagtccacccgcatgctgctgtcgtagggaaccatctttcgcgtgtcgtccagcatcttctgcaggaaggcatcttcgatttgtttgccgcaggctttcgcactagcctgcacttcccgcatgagtccctcagcgagctgacaagccgattcatccgccatgatctccgccgtcgatgcatcgatcgctaccgacaatccattgaacggcacattccaggacagttttttccaacgagtttccaataggtcagcaacgggcgtgttttcgatccccgcttgagtgaggtcgctcgatatggcctgcattcgaggtgtgacttccatgatttccgcagcgtactcgccaaacgcaatgcggccgtaatcaagatgcttgatgtacccggggccgattttgttcgagcacagaaaacagcagccaccgagaacgcgatccgccccgaccactcgcgcggtatccgcttcaatgtcgagtccgttttgcagcaccagcacacaggtcttcggcccgatcaacggtggcagcagttccggaagcaactgattcctcgtcgacttcaatccgaggatgaccacatcgcattcgggaacgtcgttgacatcacggtagcattgaacttggggcagcgaaaagtcgccccgcggcgactccaccttcaagccgtgatcgcggacatgttcgtagtcactgttcagaagaaaatgcacgtcgatacccgccttcgcgagcagacttccataatatccgcccagcgccccggtgccgacgattgcgtaactcagattgctcatggcggtcagaatctcatccgtattgagtgagggtgcgtccgaagcatgttgctcgagtcgaatttcgttaccatcgaatcaagaattcgcatttcaatcaaacctgcagatattgtgagggcttccaatgcgttctggaatcatgctgctcttcgctggttttgtatttatcacatccaacgtcatcattggctgcacgccgaagttggaaaagcccgaaaaaccaaatctggatgccgtcgaggctccccctgccgcaccgaaaccaaatagtgatggggtgagtgtcacgaaaaagaagactcgtgaaattctcgatctgcaggaactcgcgggaaaaccggagtgggaacaagtcgagatggatgtccgtggtaacgacccgttgtcggtctcacagtcggcatacttccatgcggcttcacaattgggcgcgataccgattgaacaatggatcaatcagcaaaaagcggtggaaggcaaaacgcccaactacgcagaattgcaggatttcatgaagcagaacgctagcctgacactgcctgccctcaaaccgtggcagcattacgcgtacaatgccgaggaaggaaaaattgtggttgtggaaaacagggatgaacgtgaagccgcattgaagtaggtgagcgattcaccgttttactcgcattttcccacggtcctgctagactcgaccattcaactctgagtctggattctttcgattgttcacttacacttcaggcaaactatgcgcgagcgcaatcagcggattgggttaagcttatttttctgctacctgttcctatacggcggatttgtctttctggcggcattcttccccgaagtcatggaccgcatggcttttaaaggcctcaacgtcgccattgtctacggcttcgtgctgatcatcgccgctttgatcgcggcactgatctacggattcgcctgcaaacctgaagaagacacgcagccagcaggaaacaccgacacctcgacatcgaccgatgaaggaggtgccgaatgatataccaaccctccaccatcgctgttgttgtcttctttgcctttaccgggttcactttgtggctcagcttctatctggggcgtagcgccaaatcctccgcggggttctttgccgctcacgggcagattccctggtttgtgaatggcgtcgccttcgcgggtgactatctctccgccgcttcgttcctcggtatttgcggcatgatcgcattttacgggtacgacggcttcctgtactcaatcggctttctcgccggctgggtcgtggcgctgttcattatcgccgagccaatgaagcagctggggaaattcaccttcgccgatgctctggatgcaaagtttaattcacgcggaattaaactcgccgccggtattagcacacttgctgtgagtatcttttacctgattccgcaaatggtcggtgcgggtgtgttggtgcaacccctgctcggtttcccacattgggttggggtggtcatcgtcggtgcgacggtgatattaatcgtggtgaccgcgggaatggtctccaccacctgggtgcagttttttaagggggcgttactggtcgtcttcagcgcgatactcaccgtcttaattcttgccagaggctttgaagtttccgatggcggcgtcgatggctatcaattccaaaccctagggccattgtcgcaatcaggattgtctgctgatgccgttccattgggtgagaattacttacgcatgccctcacctgaggatgatcagtccattctttggcgaattgatcctcaggaagacggccaggtcatcctacgagaatgccagactgtgcactcggttgacggaaaaatgtacgtcaacggtcaaccgaaaggtaccaagaaaggcgagcccgaacttcatcccattggttacctgagcgaactccctgatgggaaagagaagaccggaccggtgggaccatttgaattcttcggaacactacaggagagcgaagtcgtcctgtggaagaaggacagcgttgaagaaggtgaaacaaaattaactgtttactatccccagccaacacccggtaagcaggtgttaaggcctggcgaacatccgcgttttaaggggattcgcagtgataacccactcgacaaattaaacttcttctcattaatgctcgcattgttttgcggaaccgcgtcactccctcacatcttgattcgttattacacggttaaggatggagttgccgcgcggaaaagtacgatcctcggcatcggcacgatcggcttcttctacgtactgactctctatatgggactcggtgcgatgaccagtggtgcaatggatgtcaccaacagcaatatggccgcgccgctccttgcgaagagtatcagcgaattgctcttcgccttaatttccgccatcgcatttacaacggtgttgggaaccgtcagtgggttgatccttgcatcagccggggcagtgactcacgaccttgccagttccatcggcggactcgaactgaacgagaaccaacagattcggctcggaaagatcgcggcggtagtcgtcggtctctttgcgatcgtgctcggcattttgttcaagggattgaatgtcggctatctcgttggatgggcctttagtatcgccgcctccgcgaaccttccatcgctggtgatgctcctgttctggaagaaaaccaccaaaagcggcatcattgccgctgtgttggtgggcatgatcacttcactgggctggatcctcctgagttcggatacctacactcaggtttacggtcttcccgccgaacaagctgtggtgcccttcacccaacctggtattgtgacaatccccctcggcttcgccacacttgtgctcgtctctttactgacacaaaagaaaaacgaagaggcctgacctgaagaatttcgagtaaaacctgttcagcaaatcggacgtgcagaacttttgcccgtttgatatgcttcccccatcggagaggtggcagagtggccgaatgcaccggtcttgaaaaccgacgtaccgagaggtaccgggggttcgaatccccccctctccgcatacaaagaaacacgctccgcaacccctttggtaacaacgggttgcggagcgtcgttcattccctgcccccctgttgtcccagagttgtcccggttcggatcctccggtcccggaacggtcgagctgtacccgaatggtcccgtggcttgcgccatcagcgttacaaatgcagtgattatcgcccattgcgggttacggctaacatacatctcagtcctccttgtcgttcaggtcgaaattgaccgtactcataaatcgctgacttacttcgtcagcaaggttgtaatactgcgcccccacggacatatcgatctggtgaccttgccagatgtcgacaactggttttgggactaactcgttgacgcaatgcgtcttgaaaaagtgccgaaggctgtggacggtaaagccattgtcttcacgccctcttggaagcttcaattttttgaggattcgcaggaggctctcgttgagccgctttgtgctgatccagtgcccaccgtccggataccgtttgcttggatccgcggtgaagaaccattcatgttcatgatggggtctggagagaagcaactgtttgagtcgaggatggaggggaacttttcgtgactcccttgtctttgtttcggcccccgggcgagagacgatatggacccagttcccctcaaaatcgacatccttttgacgtagatgtcgtagttcacctgatcgtattcctgtaaatgccagcattgcgaactgcagacggtatgtctcagtagcgtgctccagaatagagagcacgttttgcagtgacatggatggctttgaggcccgtcgcggtttaacgagcttatactcagtgagtggattatcgttgattagttttctttgctgacaccactttaggaattgctttacgacaaccgactcgtgataaaccgtactcttttcgtgtatctgccgtctgtccgagcggtaatcatcgaacagcaacatatcgatcttgctgagataccgttttcggtgcttgaggcagaaatcgctaaacgtattcagttcacctctgtatcgaactattgtctttcgggcacgcccttccgattcaagaaagttgagatatttctcaactgcttggctaatctcgacagccggagatgcggttgagtagtgccccgaggcgagatcagcttcgatcttcgcagcgcgttgcctcgcgattttcatgttgggtgtttttagtgaaacgcgccgatgctgaccattgctccagaaatcagcgcagtatatgttcttttttcctctggggtagattttcactcggtccaagatgtgaaaacgatttgcttcactcactaattccattcctttccattgaagagtatgtctagcgcgcggtcgcgccagatgaggttatgtttgccgcgcttcctgaaagcgccatcgagtcgccccttcgcaatccagtcgtaaatagtcttcggactgacgccgatgagcttgccgagctgagcaggcgaaaggatcaccgggtaatgagcacccgtaccttcctgaaaggcgcgagatatttcactcttgctcagtttttgctgctgtgtgctcattgcggaaattgttgtcgtaacaacgtattctggtgggggcagctacacctgatgtgcgactgcaacgacagcaattgtcggaaaagcaagctgagatcctaccggagcactcacgtaacacacacggagatgtctggtcgctggagcgtcgtttctagctctgttaccaatcaagaaatcggcttaagtagtttcgactggctcccatagaatgtacttcccaccgccatcaacacgaaacttgattgctttgaggtttcggttgagtgaccttactgagtcgtgaagtggtttcttatcaggcccaagggcaaatggttctttgactgaggtctgccaacggttcttctcgaatgcaagaatgattcgttcaatgctgctcgctggctccgttctccgaacttttcgaacacactctgagtcaaaccacaattcgcttttctctgcgatgtattttggaagtgtcttacctgttgctggatccagttcaccacctacttccattagcagccaatctgcgtcactcccagaaatcaggcccatggattgagctacttctaatacatacgccaaccttggatcgaggtttttgtaggttggcgtatcctgcggtcgaacatagttccacatgccgataaggccgagttcttgatacgctatttcaggatcgttatcgaactgataccggtcattagtggagaaataacgctcccagatttgaatggcaaaaccctgctggtagcaagtcgctgtcagcgccctaagcttgtcagtcgctttcaaggatagagttggctgttcagaaacgtcttgcatactttcttgtcctgatgtgactaacaagatcaaatcatactctgctcaaaaattctcaattgtggaagactgaatgtcgccataaagggtcagcagtgcgaaagctgaatcatttcgtcccgatggattgctgcttccgtacggatttcaaacgactacttgagctcacgaagtgagcagcagcgagtttgcttgtagccaagaggctgttttgcgggtacagctcaaatatgtgagggattggaagctagtggcagccgagtggtgacagatgagaagctctttggcaaaacgtcccacaaactgtggaaggctaatcgccttcatagtacttgacacacttccgcagaaaatttagctgatcagtacgcaattcacgaatatgctgagcgacatcaatcaagctttagcttggttgccgatcgatgaaattgcttactgagattcgtttatttgcattcggcacgacaggtgacttagggaagctttgaagcgatttgaaaagtcttacagagagtcctggtagcaggccaattagtgggtgtgcagcttacgagcagcacatgttctgacaacagctgcaggtcagataggagcagcaacagatcgcaatcgaacagcccgaaaggtctttgtcgttcgcggccacgtaggtgccgttgccacatgggatacagcaggttgcatacatcgtgacactttgggcatcacggactccagccgctgaaagcaggcttcgttcgatcgcgtaccatgccgacagtaccttctccgacgcttgggacaatacttctcttcctcgggtaagctgatctcccacgaagtgcagtgcctcgcttcgaatcggagatggaatctctgcaggggtaacttctgaacgaagaccgattcgtgatatctgctccgtggtgtgaatctataaataaaaaaggcccctcaagggggcctggcggttgcaaagcagagccgtgcggcaaacgaatgccttactgtgacaacaggcaagcgttgctcggatacactctcggtagtgtacgcgtgcaaatagacggcagcaaggctattctggaattctttccttgaatttttgccgtcgcatcgagattcccatcatgaagtacttcctcgggcttgatatcggagccacctccatcggctgggctgtcgtgcatgtcgacagtaacggtaatccgaaacggatcattgattccggagtccgcatctttgaagcgggagtcgaaggggatctcgattcaggaaaggaatcctccaaagccacgaaacgtcgtgaagcccggctcgcgcgtcgacaaacacatcggcgcgatgtccgccgccgcgctacatggcgggtgctcgaaaagcatggcctgctgccgaagctcccgtcttcagacggtattcagcgcgatgaagccatcaaggaactcgatgcgaagttgaaagagaagtttgttgaggcaggcaaccatcagcaggttcaggtactgccctatctgatccgtgccgcagccgtcgaacagaaactggaactcgaagaactgggccgtgctttctaccacctcgcccaacgccgcggctaccaaagcaatcgtaaagcggaccagattaagaaagatgacgaggacctcggcaaggtcgcgagcgggattgccacattgcaagaaaagaaaggtgaccgcacgcttggtcaatacttcgccaccgtgcatcccgatgaccgcaagcaagaagaagaacgcatccgccagcaatggaccgcgcgggagatgttcaaggaagagttcgagaaaatttgcgacacgcagcgtgagcattatccggacctctttacagaagagttcgtcaaagaactccgcgttgccctctttttccagcgtccgctcaaatcacagaaggggctagtgggtcgctgtgcgatttatcccgagtaccgccgctgccaactcgctctgccggaagcccaggaatttcgcgttctgcagcagttgaatcacctgacctataccttgcctcagtcgacaccccaacggctatcaggtgaacaatggcaaaaactgtatcacaggttaatgaccatgggggattgcaatttcaaggatgcgaaaaagctgatcggcatcaaacagaacgtccccttcaatctgcaggaagggggcgaaaaacgcctcgtcggtaatcgtaccggttccaaaatgcggaacgtcttcggcgatgaatgggataaatatcccgccgatcgacaggatatcatcattcgcgatgtcctcaactatcagaagcatgacaaacttgtcgagcgggcccaggaggcattcgggctctcgcaggaaaaagctgagaaacttgccggcacttcactcgaagatggctactcccgtcactcgcgggtggcgttacgagagttgaacgaagtaatgtcacgagaggaacatcccgcctacagcgaagcccggctgatcattgatcctgaagctttctcgtccggcgatggcctcaaatcactgccgcctctcaaaaagttctctcaggacttcggtaaggaaatcacgaatcctgccgtcacccgcgctctgaccgaagtccgtaaagtggttaatgcgatcatcgaagagcatgacaagccgtggaagattcgcattgagacggcacgggaaatcaagcaggggaaacgaagtcgcgaagtcacagcggacaagatgagaaaacgccaaaaagagcgagaagcagccaagaaacgaatcttcgatgatcttggttttgaagccaaacgaggcgatatcgaaaagctgcttctctatgacgagtgcgacggtaagtgcccttactccggggatgttatcggaagcatgcagcgtctattcagtggcgagtttgaagtcgagcacattctgccgcgtaagtatcttgatgactcattcaagaacaaaacactctgccgaagtgacttaaataaacgaaaaggcaatcagattccgtttcaagctttcggtcaagacaaacaggaatggactgatattttaggtcgagtaggagccttcaaaggtgaaaaagaagtggttgcagagaagcttcggcgattccgcatgcaagaaccgcctgatgttgatgacttcgtagaacgacaattaaacgatacaagatacaacaccacgcttgcctgcgaatatttggctctgctctttggagggctgtgggatgaagataatagaattcgccgcattgaagctgtagcgggacaaatcaccgctaaagtgcgcgacgcgctcaaggttggaaaaacacgcgacgtccacacacatcacgcgctggatgctgtcattgttgccatcaccagtccttcctacatcaacaagttcagtgtcgagaaccaatactcgcgtgaatcgggccgcgtgatccgtgatctgccttatccgtgcacgaatttcaaatcagaactttacgccgctatcgacaacatcctggtgtcacaccgccccacccgccgcatcagcgggccgctgcataaagagacgctctattcaccacggaaagaggatggcaaggttcgtatccgcaaaccgctcgcagctctttccaaagctgatttgcagaaagggcatatcgctgacccggtgctgcgagccatcatcactcaaaagtgggaagaagccggaaagcccgacccggccaagttcttcagcgatgagaagaacctcccaaccatgccttcggaacagggcaacgggccaatcatccgcaaagtccgcctcgccctcggcgacaacccgcaccccattggcgataaaaagcaccgacaacgacacgcgatcctgggctcgaatcatcatgtcgaattcgtcgccatccatgatgccgatggtgagatcaagaagtacgacatgcgtgtcgtcagcatgctggaagcaaaaaaccgtgtgagggatggccgcccggtcatcggcgacggtctggccgagaacgagtcagcggtgatgagtttctgcaagaacgacatgctgtggcttgatgatgttgacggcgcccgccgactgttccgcgtcgccagtttctccgagggcgacttcaacgtccgtccccacgacgaagcccgcctcaaaaaggacatccccaagcagaagatcatcaaagactggcgaatgcgaacggcaaaggcggtgatggagcggaccccggaaccggcgaaagtcgggacattgggaaagtaatccggccatcacttaaaagtaggtagtgaaacaaaacacgctaaccaacttctatccagaggaaaatcaatgcgaatcatcatcactgatctgacacgattcaggcccggaaatccagacgtttgcacagcaggtgttgcggaggacggaaccgtaattcgtccgatgccctatctgtcaatcgagaattgcaggaaactgaatatccaccccgggggcattctcgaaggacaattcacacttaagaattcaccggcacctcacgtcgaagatgccaaccacggtaagctgacatttcatggtgcgtgttcaagcgtaaagtttcgcgagactcttgaaaaaacgacataccccaatatttccgaaggctttggcgtacccattataaaaagggagaaatgcattcccacgaccagtccgcctgtacgatctctcatcactatcaagattaatccgctaagcttttccatcgttcaagatagctaccaccctgaacgactcaaggcacatttctctgatcgggctggaatcgaaatggcttttgttagcgttacagatcgaggcttctatgattatgctcaacagcatagggaagatcttcggtcgtttctggagatacagagattcatccatagtcaagaagaactctatcttcgactgggactaagtcgttcgtttgaggcacctgacggtcgcaacgggttttggattcaattaaatggtatttatacgtttcccgacaagctggagtacatcaggtgctacgaatagatggtgaaatatgaaaggaaacgacagatgagcaaagggtgcttgctgacagtcggtcactctaaccgcagtgataccgaattcgtcgagttgcttcggatgtatggagtcactgcagtggccgacgttcgttcgcagccctacagtcgacatcttcctcactttaaccgcgaaccactgaaaaaacttctgtcggtcagcaacatctcatacgttttcatgggtgaggaacttggtgcgcgcagaagcgaagccgaatgttatgtcgatggacaagcgaagtacgaattgatcgccaaaacgcatacgtttcatgcggggcttgagcgaatccgtactggtgtcaaggagtacgtagttgcgctgatgtgctccgaaaaagaccctatgacctgccatcgcgctatcttggtcgcttcggcattacgttctgaactcgatattcgacatatcatttctaatgaaacactggaatctcatgaagagcttgaagaacggttgcttcgccagtggaatctggatggccagaatcttttcctcacgaaagatgaacttctccaggaagcctacgaaaaacagtcagcagagatcgctttcgtcgagaaagagaaggcactgatcaacgatgaaggccattaatatgattgagacatttacgattggcttcacgaaaaaatccgcggaagatttcttcggaaaactgcaagaggcaggcgttaagcggttattagatgtgcgactaaacaacagttcgcagctcgccgggttcgcaaaacgagatgatttacggttctttttgaaggagttggcagatattgagtatgaacatgttccagaactcgcgccgacgaaggagattctggatgcttacaaaaaacatggtggtgattggaatgtctacgagcgggaattcatggagttgatggcgaaacgtgcaattgagaagcaacttccttatgagttggtacagtcagcttgcctgctatgcagcgagcattcaccggaacattgccatcgcaggttagtggtggagtacctcgacaaacattggaacggagtctcggcaacacacatcacatgaagaggcgattaccacgcctgagcaacatttccccatcgctgcaaattaacaaagactgacggatgcgaaccacgaaagcagcgatagagcggaattccaaaccggcgaagattgtgaatctggggacaagcgactaggaattcttgttggaactggactttttgtaagggtcaatatattatgaaccacgatttggttgtggtcgggtgttgagggattgatcaacctgagcctagcaggtccaaactacagtgacgactgtcgcaccaaatcgttccgtcagtggcagcagcactaatttgcgatactcggaatttcacccgagggtcaattattagctgtggcttcaaagggcgttgctcgggtacacgagccaactgccgctggcgtctctattttccttttattgtcaaatggctaaatgtttcgctgacattggttttcctctcacaaggtggtagccgcgagatactcaactctaattctttgaatcgcttcacgtgcatcaatccgcagaaccggtgcaaaccacccattttatcagtgacaaccccccgcaccactggcgataattccactgaacggagtcgtgatttcccctcactttgcccggctccgttatgcagaatcgcattctcgatatcgccgaacaacctgcccggctcgctcttcgcgggggattgctggaactgaaaagtggtgagcgagccccctttcgggtgcggcccgaagaagtgggcgttgtgctgctggctcacccacagatttccatcactcagccggttctctccgccctcactgccgcaggcggagttcttcttacctgtgatgaacgtcgtatgcccgctgggatgatgctgcctgtcgatggtcatttcacccaaacagagcgtttcgccaaacaggccgcaacaaagcttccgctgcgcaagcgattatggcaacagatcgttcgcgccaaaattcgtggacaagccgaggttctggaagaaatttttggggaagatgcggggataagggcgctgattcctcaggtaggctccggcgaccctaggaacgtggaagctcgtgcggcccggaagtactggccactgctgttcaacgacgatggattccggcgggaccgcgaccgcaatgaccaaaaccgcctcctgaactacggctacgccgtgctgcgagccattaccgcacgcgcgatctgtgccgttggtctgcatccgtctgtcggcctgcatcacaagaatcgctacaacgccttctgccttgcagatgacctgatggagccgttccgccccgtggttgatctggttgttgcccgccacgttgagggaggtggtgacacggagctcaactcgcaaagccgacaattattgattggctccctgttgggacgctgcattgttgaaggtaagcagttgacgctgttcgattccttggccgaactgtcatcatcgctggttcgtgtcattgatgccggatcgggatcactcaccttaccggaaaggctgtggcatgcctcgggccagcctgattgattcgggatttcgaaatatgtggatggtcgccatgtttgatctgccggtacagaccaaagtcgaacgtcgagccgcagcccgattccgcaagatgcttcaacgagaaggcttctcgatgctgcagttgtcggtttacgcacgatattgtggcagcgaggaatcagccaagacattccgtaaccgcattggaaaatcacttcccaaagacggcaacatccgcctgatcaaaatcaccgaccatcagttcggcaaaatggagagcttcatcgggaaaaaaccagtcgaaaatgagtctactcccaaccaactggagctgttttaatgcctcctttcgtcgtaagtgattgtcactgttcgagaagtgtccgaggtagtgtatccgagcaacgcttcccaagcagccacagcaagttctgggtcatctgcatcgagttcatcagtgtatccgagcaacgcttcccaagcagccacagctcagtgaactcgatcgaccgatagccgatcagtgtatccgagcaacgcttcccaagcagccacagcccatgcgtcggtttcgacgagcatgtttttagtgtatccgagcaacgcttcccaagcagccacagcttacaggccacgatcagcgggaacttcagcagtgtatccgagcaacgcttcccaagcagccacagcatgatcgggttctgcggaagtggtaccactagtgtatccgagcaacgcttcccaagcagccacagcgtcgtttcttgacagccttgggcatttcaccagtgtatccgagcaacgcttcccaagcagccacagcatactgaatcccccgcaatacatgtctcacagtgtatccgagcaacgcttcccaagcagccacagcgccgaaaaatcagatggtaatcggtatctagtgtatccgagcaacgcttcccaagcagccacagcggaaccaaccgttcagacgactgtctggtgagtgtatccgagcaacgcttcccaagcagccacagcagagtggacacaacctatctttcgccctggagtgtatccgagcaacgcttcccaagcagccacagcgaaagtcacgccgggccaggtcgatgacgtagtgtatccgagcaacgcttcccaagcagccacagctcaatcaccacagcgtcaacactttgccgtagtgtatccgagcaacgcttcccaagcagccacagcccgatctgggaagggacggtgagcctaactagtgtatccgagcaacgcttcccaagcagccacagccggaccttcaccggggaatcatggcggctaagtgtatccgagcaacgcttcccaagcagccacagcaatccttgcgatggtgtcaccttcgtgagcagtgtatccgagcaacgcttcccaagcagccacagcacagtgtagacgtgatcagcgtccggtccaagtgtatccgagcaacgcttcccaagcagccacagcccgtagcaaggggaattaaacacataaaggagtgtatccgagcaacgcttcccaagcagccacagcccgtcacacgttatcgtgcaacgtcgcggtagtgtatccgagcaacgcttcccaagcagccacagcagtaagtcaacccgttctatcttatatatagtgtatccgagcaacgcttcccaagcagccacagccagtgggccacaaaatcacacgactgttttagtgtatccgagcaacgcttcccaagcagccacagccccgtcctatcgcggacatcatcacgtcaaagtgtatccgagcaacgcttcccaagcagccacagcagcgaccgactacgcctcgaaggattccaaagtgtatccgagcaacgcttcccaagcagccacagccgatcgtcgcgttgttgtagtgcgtcgtaagtgtatccgagcaacgcttcccaagcagccacagcgcaccaagtttcagggcaacaccgcctcgcagtgtatccgagcaacgcttcccaagcagccacagctgaacttcgagaccgtagccgtacgttggcagtgtatccgagcaacgcttcccaagcagccacagctgtgtcagcacgggccgcccgcgacatcaaagtgtatccgagcaacgcttcccaagcagccacagctttgacgcgccagactgtgcgtgctgtgggagtgtatccgagcaacgcttcccaagcagccacagcaccctcacctacaactggcgagttgatgaagtgtatccgagcaacgcttcccaagcagccacagcgataaagaaacgtatgatcacaatcgagataggtttggagttcgatcactgacgtctaacactaccaatagataaacgttcatttttcgtcatccctcaattatccgagttttacgcatacgaagggggaatagtagaaagcgtgaggggaggaaatggtgactcagctaagtgcaaatgacgctattgggagtaagctattacgtgaaatagagttacgaagtgcacttatcggattgaattgtcgatcgtggtgtccactacggtatggaattcaaatcaattgactgacttatgaaagtcctttagctgcagagatcaaaaattctgctgttatattttgatcgctggactcatttactcatcacgctagatttcacggaatcacaactggacgcaaattgtcacagttacttcctccgtgcgccaagaagtggagaatcttatcttgtctggggctattaccgaagatggagaagcggagcacgctaatgcataacccctttacagaagcgacagacagcgatcatgaagatctcgagttggtccgcagagccaagaacggcgatcgggaagctttggaaaggctgattctgcggcaccaagcgtggatctacaacatcgccctgcgcatggtttttcagccccaggatgccgaagaagtcactcaggaagtgctggtcaaggtcatcactcggctcagcagctttcgtgaggaaagcaagtttcgtacttggctctataggattactgccaatcatgtactcaatatgaaacgtcgtggaggggaaagccagcagcagacattctccctctatgctgccgccatcaacaggacacctgacttggatctccctgatccgacgagtgtacctgtggatgtgccgatactgatcgaagagacgaaaattgcatgtacaactggcatgctgatgtgtcttgatcgtagacaaaggctgatcttcacgctcggagaaatcttgggcgtcagcgataacgtgggcagtgaggtcatggagttctcggcagataactttcgacaatgtctcactcgtgcccggcgcgatctgtaccaattcatgaataatcagtgcggcctggtaaacgcaaacaacccctgtcgctgcccaaagaaaacgaaaggttttatcaatgatgggcacgttgacccagatcatctacttttcagccctcgccactttcagcggatcaatgaagtcgccgcagataccgtcagagaaatcgacgatgtcgctgaccgctcctatgcggcgatttaccggaatcatccgtttctgatgccttcggagcaggcgcagtggcttcgacgaattctagatcttcctgaggtccgtacgacattacatcttaattgagaaaatttccgtccaatattgtcacactggaagctgaaacgtgtctacgtgtttaagacatccattcttttaccaacgaggacacgtgccatgtcaactttcaaaggacgtattgccctggtaaccggggcttcaaagggcatcggagctggaatcgccaaagaactggccgctgccggagcagcggtcgttgtgaactacgcaaccgatcagatcggggcagagacagtggtgcaagagatacttgccgctgatggtcgagccgtagcgattcaaggcaatgtcacaaatccggatgacgtgcgcagattactttccgagtccaaaagggtattcggctctcttgacgttcttgtgaacaatgccggcgtctacctgccgatgcagctggaggagattaccgttgaggagttccgtcgagaatttgatactaatgttcttgggccgttgttaatgattcgcgaatccgttgggtacttcagttccaacggaggaagtgtaatcaacattggctcgggggcttctcaaatgtgcccacctgggttttcgatttattccgccagcaagagcgctctggatgcgatcactcgagtactctccaaggaacttgcaccacgcaatatccgagtcaactctatcaatcccggagccgtgctgagtgaaggcacacattcagccggcttatatggcgtcggcaacgacttcgagcgaaagctggttgagtcaacgccgcttggccggatcgggacgccttcagacatcgctaagattgtcgcattcctcgcttcagaggattctggttggctgacaggcgaagtcgtgctggcatctggcggtttgagataactgagaaaaaaatcaattccttattcttataaagtcaggagagtgcaatgtctgcctacttagtcttcctgcgtgagaagacgctcgacaagtctgaattggagacctatggggcgatgactccagcaacattagaaagccatgcgatcaagatactggccgcatatggtcgtcaggtgacgcttgaagggagggatgtcgaaggaattgtcattgctgagtttccttccgttgaagaagctcaggtttggtatgacagcccagcgtatcaagaagccgctcaacaccggtttcgaggggctgtctaccatggcctgattgtcgaaggagtgtgacttctttcttatatgtaaggtacagcaacaatatttcatatcaaatagttgatcgataccaccgtcgcaagctcctgatccagtaggataataatggctacgatcttagaggaatagcacagctgaatgatgaagccagcacgaatgatcgcgtctaggtgtcatcattccagaaacctgccagatttggtgcatttcggttaatggttgaagcaattgaagttgtgccccagacaatattttttaattctaactttgatccgataaatctaattgaacgatggagttggttaagcgactgtgttgtggatgaagacgctttaaatgtaggaaatcacggtttatgttctcttgcgacagcgtatgaagaacacgggcagatgccacataagggccgtagtgataccatgcaacttcttgattgccttgaattcagatggtttaggttcctctggcagttaggaaactacccaactggggaatgatttatcgcccgtaattgatatgagttactacatcaccaaacaccttgttcaaggagcatagcatctgacggacatccaccttgagaagctgtcatcatgccgggtggcgaggtaatcagcgacgccgaatagcactcgaaatcagcacaccatcatccgtataaatgggactgagactgacttcaatagggaactctttaccatcccgatgtagcccggttaatgactgtcctgcccccatgcgtcttacatgtggatcggcgatgtagcgagcaaaattttctgggtgctgttgccgatatctctccggcatgagcagttcgacagtttggccgatcagttcttcgtgtaagtaaccgaacaagttggatgcttcggtattggcaaactttatgatgcggtttgcggttgtcacgaccatggcatctggagctgattcgagcagtgcttcgcaaaatcgttgggcacggcgacgttcggttacgtctcggatcgcactgctgaccagcaaacctttttcggtctggaccggactgaggctcacctcggcgggaaactcggttccatccttgcggcgtccgaacagctccaatgccgctcccatcgggcgggcatcagggtgatcgaagaattggcggacatgggccgggtgtgcagcacgaaatcgatctggaacaagtgtttctatcggtttgccgatcaattcatcaggagtgtatccaaatactttctctgcctgactgtttgcgaaaacgatgcttgatgtttcatcaataacaatcgtcgcgtccggagctgattccagaaggccgtgaaatcgttgctcgtcatgtttgcgttcggtgacatttcttccgacaagatagaccaacacctcgtcggcaatgcgtgagatactccaactgatccaatattgccggcctagagagtcatgaagacgattctcaatcgaagcactctcgccagtctcaattaccgacttgagcgcggattgcatgtcgatccagtcagcgccatcgacatgatccctaatcggtattgaatacagttcgttttcctcaatttgaagtagtctggtccaagccggattagactgctgcaatactccttcctcgttcataatccccagaagatcgggggacaaggcgaagaaccgttccctctcccgctctgacctcttacgctcagcccgatcggcaagccagatccgaatcgcaccggccatttccttggccgattgcggtcgatccttcggagacttggcaagtccttgcaggcagatcgtttccagttcgatggggacgtcccggttcgtttc

SEQ ID NO: 3945 - DNA, 23087 bp, synthetic construct
  source 1..23087: mol_type = other DNA
  misc_feature 1..23087: note = Synthetic
ccgttagggccgccgaaacgactgaaaaagaagaataggatggccgcgacgtgtacgtcgcggtgccgaaggcataggaaactcttccataagtcgaagttccgacggctgcgccgcatcgacgtgcacgtcgatgccatccattctttgaccaactttatcgtccaccgttcacgcgacaagcggaggcccgaaaacgtgttttttgaagaaagactggttgatatatcgtgaggttccgatataattgaatatggaggaagcagatgcccaaacaagctcaaccagaattgctcgatttagaagtactcagtcaggcggcggagtgcttgaagacggtcgcgcacccacatcgactgcggatgattcagatgatgctgcaaggacggtacacagtgggtgaacttgcggaagcaagtgaaattccaagccacatggcgtccgagcacctgcggttgatgcagcgatgcgggctactcggcagtgagcgtgatggacgtaagatgtattacttcgtttcagaatcgcacctggcggacctgatgcggtgtattgaaggacggttcagttaaaaaatttgccaccaaatgtcgtaacttcacgatattacgatcaataaaaggagaaagtgatgaagacgatttcaccagcggaattgcaggagaaaatcaaatcgggcgagtcagtccggctgatcgatgtgcggactccggcggaatttcgcgaggttcacgccgttaatgcagagaattacccgcttgattcacttcaaccagaagcactcaacggttcttcaaatggttcgggggaagatctgtacttcatttgtcgatcgggcgcccgggggaagcaagcttgcgagaaatgtgagaaaacgggactggagaatgtcacgaatgtggaaggtggcacactcgcctgggacgaagcgggactgccggtgaaacggggcaaaaagacgatgtcactggagcgacaggttcgtattgctgcgggtagtctggtcttccttggtgcggtgctgggctactttgtgcatcccggatttatcgggatcagtgcgtttgtgggagcgggactcgtctttgccgggatcaccgacacttgcgcaatggggatgatgatcgcgaagatgccatggaatcaggctacctaatctgaaaggccatcgactgaaattacttttccctggaagcggttttacgctgcttaataggttttacggatggcctcggcgtatacgccgaggtgccgtccggcatgggaacttctttaaaggttgcttccaacggctgcgccgcaccgacgtgcacgtcggtgccatcctcatgaatcactattcaacaaacaaaatgattctcgggcagaatgaacttgcgagtgttattttcttttttcactgacttggatgagagttgataccagatgaccgaatcacaaccgctccggattttaattgttggtggtgtcgcaggtggcgcgtctgctgcggctcgtgcaagacgatgcaacgaacaagcagagatcattctgtttgagaaggggccttacgtttcgttcgccaattgtggcttgccttatcacatcggcggtgagattgaagagcgagatgatttactcgtggcgacgccggaactgtttcgtaaccgctttcaaatcgatgtccgcacacagcatgaagtaacggaaattgaccgtgaaagttccgtgattcgtggtcggaatctggcgaccggggaaacgttcgaagaaccatacgacaaactgattctctcgaccggctcgcagccgattgttccccccttcgcccgcgatcgggcagagaacctcttcacgctgtggacgattcccgatatggatcgcatcctctcggaaatcaaaagcagccaacccaaaagtgcggtggtggtgggggcaggcttcatcgggctggaagttgtcgagcaactgcatcgactggggttggacgtcactctgattgagcgtgccccgcatgtgttgccgccgttggatactgagatggctctacttgttgagaacgagctgaaatcgcatggcgtgaaggtcatcacgaataacggcatcgccgatgtgcaggtcgataacaatcgtgcgactggcgtgttgcttgatgatggatcgacagctgatgccgactttttcattttggcgatcggggtttctccccgaaatgagttggcaaaaaatgcggatttgaaaatcggtgcgacgggtggtgtgacagttgatgagcaccagcttacttccgatcccaacatctatgcggtgggtgatgtcgccgagtacacgcacgcggtgacacagcagtcacagcgagtcccgcttgccggtcccgccaatcgttccggaagaatcgcgggcgagcatgccgccaccggtcgctcggaaccgatggctccggttctggggaccgcgattgtgcgtgttttcgatctcgacattgggatgacgggcttgtcggttgatctgctccaatcgatgggcagaaaaccgcgttatgcgatcatccaagctccgcatcatgccgggtattttccgggggcgaagaacctcacgttgaagctgatctatgaagcatcgagcggagtggtgttgggggcgcaggtggtcgggcagggcggcgttgataaacggattgatgtcatcgcgaccgccatccgatttgtggcgacagttcatgatttggccggggtcgatttggcgtatgctccgccgttcggcagcgcgaaagatccgattcacatggccgcgttcgccgccgagaatgatctcgcgggcaaaccggaattgatctcacccgatgcagacctgcaggactatcaggttgtcgatgtccgatccgcagcggagctggagcgattgccaatggtggctggtgggcatcatatcccactggatgatttgcgatcgcgcctctcggaactcgatcccgagaaaccgactgtcgcgatctgtcattccgccaaacgggcccatgttgcggcatcaatcttacgcggcaatggtttcgaggatgtttacaacctgacgggagggatgtcgattcgcaggttgtatgaagggtgaaggcttggggatgatgtggggtgaggcaggtagtcaggtcgggaaacctgaccacaactttttgaacgctgtaaagaacgcttccggatgtatgtagcggcagaatcgttacgaccgtcaggctcggcgatagcttgccctcttttcagtgtgctggacgagtcgactacagaaatcttagcgcgcggatcgatgtcctgttttgcacggctgcagattcggtaggccaccaggacacgtcggctatccgaacgaggcaatgcgggaatcccctctcgctgcctttcgtgacatggactgttgtgattttcgcatccctctcgcgtatcaatggaagtccgcccatgtctcgtcaaatcaagctgcacgatgctcatccactttccgagcaactgcaatccgccctcagccagtcaatgtattcgcttgctgccagccgcttaagtgtcgatgccggttcggaattcgttgttcttcgcggcaatgtcgacacctattaccacaagcaactcgcacaagaatcgattcgccaggtagccggtgatttgcgggtttacaacgaaatcgaagtggtctgaagaactcactcggcgttgtcggtatcttgctccgactctgaatccgcctgttcttcctcttcggtttcacagtgatcaccggagacgtcgagcagaattttcagagtaccctgttgggcacgctggaaggcatcgactgcatcttccagcggaacgatatctgcgatcaacggctgcacgttgatactttcgttagcaagcgcctgcagagccggcttgaatggaccgcagcgcgagccgagtatggtgatttcatgaatcacaaccgccgccaatgataattggtgtgctgtggagattgtggttttcatcacaacgacgccgtgcggcttgacgaatttcaacgcggtttccagcccggttggtgagccggtgcagtcgattacgagatcataccgtggtatgaagttttgcagggcgtcatcgagcagcaacgtgtcgatggaatactccaattgttccaatagcgcgagcttgtaggcgtgcttatcgatgcccgtgacgttgcagccatgactggccagtacctgcgcgcacagaaatcccagcctgccacagcccatgaccgccacattctgaaattgggtgacatcgatctgagcaggaatttgaaatgcagctgcaagcggttccgtgaagacagcgagttcgtccggcacattgtcgggaacacgatgcaggttcaagtgtggcagttgtagttgatccgcaaaggctccatcgcgattcaaaatgcccaggaccgttcgattcgggcaatggttgccgacgccactgttgcagtagtcgcaattaccacaggggcagttaatttcgccgaccactctctcgccttgaagtggcccatccgcggcgatgccgacaaactcatgtcccagcacaccttcgaagtccatgtaaccacggaccaactgcagatcggtctcacagattcccacgagtcgaacatcaactatcgactcattcgcaacagttgtgggggcggagtgagtatcgacaaacctcaaatcgccaccgaagagagtgacagcacgcatttcattcaacaccgcaagtacaccagtaggtcgatctcttccgttaaatcaacacgagcgactcgttgtcaaaaaggttggaatcggatctgggttgaagcgtcatacgacaggtatgaacttcatcgccacgtcggatagtgaactccacttcttctcccactcgccattcatcggaaagtgagtagaagtcgtacataccgtcaatcgattcaccttgaatttgaagaatgatatctcccagttgcaagccagcctcgtcagccggaccttggtggtagaggtcgccgataaagacttcacctccaaccgctgaaccgatagtcaaaccggcccatccgcgatttcgcctgcgtcgaccgtcatggtattcgctgccatcaatgaattcgccgtagtactcgttctcaccgttgtagtcatggaagtcgtagtaagatcccaagctaaagggcatggtgatcgattctcccatacggtcgacagtgatctcgattgattgatctttcacccagaactgcgacgccgatttgagggtgtcgatcaatgtgagatttaagggccccactcgctgaatgatatcacccgtgcgaatccccccgacagctgccggcgagttggggacgacatacacaaccagcaatccattttccgttttccattctcctgtgaacggaatagtgcggaaatagatgcccagaaaaccctgtgaccgcatgcgtgaaacgtgattcgtgcgaacgctgggggcttccgaggcggacaaactcgacaggcagattgggatggccgctcccaaagtagcggatagtacgatcacaccacaaagcaccgcagtacgaagcttatggtgggacgcatgcgtaggtttggcagaatcctcagtcatctcaggcggaaaccaatcaacaataagaaatagggaataaaaattaccgcaatagatatgtgggagagtgacagctcccaaaaaggccacgaccgaacactgaggttctaaccatggtcgaggaatttacaacgtaaacttgagaaatgatgcaaagttccgttggattcatccatcgtaaacagttttgatgaacaagcacgaaaaaatttcgattccgcaagattttcaattcctattcgcattttctcacaacttggcacacagccttgaggaattcttcccgcgaaccgtgactcttgccgactgtctcattatgatgtgagcaatctgctgcaggcaaaagagtttgcagtgtcggagaggtggcagagtggccgattgtgcagcactggaaatgctgtgtcctcgaaaggggaccgggggttcgaatccccccctctccgctttggatcaaccgcagtttgtaaccccagttgaatcagtgggttacgtcctgcgggtttctttggcacagttatctgtgccaaaactgtgccaacagcgtaagggttgtcagtactcttttgtggctgaacgaatcggctccttcttcaaaacagtggttgctggcaacaccatgctgccaacttgattgcttccctcgaagttgatcttgttgatttgtcgtcgtgattcttcgtcgtgcaggcagtagtaccggcggatcatacggctgctttggtgccccatccatgatttcagcacctgttcgggaactccggaatttgcacagatcgaacagaagtaatgccggaatgaatgcagtcttccatcaataaaaccgggctcgccatcttcgctcgggaactcgccagctaaaggttcgaggacgtcccggacgagtatttgcctgaccgtatccggctttatcttcccgccacgtggcccatgaaagaccagcccatcacttccgcgaggtacttgtcgcaggacatgttgcagcgtttcgtggattggaagtgagcgcgttcgatgacctttagtggttcgcagatcctctcttcctttacgtgaactcgtactttcgtttttcagaacaatttgactgtagtcaccaacgatgtccgaccatcgcaaggaggccaactcaccgatacgcatccccgtcgaagccagggcaattacaatgacccgcagccactgcatttcctcggtattgcagtgcgcaattatccgatcgacttcatgtggcttccaacagtaggtgttagaatcatgtgactttctgattgggacagttggcagttttgtttcaggcagatgattttcatccatcaggaatttcaatatctgttttatcgttgtgacctctaaatattggctagccctagcgtaaccttctgcgacaagccaagctgcataccgctcaatgaacacccgatcaatctgattccagtacttgatcttattctttgctgcgaagttcatcattttatcgaggactgctcgatatcgttttcgagtcgactcacgtggcccccccatcacttcagggcgttctgtatgttgttcgtagagttgtcgtccctttttaagatctagaagtcgcgtttcattggcatccagtaactgctgactggcgaggccatactcaacagccttgacgagatcgagttgacggagtgcggcgatggcagactctttctcccttacacccagagaacaccttcctaatgatggagtattcgaacgaccatctgcgaaatagacaccgtttcgttctcggagtagccaacgaaagtatgagcactgaatcacctcgtactttcttttgggcatatgcggacctttctaatttctaatgcgaaccccggccctatttcggaagcctgttcctccattgcggagcgggaccacggagtttgggtgcttgcactgtgtcttcagaggacatctcggaagagtgcggtattgcgagatcaaaagcgtttcgcggaatgcggatcgccgtgccatgtccgcccggctgcgaatatggaagagttccgtcgttaattcgccgacggacggtgctctctgagaggcccgataatcgggcaaacttttttattgagaggtaagactcacccgtctcactcatgattccgcctctgtcagaagactgactcaaactgacttaacttgtcagagagccttatgacaaaaaacggatttgaatttagggggaaacgctaacgagcgctttccccttgtacaatgagttagcttggaatcacaaatcgcttcttccagtcgctaccaagcgactcttcgatactgcgttcatcattgcgaatcgagtcttcactgacgccaatatactctgcgagacacaccctgatttttccgcttttcctgtagatttcgtctgccagatggaatgaaagtactcgccagtaatgctgaattttgaagcgtcttgcaaatgccttaaacctgtttttggccgtattttcatgagcaacaatcttcatccattccgagaggtggtcattgtctgagccactgcgaagtgcatcttccagcgtttccaagaaagtgccgctacctgtgatcgcatagatgcttggaacactagcggtagtgtttccctcccccaaacaatttcggctagcagctaaagaagggaattggggagcgagcggcacgggcatatagggagcggtcatgccttggaggtgccagtgaagataaaacttgtagaaatcgtcaacgaattgggcttccttgctatggatcggatttcggcgactaattgaaccgcttgactgaacgaactgcggaaatccgtttttcgagatttgcctcccgtgctgacgaatcagggcatcgtgctcttcgaggaaatcatgacaagttaaaagccaccccagataagcctgcctctgcattataaaagggctacttcttgtctcataaagcgacatgatgaattcaagctcagcaatgttctttcccaccgatttcgcttggtcctcgttaaatactggcttggcataatctacgaggtctttgtactccagaaggctatcttgaaaaacaactgcagcacccgcatgaagatcacagagtcgacaaagctcgaaatactgctttagcttggtagaaaatggcttgcccgtaaaagcttggtctttcaagagttctcccaagtccagcggaatcgaataaatggtgttgctttgaagttctggaaactgctgaggaacatttactctatggaacaatccttctgcctgaacttttaacatctcactcctccatgactgcatccagtctagtagaatttcaacttgcacagagaacgatctgaataactgatcgtgaacaataagatgaaaccctgaaaacgtgtttggacgcaatagcgcatagcagcttgataatgaattgacatgattcggtgagcaatttgggggagaagaagattgtagacagaaggccacaaaacagtacgaaacagtttgcagagagaattaacggctatcccaaaacttagtgtctgcagtcgtaccaggagctggaaaatctgccagtgctaagatgcctgccatttatattgacacgtttttgccctgaatttaggagcatggcgtgtgagatccaacgcctatgtgttgagcaacggcatcgttctcctcacttcttggcaatctattctgatgtctcatgaagctactgaggaacgttgttcatttctttcagttcaacctatctagtaaatcaactacacggaaatagctaatatgacatggtggccaaccatctccaggagttatctggtcgtcagataagcatttcatcaggatcagttacacttcaagaatagtagctcacgagcagcacatgttctgacaacagctgaaggtcaggcaggagcacaacgcaatcgaacagcccgaaaggtctttgtcgttcgcggccacgtaggtgccgttgccacatgggatacagcaggttgcatacatcgtgacactttgggcatcacggactccagcagctgagaacaggcttcgttcgatcccgtaccacgccaacacggccttctccgacgcttgggacaatacttctcttcctctggtatgctgatctcccacgaaatagagtgcctcacttcgaatcgaaaatggaatctctgctgggttacttctgaacgaaggccgattcgtgatatctgccccgtggtatgaatctataaataaaaaaggcccctcaggggggcctggcggttgcaaagcagagccgtgcggcaaacgaatgccttactgtgacaacaggcaagcgttgctcggatacacttttcatagtgtacgcgtgcaaacagacagcagcaaggctattctggaattctttccttgaattcttgctgttgcatcgagattcccatcatgaagtacatcctcgggcttgatatcggagccacctccatcgggtgggccgtcgtgcatgtcgacagtaacggcaacccgaaacggatcatcgatacgggcgtccgtatctttgaggcaggagttgaaggggatctcgattcaggcaaggaatcctccaaagccacgaaacggcgggaagcccggctcgcccgtcgacaaacacatcggcgcgatgtccgccgccgcgctacctggcgggtgctcgaaaagcatggcctgctaccgaagctcccttcttcagacggcattcagcgcgatgaagccatcaaggaactcgatgcgaagttgaaagagaagtttgttgaggcaggcaaccatcagcaggctcaggtactgccctatctaatccgtgccgcagccatcgtacggaaactggaactcgaagaattgggccgtgctttctaccacctcgctcaacgccgcggctaccagagcaaccgcaaggcggatcagatcaagaaggatgacgaggacctcggcaaggtcgcgagcgggattgccacattgcaagaaaagaaaggtgaccgcacgcttggtcaatattttgccaccgtacatccagatgaccgcaagaatgaagaagaacgcatccgccagcaatggactgcgcgtgagatgttcgtgaaagaatatgaagctatctgcaataagcagcgcgagtattatcccgacttgttcaccgatgaattcatcagagaactccgcattgccctattcttccaacgcccgcttaaatcacagaaggggcttgtggggcgatgtgcaatttatcccgagtaccgccgctgccaactcgctctattggaagcccaggagttgcgcgttctgcagcagttgaatcatatcgctgttcatgtgccacaggagcccacacggcgattaacacccaaggaatggtcgtcactatattatgcactcatgacggatggagatattacctttgcagcggctaagaaattgttggaactcaataaacgaggaacaaaatttaatttggaagaagggggcgaaaaacgcctcgtcggggatcgtaccggatccaaaatgcgggacgtcttcagcgaagaatgggatgaactccccgctgagcgacaggacctcatcattcgcgatgtgctcaactatcagaagcacgacaaactcgtcgagcgagcacaggaggcgttcgggctctcgaaggaaaaagccgagaaacttgccggcacttcactcgaagatggctactcccgtcactcgcgggtggctttacgagagttaaacgaagtaatgtcacgacaggaacatcccgcctatagcgaagctcggctgatcatcgatcccgaagctttctccgctgatgaatcggccagcgaacttccgccactcaaagagttcagcgaaaagtacggcaaggaaatcaccaaccccgccgtcacccgtgcgttgaccgaagttcgcaaagtggtcaacgcgattattcgcgagcacggcaagccgttgaaaattcgcattgaaacggctcgggaaattaagcagtcgaagaaacgtcgcgagcaggatgcggcaagaatgcgccaacggcagaagcttcgtgaaaaggctaaagcggaaatactcaaagagatgaaattcgaggccaaacgaggtgacatcgaaaaatatctgctggctgaagaatgcaattgggaatgtccttataccggagagcggatcaacattcgctcgctactcggttcctcaccacagtttgatgttgagcacatttaccctcgcggctatctcgatgattccttcgccaataagactctgtgctatcaccaggaaaacaggcatgtgaagggagacaagctcccttatcaggcatacggccagcaagtcgaaaagtggggacagattctcggccgcgtcaagaaattcaaaggggaatacgcggatcgaaaactgcaacgctttcaggtcaaggaagtaccggatgattttgtcgaacggcaactcaacgacacgaaatacaacacagttctcgctgcggaatacctcggtctgctcttcggtggcctttacgatcttgagggaatccgccgcattgaaactgtcgcggggcaaatcaccgccaaggttcgcgatgcgctcaaggttggaaaaacacgcgacgtccacacacatcacgcgctggatgccgtcattgttgccatcaccagtccttcctacatcaacaagttcagtgtcgagaaccaatactcgcgtgaatcgggccgcgtgatccgcgatctgccttatccgtacacggatttcaaatcagaactttacgccgccatcgacaacatcctggtgtcacaccgccccacccgccgcatcagcgggccgctgcataaagagacgctgtattcaccacggaaagaggatggcaaggttcgtatccgcaaaccgctcgcagccctttccaaagctgatttgcagaaagggcatatcgctgacccggtgctgcgatccgtcatcactcaaaaatgggaggcagctggtaaacccgacccggccaagttcttcagcgatgagaagaacctcccaaacatgccttcggaacagggcaacgggccaatcatccgcaaagttcgcctcgccctcggcgacaacccgcaccccatcggcgatgaacagcaccgccagcgacacgcgattctgggctcgaatcatcatgtcgaattcgtcgccatccatgatgctgatggcgagatcaagaaatatgacatgcgtatcgtcagcatgctagaagctaaaaaccgcgtgagggatggccgcccggtgatcggcgacggtctggccgagaacgagtcagtggtgatgagtttctgcaagaacgacatgctgtggcttgatgatgttgatggcacccgagttctctgccggttgtcaaagatgtcggagggcgatttgagtgtgcggccacattacgaggcgagaatcgaaaaagaaatccccgatcaggagaagaaacgctggcgattccggaccgcgaaagccgtaatggcacgaaacccggaaccagcgaaaataggaattctcaggtaagccttggaaggttaggtataactgtaggctgtggctcccgaagaagcgttttacggatacactttttaagtatcatcaagacgattcaaagtcgttgttcatcgaagagcaatggcatagttttgttagagcattcttttgttgaaatattcctaatgtgtatgtcaccaacatacgtgtcggtgcggcgctgctgctggaaacaagatgcacaaggcttcctatgcctgacggcacctcggcgtgcacgccgaggccacccggccatgctattcagcatggaccatagcagcttctacgccgacccttcactaatccgcaaattccacacaatcctcccattttatcagtgacatcctcttcaccactggcgataatttcactgaatggagtcgtgattccttttcaccttgcccggctccgttatgcagaatcgcattctcgatatcgccgaacagcctgcccggctcgcacttcacggcggactgctggaactgaaatgtggtgagcgagccccctttcgagtgcggcccgaagaggtgggcgttgtgctgctggcccacccgcagatttcaattactcaaccggttctctccgcgctcactgccgcaggcggagttcttctcacctgtgatgaacgccgtatgcctgccgggatgatgctcccggtcgatggtcatttcacccaaaccgagcgtttcgccaaacaggcagcctcaaagctaccgctgcgcaagcgattatggcaacagatcgttcgcaccaaaattcgcgggcaagccgaggtgctggaagaaatttttggagaagatgccgggatgagagcattgattccccaagtaggctccggtgaccccagtaacgtggaagcccgtgcggctcggaagtactggccgctgctgttcgacgacgatggtttccggcgcgaccgcgatcgcaatgaccaaaaccggctcctgaactacggctacgccgtgctgcgagccattaccgcacgcgcgatctgtgctgttggtctgcatccgtcggtcggcctgcatcacaagaatcgctacaacgccttctgccttgcagatgacctgatggaaccgttccgccccgtggttgatctggttgtcgcccgtcatgtggagggaggtggtgatacggaactcgactcgcaaagccggcaactattgattggctccctgttgggacgctgcattgttgaaggaaaacagttgacgctgttcgactcattggccgagctgtcatcatcactggttcgtgtcattgatgccggctcgggatcactcaccttaccggaaaggctatggcatgcctcgggccagcctgattgattcgggatttcgaaatatgtggatggtcgccatgtttgatctgccggtgcagaccaaagtcgaacgtcgagccgcggcccgatttcgcaagatgcttcaacgagaaggcttctcgatgctgcagttgtcagtttacgcacgatattgtggcagcgaggaatcagccaagacattccgtagccgtattggaaaatcacttcccaaagacggcaacatccgcctgatcaaaatcaccgaccatcagttcggcaaaatggagagcttcatcgggaaaaaaccagtcgaaaatgagtctactcccaaccaactggagctgttttaatgcctcctttcatcgtaagtgattgtcgctgttcgagaagtgtccgaggtagtgtatccgagcaacgcttcccaagcagccacagcctgtacacgctaaggtgaattacgtcgaaaagtgtatccgagcaacgcttcccaagcagccacagcctctgagtgtgtccacggcacgccgtattagtgtatccgagcaacgcttcccaagcagccacagcaagaagccagttctctgttcacgaccattaagtgtatccgagcaacgcttcccaagcagccacagccccagggcacacctaatgccctgcgttattcagtgtatccgagcaacgcttcccaagcagccacagcgaattcaagcggccaccggccaaggccatcagtgtatccgagcaacgcttcccaagcagccacagcgggctgccggaagtaccgacgcgtcgattaagtgtatccgagcaacgcttcccaagcagccacagccaacgcagcccgtagcgaaacagaagctgaagtgtatccgagcaacgcttcccaagcagccacagcaagagtgtgggtgcctcgtgttcgacgatgagtgtatccgagcaacgcttcccaagcagccacagcccacgatcgtgcttgggcggttctcaagaagtgtatccgagcaacgcttcccaagcagccacagccgatttgatcgatgcgctgcgtttattggaagtgtatccgagcaacgcttcccaagcagccacagcccttaacgcgcagactttacggatcgaaagagtgtatccgagcaacgcttcccaagcagccacagccatccgcaagtacggtgcatttcttctggcagtgtatccgagcaacgcttcccaagcagccacagcggcgacgttcgcatgctgtgcgcattgcaaagtgtatccgagcaacgcttcccaagcagccacagctggagaaggtctggaaggcgtatccctaatgagtgtatccgagcaacgcttcccaagcagccacagcggctgcggggtgcattgttgtcacggctccagtgtatccgagcaacgcttcccaagcagccacagctcatcaaatcccgctggaggaaactgcaagaagtgtatccgagcaacgcttcccaagcagccacagcactatgtcagcggtgacgccaacgcaactgagtgtatccgagcaacgcttcccaagcagccacagctgcaggaatagtcggtggtgcctttgggcaagtgtatccgagcaacgcttcccaagcagccacagcgcaggtcagtcccatagcaggcggcgatgtagtgtatccgagcaacgcttcccaagcagccacagcggtggtgttctcgcctgggcacaactaccagtgtatccgagcaacgcttcccaagcagccacagctgaatcatgtcgagacgacggctttccgaaagtgtatccgagcaacgcttcccaaacgaatgtttggtggtccactctataaacttgacacatttcaagaccaaatttagctctgtgatttatctaactgaccatacaacacgaatcctgcggtggatttgataactgctaataagtacttggccaggtgcgataaaaaaccgctggaacgtgctaacagcgagataattttctaacatcgcgagcggcaatcagtcggcagaagcaatcacatttccgcaaccgactgttgtgcaatgacttgcaactcggcaccgcgatcaaggtttacttcgcattctcatctgagggcgcgaatcttgaatcggttgcggagcacttgcagcgttttgctcaacgcgcatggcggcgaccagtggagatggaggagttagagggctatctaaggctgtttagttccgagcgtgatgcaggtggctctatggcccaggcctttattgtcgcgatgaaaggcgtgttaacctccaggcacttcatctacctggttgagggtgagccgatggcccgtgagcgcctcagtgactgggaactcgcatcgcggctctcgtattttctttggggttcgatgcctgacgatgatctgtttgcggccgctcgtaatggcgcattgtctgggaaagggttggcgcatgaggtggaccgcctgttaacggatcgcagaagtgatggctttatagaggatttcacacgacagtggctgcaattgcaccgtctgggcatgttcacgccggataagcatatctaccccacctacgatgcgtggcttgagacgagtctacgtaatgagccgatagaattctttcgtgagatgttcgagaagaacctgtcggttgaggactttattgattctgactggacgatggctaacgcccgtctctgcgatttctatgggttttcagagccaaaattcgggggattccagcgcatatcattggggcccgaggatcatcgaggcggactgttgaccatgggctcggtgctcggattgacttcggatgggacacgtcaccgtccggttcaccgtggtgtatggctcagccaggtaatccttaacaggaccccacctgaacctccggcgaatgtggaacccattgaagccagttcatcgagggagcagaaaaaaacgattaggcagaaaattgaatcgcacgccacgaatgcaaattgcgctgcatgtcaccgtggcatcgatccgttggggctggcctgggagaattacgatgcgatcggacaatggcgtactcgtgaacgagtcctcgaaggtgtgggggagaatccactggtcgacgcttcaggtgtgatgcctgatggtcgcccgtttgctggtccccgccagttcaagcagatattgctggaggatcgtgaccagttcttgcgggcatttgttgagcacctgtttacatatgctttacgtcgagtgctgactgtggacgatcggagtgacctccaattggtagttgaggaggtgacgaaaaatcaatatggacttagggacatcgtgcgagcggtagccctgtctgacctaatgcaaaaacgctagctaataaggttaactgtgagccattttctttcccaatcttggttgattgaccgccgccatgcactccgtgcattgggtagctgcatacctttgccaatgctggaatgtatgtcaccactccgagcggaagagccggcttcgatgccccgccgcagtgtgttcgtttatctggctaatggtgtcaatctgctcgattatcagattactacaccgggtaaaggctacgagtttagcaggtcacttaagccattggagaagcaccggaagtttattacacccattagcggattacatcacccgggtgggattggtcatgctcacagctgcactgatatctggctgacgggggccaagcttggtccctcagatcgcaacaccatctctgtggatcagaagatggccgaagttactgctcaacacactcggtatccatccatagaggttgcggtcaaccaggggtctctcgccaggactgccgaaggggtcgcgcttccaccgatgcgtagttgcagggaaattttcgcgtcacttttcaaagaaccaactggcggaattgaggcacagaggacggcattacgtcacaaagggagtattcttgatgccaaccttgcggaggttcgacggctcgacaaaaaaatgggccaggcggataaaggacgcatggaacagtatctcacttctgttcgtgaggcggagatccggacttggcgggcagatgcctggctcgacacggcactaccacatatttccgatgacgtgcgtgcacgcattgaccgcgacattccacaggcaaatgcgggtgactatttccgcacaatttatgacctgattctgctcgccttccagacggatgtgacgcgcgtggccacgttcagcatgggtggcgaagggaatgcgattcctatacccgaaatcggtattacacaaacacggcatgcgctgagtcaccatgccggagatccgctctaccttgaaaggctcactatgtatgacacatttgccgtcgagcaatttagttatttcctttcacgactctcagaaaccagggatgtcaacggtcagccgttattgggctcgacgatggcgctgtttggtagcggcatgagccatggtaacggccacggtaatgcaaacctgccattagtacttgctggcggatccgacattgggctggagcatggctgtcacctggactttaaccagggccacttcgaaggctaccagatagataaaccgagtgaactctaccgcctcagcttccgccccgcgaaccctgacgctcgtatgagtaacctattgcttatgatggcccagcgaatgggagtagcggcttaccagttcggagacagcaacaaggtgatcgaattatgacatgccagaaatttattggctggggtacggcatcatgtctatttgctttcttaattataagcgacgccgtcgctaccgaacctttcaggccagaaagaggaaagtttccacctcgggaaaaggctgctacctataagggtgagctcgtatttgtagaccatgcgaaccgacgcggcagtatccgtgtggcgggggaagggcggtactttcgtaatcccccacgaccgtttgccatgcttccctacggcatgattcgttatcacggtgctcctgcggacctgagagatatcccgcttggtactatcctgcacggtcgattctaccttccgccagatcctaaggtgtcttctgttccagaggttggcgaatcgagcaatgtgtatccgtacccagctgaaaatcacgcagtcctacttgaagatgaggtcagcttctgcctgcgcgagggcatggtctggaagttaaagggggtcgaacttaataaaagcgaaggggtgatcattgccagccgtatgtcgcagaatggtgatgtgggcgagaataccgaggaaaagctaaccatagatgcaacgaccagcatttggcgcggtcgcgaaaagctaagtctcgctgacttaattactgaaagcgtttggcccgcaaatggaaagaaagcccttggtgggcagactatcctgttggggctcacctggcaaccaaagggaaattggataacgaaggtaaatgatcagtttcatgtctcggatatttggttggacgacatagcgatgcagcgcgccacccagcaccaatcggaggttcataaggagttgatcaggagccgctggatgcctgcatgggttgattcgcttgagtatgggaagtctggtcatgcaacggttacggtgacactgtttggcggcatggactcttcgttatatgccgacttcaaaacaggaaatcaggggcagattgctgcagctgaaacgaatctaaaattttcggatggattctacgggcatgaccacatggccatcaagggcatcatcctggaggtcataaaacaggacgaagatattccttcgggaagtagtgggataaaaattcgtttgaaattagaccttgtcctcgaaggcttccgtcccggaaacattgttcgcatccgtcccatgagttggcccaatgattcagtgcctcgggaggagtttgtagtaggcggttccataagtggccttggtgaacggtttcccgactcggatgtctttcccaagtacgatcagcattaactatcccctagacttggcaggctgtttagtccgcaatattggatgaccaattctgcctccaaattgagcttgtacacaagaatggagactggacagaccaatcgagagagtgggagtgacacgccgattactgacaaattaatgcatgacaagagatcaacagatgactttagacgctgcaaggggaaagggcagtcggctcagcgatcaataaatccacccgggctggaacatatggctgatgttttgctttgttaccgatttaagagtgtatgcattcttaaagaataaagagaaatggttgacctgcccactttttcacaaattagaaacccaatcccaagtcttgcaccgtgcaggagattgcgaaaacaggcaccgtcttaagagagtgttggtgaataatttatagccaatgtcatccagatcgatcagggccattaattcatcatcagatggtagaaataacttttgagcattgctggctggcagtattcgagaaaattaatacttaagtaatttttatgcgattgcacttaatagaaacattagtatttgggagcgttgtcctctcatttgttgatttacacgctgaagacaacaaaccgaacgtaatcctgatcgtctgcgatgatctcggctggggcgatgtcgagttcaatggtgactgcgatattccaacaccgaatctgaatcgactcgcgcaatcgggtgtagtgatggatgcagggtacgcaactcatccatattgcagtcccagtcgtgctggccttttgaccggacgttaccaacaacgatttggccatgagtgcaacccaagcgaaggcgacgatacgagcggattgcctttcgaccaagttctcctgcctgaattacttcatcctcatggttatcgaaccggcgcgattggcaagtggcatcttggtgatgctccgaagtactggccaactgaacgaggttttcatgaatggtatggctttagtggaggagcactcaattattggggaacggccaagcagggcaagccgaaatcgggtgtgcttcgagatggtatgccagttgatcctaagcgaatcaactatctgaccgacgacttcacatctgaggcgatcgggtttgttcagcgaaatcgtgagcaacccttctttctgtacttagcttacaacgctccgcacgctcccgaccacgcgaccgagaattatctcaaaaaggttgagcacatcgagtacggcgggcgggctgtctatgctgcgatggtcgtcggtatggacgcagggattggacgcttgctggataccctcgaaactctgaagttgagggagaatacaattgtcattttctacagtgacaacggtggccgttcgactcatgcaaacaacctgccctatcgggggcataaaggcatgttgttcgaagggggaatacgagttccattttgtatttcttggccaagcgttttgcctaatggaatgcgatacccaaatatggtttcggcactggatatctatccgactgttttggctgcctgcggaatcgcgaacccgactgacgccaagctggatggtgtgaatatcgttccgcatttgactggcccaagcgacgctcctccgcacgattcgttgttctggcgatacgcggttgacgaagagcagtacggctatgccgtgcgccaggcaaacatgaagcttgtcatcagtcagtacaagaactgctcattactgtttgacttggcaaatgaccctggcgaacggcacgacttggttcatatttatcctgaaaccgctgaacgcctggaagaattgatccgcctttgggacacagagaatcaatcaccacgctggctggacccccacggaaagaatgttcgaaaggagaggaacgaacgtgagcgaatcattcaagaatcactaccacctaagttcaatcgtgacgcaacacttcgccgctgatagtccacactggagtgtcagcggctttcacctgagcggaagggacaccccgcgagcagcagagataatttctgtagttgctggaggtggacaactcaggggctgcgctcctgtgtcggaccgttggtcatcgatatcaatattgccacgacatttacctggagctgcgcataactctgtgggaatggcttatagacttggaacagggaaccagctttatggcatggacacgaataattgcactcaatgcagcccgtaaatacttacgaaaatggaccagccggaggagtcgccagttagtcaatagcgcatccgatttcgtgagttgcgcccacaaaggacaaacaattatcagcagacgctcagctgcacttttcagtacatttactacttacattttctggagcaagagctaatgtttaactcgcaacgtcatggttttacgatagtagaacttctggttgtcattgccatcatttctgccttgattgccctgctgcttcctgcggtccaacaagcccgtgaggcggcccgtcgttcgcagtgccaaaacaatctgaagcaaattggactggcactgcataactaccacgacaacttcaaaacattacctatcggagtgcatagtgattttagggcaccgtatcaggatttgaagggaaagtcccctgagtcgctttgtggaaacttaactatctatccatgggatgttagctggagttggacagtagcgatttatccatacat
